United States Patent Application Publication US 2011/0183924 A1 - sequence listing, part 118

SEQ ID NO: 339033 - DNA, 1712 bp, Homo sapiens
gacctgaagagctaccggaagctgctcctgtgggggtatcagctttcccaggagcagttcccccacaggagcagttccggtaggggtatcagctttcccagcctgacgctgcctccaggctggacactgaggaactccggttggtggaaagagatccacaaggaagcagcctcccagaaggcgggaggcggcaggagagcgctgggtgcgcctgcgaggaggccgcccccgcgggggtgctgcctgagctgcctacggaggcgccccctggggacgcccttgccgatcccccgtcgggcaccactgaggaggaggaagagcagcctgggaaggccccggacccgcaggacccccaggacgcggagtccgactctgccaccggatcgcagaggcagtccgtcatccagcagcctgccccggacaggggcacggcgaaactgggaaccaagaggccgcaccccgaggatggggacgggcagagcctcgagggcgtctctagctccggcgacagcgcagggctggaggccgggcagggccctggggctgacgagccgggcttgtcccgcgggaagccctatgcctgcggcgagtgcggggaggccttcgcgtggctctcgcacctgatggagcaccacagcagccatggcggccggaagcgctacgcctgtcagggctgctggaagaccttccacttcagcctggccctagccgagcaccagaagacccacgagaaggagaaaagctacgcgctggggggcgcccggggcccccaaccgtccacccgcgaagcccaggcgggggctagggcgggcggtcccccagagagcgtggagggcgaggctccccccgcacccccagaggcgcagaggtgagccgctgtgctgtcccgttccggaggggccgctttgccggccgtgaatcccagacgaggcattgggcctttccacgcccctgggtggcggcttcctgtggtgtttgtggacgtcctctgcctgtgccctgaatccgctcctgaggctaagcgctcccaacgagaagggtccacgggaagccctcacctctgtaaacacaccctgggccagcgctcgcatccgaggggagccgccggatgtggaagaagactcggctttcctgcagccatttagtgccgccccatgctaggttatttgacattgtgcagtgtagagttgccttaaagtgcgtgatctgccagtgctttcttcaagtcacccttgccccgattcctcctgtttgcgctccccagggttgctcaagtggaaattttgtcagctgtttagccttttcgtacttggcgtgatgtcaacttcacttctaatctgcaaaagcagaagctgtttcctagtttacctcgcgtgtgtttacctatatggagtagctcgcagagatcacagaaatgcttgcagcctaaggcagggttttcagaccgtgggtcccagcccatttagtaaaatgggaaatcaattagcaagtggtcaccagcattacacagcaatgaagcagaataaagtaggccagaatgcatcatgtagtaaaggcaaatactgttttgtgaaacttttcacccatacatctaaatgtgagaactggttgcaatgtaagacatttcttgctgggaagttgtgagcaaaataagttgaaaacactaataaagatctgtctgtctgagcaaaggagactaaactccttgggct

SEQ ID NO: 339034 - DNA, 2561 bp, Homo sapiens
aggcgcagtttgccggccgccatcgcgcactggggctccgggcggctgggaccggcctggggtagctgcgcagcaggtctgtgggttctggcaccacctgagcccactgggcatctggtcatccctggcacctctcctttggagccaccttgtccctggctagacagtcacattttccagtgccgttttggaaagatgttgcctttggagaaggcgtttgcctcccccaggagctccccagccccgccggatctgcccacgccggggtcagcagccggagtccagcaggaagaacccgagaccatccctgagaggacccctgctgacctggagttctcccgcctgcgtttccgggaatttgtctaccaggaggctgccgggccccaccagaccctggcccggctgcatgagctgtgccgccagtggctgatgcctgaggcgcgctccaaggagcagatgctggagctgctggtgctggagcagttcctgggcatcctgcctgataaggtccggccctgggtggtggcacagtaccctgagagctgcaagaaggcagcctccctggtggagggcctcgctgatgtcctggaagagccagggatgctgctgggctcccctgcgggctcatcctcaattcttagcgatggagtgtacgagaggcacatggaccctctgctgctaccaggcgagctcgcgagccccagccaggcccttggagctggggagatcccggcaccttctgagacaccctggctttctccggaccccctgtttctggaacagaggagggtcagagaagcaaagaccgaagaggacggccctgccaacaccgagcagaagctgaagtcctttccagaggaccctcagcacctgggggagtggggccacctggaccctgccgaggagaacctgaagagctaccggaagctgctcctgtgggggtatcagctttcccagcctgacgctgcctccaggctggacactgaggaactccggttggtggaaagagatccacaaggaagcagcctcccagaaggcgggaggcggcaggagagcgctgggtgcgcctgcgaggaggccgcccccgcgggggtgctgcctgagctgcctacggaggcgccccctggggacgcccttgccgatcccccgtcgggcaccactgaggaggaggaagagcagcctgggaaggccccggacccgcaggacccccaggacgcggagtccgactctgccaccggatcgcagaggcagtccgtcatccagcagcctgccccggacaggggcacggcgaaactgggaaccaagaggccgcaccccgaggatggggacgggcagagcctcgagggcgtctctagctccggcgacagcgcagggctggaggccgggcagggccctggggctgacgagccgggcttgtcccgcgggaagccctatgcctgcggcgagtgcggggaggccttcgcgtggctctcgcacctgatggagcaccacagcagccatggcggccggaagcgctacgcctgtcagggctgctggaagaccttccacttcagcctggccctagccgagcaccagaagacccacgagaaggagaaaagctacgcgctggggggcgcccggggcccccaaccgtccacccgcgaagcccaggcgggggctagggcgggcggtcccccagagagcgtggagggcgaggctccccccgcacccccagaggcgcagaggtgagccgctgtgctgtcccgttccggaggggccgctttgccggccgtgaatcccagacgaggcattgggcctttccacgcccctgggtggcggcttcctgtggtgtttgtggacgtcctctgcctgtgccctgaatccgctcctgaggctaagcgctcccaacgagaagggtccacgggaagccctcacctctgtaaacacaccctgggccagcgctcgcatccgaggggagccgccggatgtggaagaagactcggctttcctgcagccatttagtgccgccccatgctaggttatttgacattgtgcagtgtagagttgccttaaagtgcgtgatctgccagtgctttcttcaagtcacccttgccccgattcctcctgtttgcgctccccagggttgctcaagtggaaattttgtcagctgtttagccttttcgtacttggcgtgatgtcaacttcacttctaatctgcaaaagcagaagctgtttcctagtttacctcgcgtgtgtttacctatatggagtagctcgcagagatcacagaaatgcttgcagcctaaggcagggttttcagaccgtgggtcccagcccatttagtaaaatgggaaatcaattagcaagtggtcaccagcattacacagcaatgaagcagaataaagtaggccagaatgcatcatgtagtaaaggcaaatactgttttgtgaaacttttcacccatacatctaaatgtgagaactggttgcaatgtaagacatttctggaagggaggatgtgaacaatttaagtcgcaatcactgataatgatcttattgtctgagcaatggaacttaactttc

SEQ ID NO: 339035 - DNA, 1790 bp, Homo sapiens
aggcgcagtttgccggccgccatcgcgcactggggctccgggcggctgggaccggcctggggtagctgcgcagcaggtctgtgggttctggcaccacctgagcccactgggcatctggtcatccctggcacctctcctttggagccaccttgtccctggctagacagtcacattttccagtgccgttttggaaagatgttgcctttggagaaggcgtttgcctcccccaggagctccccagccccgccggatctgcccacgccggggtcagcagccggagtccagcaggaagaacccgagaccatccctgagaggacccctgctgacctggagttctcccgcctgcgtttccgggaatttgtctaccaggaggctgccgggccccaccagaccctggcccggctgcatgagctgtgccgccagtggctgatgcctgaggcgcgctccaaggagcagatgctggagctgctggtgctggagcagttcctgggcatcctgcctgataaggtccggccctgggtggtggcacagtaccctgagagctgcaagaaggcagcctccctggtggagggcctcgctgatgtcctggaagagccagggatgctgctgggctcccctgcgggctcatcctcaattcttagcgatggagtgtacgagaggcacatggaccctctgctgctaccaggcgagctcgcgagccccagccaggcccttggagctggggagatcccggcaccttctgagacacgtgagtgcccagctagcctggcagcctctgctgggccttaggtggggtgttgggcagaggcctgtggttgggagagggcagaagggcagccagggagtcaggggctccatggtccatgctatcattgggacttcctcctgtagtttctctgaatgttagacattgtttattaaattagtcttcagagattatgcagatcatccatacttaccacaaatagtgaagaaacatcaatacataaagaaaagaatctcccaacccccgaccatgaaccctctgaaaataaagggtctcaagtgtcctgatgcacgtcccctcatgtctccctgcacatcacacatgcataatcagggcctggggtcgggctctgtgtgtgtggtgtgctgtgtctgagtgcttgctgttcgaggggtgggtcccccaggctgtggttgggtctggttctttagttgcccagcatcgcgtgctcagcccatccccatcctagaggtgggctctctgccccttggagtgaagctgccctgacacctcctgacttgtgtgcccatatgtgaggctctgggcactgtgggtggactcctcaggaccactgggcaagtggtgtgtgagttcgacatttcacataaaatagaaacttccatgtggttttccagaagttttgtggctgttcattaccagcacggaaggtgcccactggcctggatacagcccagcactatgtggtgttgctttttaggatttccacgaaggccaggcacagtgcctcatgcctgtaatcgcagcactttgggaagccaaggcgggcagatcacttgagcccgggcattcgagaccagcctgggcaacatagggagaccccatctctacaaaaaatacaaaaattagccgggtccgcacttttagtcccagctacttgggaggctgaggtgggaggattgcttgagtccaggaggtggaggttgcagtgagccaagatcatgccactgcactccagcctaggtgacagagcaagaccctgtctttaaaaaacaaacaaaccaaa

SEQ ID NO: 339036 - DNA, 256 bp, Homo sapiens
tttgattcccacgtccctccacgatgcattccccagcttcctgggatgctgacaaggctgcttcaggcagccacagtaaaaccaatgacatcacgaactcacagctagcagttttgggtgggaacatttagcttttgtaaaacacaacattttcatcccacccttaacctgactcctttttttttttttgggagacagagtctccctcttggcccagggtggattggcagggggcgtgatctcggctcactgcaag

SEQ ID NO: 339037 - DNA, 219 bp, Homo sapiens
aaattatgacaataaatgatatggtaaagtatgctaacaataaatggtaataaattgtattaacaaatgcaacatgttatcggtaaattatgaaacattcgtaatagtaatatataacccataaagtgggcagaatggaagggaaaaaacctatttcttaggttttaaaaatcagacatttttgtatccgggtgtggtggctcacgcctgtaatcccag

SEQ ID NO: 339038 - DNA, 841 bp, Homo sapiens
aaaaaacatcataggatactcgacctcacggatactcaagaaatacaaattgaaatgaatactgtttcccacatactggattggcaaagattataaagatgtgtaaaacctggtatggacattggaaaatcaggcattcttgttctgagttcatttatgcatgcaacagatagcaactcctgtgttcaggcatgttctaagcactggggatacagcactgaacaagacccccacctttaaagatcataggttccaactaggtgaaagctgatagtaaaaatatatattatttttgagggaattaagtacaatgaagaaaaagcaagaaaagataaatgataaggtaggccattttttaaagggcggctgagggaggatcctctggggcagtggcattagagcagagaccaacttgcctggaacacagtagcacgagcagccatgcagccatccagggggagatcagcccaggcagaggaaagatgtgcagaggttctgagcaggggcatgctggatgcagtcaaggactggcagggtgtccagagtggctggagcactgtggataaaggggagagggagagcagatgggcaggtgggatggtagaggttgctctgaggtcacggtaaggatgaccttaccacggttggcttttttctcaaatgtcacaggaagccactggaaatttttaaacaaaagaatgatgtgatccaatgtatatcataaaagtatcactgactactctgatgagtacaccgtagtggggatgtgagcagtggttagagagttcattttgaattgaatgtattttgttactctctacctgtttcacttattgtaagg

SEQ ID NO: 339039 - DNA, 224 bp, Homo sapiens
aaaaagagaaatgcaaaagcgaagagaagcagagtcgcacaggaatgttattctttcaaaagataaaagtataaaaccagaacttctggaagaagaaaatacgcattcttaccactgcctaaaaagaaaccttagtttctggttaatcctcaggaaatatcagagaaatgctgattttttttttttcaaggctgaccaaaaagtccacttctgaacacagcttt

SEQ ID NO: 339040 - DNA, 272 bp, Homo sapiens
ctcccaaagtgctgggattacaggcatgagccactgcacccagccccttttcgggcttcttactctttttcaccttgcctcaggccctgagtagttccagctactttcacttcttctttaccaccttccctattcagtccatccacttgtgagagttgtggagggcagcaggggaagcatcagttgtcctacaaaacctgactgcactacagggcaacagtctctttagccactctcctccatgttgccctgaagattaacactctgggcat

SEQ ID NO: 339041 - DNA, 572 bp, Homo sapiens
tcccaagctcaggccttaagaagctctgatgtcctttttattggagacaaggagcggctggagaggtgtttgatttttacctctttccccttgccctcgccccctgactatcaatataaggtagaaaatacagaaaaaatataaagaaacagaaagaaaaatataatcccacatacacaaccccagctcccagaagccactaaacctaacatcttagtatatttcccccaggtgtgtttttttctgcaatttttctttacacagcaggaaggttatgttacatgtacatttttacagttttaacttcactttagcacataattattttccttcgtcactaaacctcacgttacggataacttaccctttcatcttacagataggtcatataattattccttattttgaactcacaggttgtttctaggttttcattactctaagtttacaacaagcacccttgtgcacgatggtttatcttatttgaatgactgggatttctgggtttgctgagcagctgtattttctgtttagagtgtcaggctgcctctggaatgcttgagaagcaccag

SEQ ID NO: 339042 - DNA, 638 bp, Homo sapiens
agaatcacaaaggggagtaggggtcattttttcacccatctcggatcacagggagaagcaagttgggcaaatgactggagaaaaaacaaaggcaagccgagtgctggggagagatgttcccctgaagtgagacggggctggaccgtaggagaaaggggagagggagggctggcgggggcaactgacagctgacagcagaggcgccgaggcggaggctggaggaaccaggtgcgaatctcgtgcttctcaggggggaaaagaaaaggggggggacacctgctcacaatggattttctcatctgctctgaggttttggcaccccccaggctggtattctcagtatggtatggtccaaataattagcagcaccgccagctcccagggcaggctttgggggtctgcaccagcagcaaaacaataaacagtgatgcctgatgctgcagccaaagttgccgggaaataagtgcgggaatcgtcagagcttggagagggatggaggaaccgagagagaggagcggaggcagcggggagggggaagggaggacaaagggtggatgaataatgcttttgcaaaggggagaaagcaacacgcagcaggaggaggaaatttgcaaagagaaaaaaattcatttggagaa

SEQ ID NO: 339043 - DNA, 361 bp, Homo sapiens
acagaaacagggaaaatacttgtaagtaggagtcatggaaggcaagaggataagtgagaagcaggtcatggatagatagaggcagaggattaatgtcaaaccaagggcctgtctcatttagcagactagattcacaagtgctatcttggacacttggtattaagtcaacttcgaggtcacatggtgataggtcacatgatagtgaactgacgaatgtcgtcagcaatactcagtgttctttagagtctgaggaggacgagaatggaggaaagacttctctatggagtgataatacttggtgatcactagggacctgcgctcctcccctggctttaaacaagagagaatgattggaatggaa

SEQ ID NO: 339044 - DNA, 658 bp, Homo sapiens
gaggcacagggaggagaaggccatgtggagatggagcagacactggagttatattgccacaaggcagggaacacctggagtcactagaagctggaatagaaggcatgaattccacctagagcctttggagggcacatggttctgccaacaccttggtttcagaattctggcctccagaactatgacaaaatgaatttctccgagttaagccaccaagtttgtggttatttgttagacagtcctaggaaactaatatacttgagaaacttaaacaccagaatcaccttagaaaagtgatttctgaaagcaggaaaaaaaaataaggtgactcatgattgtatcttcaaagctagtttctataccataggatccaacgtgcctggcacactgcacatcctcatcagttgccacttcatccccatacgcattccagaaacccattctgttaccaccatatggctactgcccaaccacagctactctccaaagtctgcatttcctaattaatttagactaaaactgcattagaatcaccacatataatctgccagaagccctgaaaatcctggagattctgattcaggaaacctggggtggggcctaagtatttgcatgtttaacaagcttcacataagatactaatgtcgaccaaagactg

SEQ ID NO: 339045 - DNA, 1672 bp, Homo sapiens
gcgcgggatcgtccggctgcggggtccggctcacgccgggcgggcgggcggggcgcgctgtcccggagccggccagccccgtgcggatccactcgtcccgcttcctctggatctctctaggagctgacactcgaaccttcacgacccattcggatttttccaggactcaggagtggcactgggaagaaggggaccgctttctgcaattggcctcgacactggctgccaagaagacctgtcgcctttgtttttaagtctccagaaatggaagaagaaggcgaagtcagttgaagtcacgagaaatcagcgaggcatttgaaggcgcttcctgaaaacctttattccctggcacgttgtctgtttcaacagccctgcccctcctcggagcctgcttgtggaattcttccccttcgggtgtgtggtggcattccccgccacgtccaatgtggactccaaaggatttgtcccttctttgtcatttgaaatgaaatgatggccacgcgtcggactggtctgtctgagggagatggtgacaagctcaaggcctgcgaggtctcaaaaaataaagatggaaaagaacaaagtgaaactgtatcactgtctgaagatgaaacattctcctggccaggtcccaaaacagttacgttgaaaagaacatctcaaggctttggttttacattaagacattttattgtttatcccccagagtctgcaattcaattttcatataaggatgaagaaaatggaaacagaggagggaaaacaaagaaaccgcttggaaccaatggataccatatttgttaagcaagttaaagaaggaggacctgcttttgaagctggattatgtacaggtgaccgaattataaaagtcaatggagaaagtgttattggcaaaacctattcccaagtaattgctttaattcaaaacagtgatacaacattggaacttagtgttatgccaaaagatgaagacattctccaagtgaatctggaattctctacattttacaaaaataccattgccaagtttttgcaattaagtgacatggaaatgttatgttgattctacagtgaactcttaatgctctcatttagaatgagattcctaaagagtttgtcctagtgttgccttctagttcatccttggaccaaaggaagagtttagagtgcaagtgcatatccccaggaattagaatctttttttttttccttctcactatgtacagagaaaaaaaaaaaatagaatcttatttttgtaatacgaggacaaactttatgattgccattttctaattttccaataaatattacgtttgtaaattcaccaagcagtattgttagtagtatccattcgttcctaaaatgttcacaatgaacggagtctacaacttaaggggaaaatatgttatggtcttgaaatgaaacttgaaaactttagtatttagtctaaaatatttttctgatttttataaagaaagaaattgaatagaatacttaactcctttactaagcttaaatactgctgatgataaaaatataaatttcatctgggcacggtggctcacgcctgtaatcccagcactttgggaggccgaggcgggcggatcatgaggtcaggagttcgagactagcctggccaatgtggtgaaaccctatctctaccctatctcta

SEQ ID NO: 339046 - DNA, 1802 bp, Homo sapiens
gcgcgggatcgtccggctgcggggtccggctcacgccgggcgggcgggcggggcgcgctgtcccggagccggccagccccgtgcggatccactcgtcccgcttcctctggatctctctaggagctgacactcgaaccttcacgacccattcggatttttccaggactcaggagtggcactgggaagaaggggaccgctttctgcaattggcctcgacactggctgccaagaagacctgtcgcctttgtttttaagtctccagaaatggaagaagaaggcgaagtcagttgaagtcacgagaaatcagcgaggcatttgaaggcgcttcctgaaaacctttattccctggcacgttgtctgtttcaacagccctgcccctcctcggagcctgcttgtggaattcttccccttcgggtgtgtggtggcattccccgccacgtccaatgtggactccaaaggatttgtcccttctttgtcatttgaaatgaaatgatggccacgcgtcggactggtctgtctgagggagatggtgacaagctcaaggcctgcgaggtctcaaaaaataaagatggaaaagaacaaagtgaaactgtatcactgtctgaagatgaaacattctcctggccaggtcccaaaacagttacgttgaaaagaacatctcaaggctttggttttacattaagacattttattgtttatcccccagagtctgcaattcaattttcatataaggtaagagaaatagttaccgcaaggaaaacaaagaaaccgcttggaaccaatggataccatatttgttaagcaagttaaagaaggaggacctgcttttgaagctggattatgtacaggtgaccgaattataaaagtcaatggagaaagtgttattggcaaaacctattcccaagtaattgctttaattcaaaacagtgatacaacattggaacttagtgttatgccaaaagatgaagacattctccaagtggtaagttttatttattcatatatgagttgttttacagtcatgaatgttcggaaaatatttttgagatggaagtattaaagatggaatttaaaaaaaattctagaatttaaaaaccctctggttccttttacagaatctggaattctctacattttacaaaaataccattgccaagtttttgcaattaagtgacatggaaatgttatgttgattctacagtgaactcttaatgctctcatttagaatgagattcctaaagagtttgtcctagtgttgccttctagttcatccttggaccaaaggaagagtttagagtgcaagtgcatatccccaggaattagaatctttttttttttccttctcactatgtacagagaaaaaaaaaaaatagaatcttatttttgtaatacgaggacaaactttatgattgccattttctaattttccaataaatattacgtttgtaaattcaccaagcagtattgttagtagtatccattcgttcctaaaatgttcacaatgaacggagtctacaacttaaggggaaaatatgttatggtcttgaaatgaaacttgaaaactttagtatttagtctaaaatatttttctgatttttataaagaaagaaattgaatagaatacttaactcctttactaagcttaaatactgctgatgataaaaatataaatttcatctgggcacggtggctcacgcctgtaatcccagcactttgggaggccgaggcgggcggatcatgaggtcaggagttcgagactagcctggccaatgtggtgaaaccctatctctaccctatctcta

SEQ ID NO: 339047 - DNA, 1792 bp, Homo sapiens
ggcctagcgcgtcccggccgggcccggcgcccggccagcgtctccgcttcagctcgccgccgcgcttcggccgccgggcccgagcgggcgggaagggatctctctaggagctgacactcgaaccttcacgacccattcggatttttccaggactcaggagtggcactgggaagaaggggaccgctttctgcaattggcctcgacactggctgccaagaagacctgtcgcctttgtttttaagtctccagaaatggaagaagaaggcgaagtcagttgaagtcacgagaaatcagcgaggcatttgaaggcgcttcctgaaaacctttattccctggcacgttgtctgtttcaacagccctgcccctcctcggagcctgcttgtggaattcttccccttcgggtgtgtggtggcattccccgccacgtccaatgtggactccaaaggatttgtcccttctttgtcatttgaaatgaaatgatggccacgcgtcggactggtctgtctgagggagatggtgacaagctcaaggcctgcgaggtctcaaaaaataaagatggaaaagaacaaagtgaaactgtatcactgtctgaagatgaaacattctcctggccaggtcccaaaacagttacgttgaaaagaacatctcaaggctttggttttacattaagacattttattgtttatcccccagagtctgcaattcaattttcatataaggatgaagaaaatggaaacagaggagggaaaacaaagaaaccgcttggaaccaatggataccatatttgttaagcaagttaaagaaggaggacctgcttttgaagctggattatgtacaggtgaccgaattataaaagtcaatggagaaagtgttattggcaaaacctattcccaagtaattgctttaattcaaaacagtgatacaacattggaacttagtgttatgccaaaagatgaagacattctccaagtggtaagttttatttattcatatatgagttgttttacagtcatgaatgttcggaaaatatttttgagatggaagtattaaagatggaatttaaaaaaaattctagaatttaaaaaccctctggttccttttacagaatctggaattctctacattttacaaaaataccattgccaagtttttgcaattaagtgacatggaaatgttatgttgattctacagtgaactcttaatgctctcatttagaatgagattcctaaagagtttgtcctagtgttgccttctagttcatccttggaccaaaggaagagtttagagtgcaagtgcatatccccaggaattagaatctttttttttttccttctcactatgtacagagaaaaaaaaaaaatagaatcttatttttgtaatacgaggacaaactttatgattgccattttctaattttccaataaatattacgtttgtaaattcaccaagcagtattgttagtagtatccattcgttcctaaaatgttcacaatgaacggagtctacaacttaaggggaaaatatgttatggtcttgaaatgaaacttgaaaactttagtatttagtctaaaatatttttctgatttttataaagaaagaaattgaatagaatacttaactcctttactaagcttaaatactgctgatgataaaaatataaatttcatctgggcacggtggctcacgcctgtaatcccagcactttgggaggccgaggcgggcggatcatgaggtcaggagttcgagactagcctggccaatgtggtgaaaccctatctctaccctatctcta

SEQ ID NO: 339048 - DNA, 1598 bp, Homo sapiens
tcatacacctgaatttaagtgtcagaatactgttccatgccaaaagttttatgctgcaagttagggttaaagctaaaacctgttagaattgagaatgatggcagtagcagcagcagggatcattaagtggcatttcggcagaagcctggattttaatgtattgagtggggcctatcactagataagagccatcagcaaagtgagtacccagatctaaagaatttctccgtaaattgttagtgttccttcccattcatttcttccaggttaagcgttttatgaagttcattgtgccttgatgttcttcatttctttagttactaccaggtcaagtaatctagcacaaaggtctcaaaaaataaagatggaaaagaacaaagtgaaactgtatcactgtctgaagatgaaacattctcctggccaggtcccaaaacagttacgttgaaaagaacatctcaaggctttggttttacattaagacattttattgtttatcccccagagtctgcaattcaattttcatataaggtaagagaaatagttaccgcaaggaaaacaaagaaaccgcttggaaccaatggataccatatttgttaagcaagttaaagaaggaggacctgcttttgaagctggattatgtacaggtgaccgaattataaaagtcaatggagaaagtgttattggcaaaacctattcccaagtaattgctttaattcaaaacagtgatacaacattggaacttagtgttatgccaaaagatgaagacattctccaagtggtaagttttatttattcatatatgagttgttttacagtcatgaatgttcggaaaatatttttgagatggaagtattaaagatggaatttaaaaaaaattctagaatttaaaaaccctctggttccttttacagaatctggaattctctacattttacaaaaataccattgccaagtttttgcaattaagtgacatggaaatgttatgttgattctacagtgaactcttaatgctctcatttagaatgagattcctaaagagtttgtcctagtgttgccttctagttcatccttggaccaaaggaagagtttagagtgcaagtgcatatccccaggaattagaatctttttttttttccttctcactatgtacagagaaaaaaaaaaaatagaatcttatttttgtaatacgaggacaaactttatgattgccattttctaattttccaataaatattacgtttgtaaattcaccaagcagtattgttagtagtatccattcgttcctaaaatgttcacaatgaacggagtctacaacttaaggggaaaatatgttatggtcttgaaatgaaacttgaaaactttagtatttagtctaaaatatttttctgatttttataaagaaagaaattgaatagaatacttaactcctttactaagcttaaatactgctgatgataaaaatataaatttcatctgggcacggtggctcacgcctgtaatcccagcactttgggaggccgaggcgggcggatcatgaggtcaggagttcgagactagcctggccaatgtggtgaaaccctatctctaccctatctcta

SEQ ID NO: 339049 - DNA, 422 bp, Homo sapiens
ttacagtatggtataactctattatttaattttaattttgtgtttcttcatacacctgaatttaagtgtcagaatactgttccatgccaaaagttttatgctgcaagttagggttaaagctaaaacctgttagaattgagaatgatggcagtagcagcagcagggatcattaagtggcatttcggcagaagcctggattttaatgtattgagtggggcctatcactagataagagccatcagcaaagtgagtacccagatctaaagaatttctccgtaaattgttagtgttccttcccattcatttcttccaggttaagcgttttatgaagttcattgtgccttgatgttcttcatttctttagttactaccaggtcaagtaatctagcacaaaggtaatattcagtttcttttgttctttg

SEQ ID NO: 339050 - DNA, 1805 bp, Homo sapiens
gcgcgggatcgtccggctgcggggtccggctcacgccgggcgggcgggcggggcgcgctgtcccggagccggccagccccgtgcggatccactcgtcccgcttcctctggatctctctaggagctgacactcgaaccttcacgacccattcggatttttccaggactcaggagtggcactgggaagaaggggaccgctttctgcaattggcctcgacactggctgccaagaagacctgtcgcctttgtttttaagtctccagaaatggaagaagaaggcgaagtcagttgaagtcacgagaaatcagcgaggcatttgaaggcgcttcctgaaaacctttattccctggcacgttgtctgtttcaacagccctgcccctcctcggagcctgcttgtggaattcttccccttcgggtgtgtggtggcattccccgccacgtccaatgtggactccaaaggatttgtcccttctttgtcatttgaaatgaaatgatggccacgcgtcggactggtctgtctgagggagatggtgacaagctcaaggcctgcgaggtctcaaaaaataaagatggaaaagaacaaagtgaaactgtatcactgtctgaagatgaaacattctcctggccaggtcccaaaacagttacgttgaaaagaacatctcaaggctttggttttacattaagacattttattgtttatcccccagagtctgcaattcaattttcatataaggatgaagaaaatggaaacagaggagggaaaacaaagaaaccgcttggaaccaatggataccatatttgttaagcaagttaaagaaggaggacctgcttttgaagctggattatgtacaggtgaccgaattataaaagtcaatggagaaagtgttattggcaaaacctattcccaagtaattgctttaattcaaaacagtgatacaacattggaacttagtgttatgccaaaagatgaagacattctccaagtggtaagttttatttattcatatatgagttgttttacagtcatgaatgttcggaaaatatttttgagatggaagtattaaagatggaatttaaaaaaaattctagaatttaaaaaccctctggttccttttacagaatctggaattctctacattttacaaaaataccattgccaagtttttgcaattaagtgacatggaaatgttatgttgattctacagtgaactcttaatgctctcatttagaatgagattcctaaagagtttgtcctagtgttgccttctagttcatccttggaccaaaggaagagtttagagtgcaagtgcatatccccaggaattagaatctttttttttttccttctcactatgtacagagaaaaaaaaaaaatagaatcttatttttgtaatacgaggacaaactttatgattgccattttctaattttccaataaatattacgtttgtaaattcaccaagcagtattgttagtagtatccattcgttcctaaaatgttcacaatgaacggagtctacaacttaaggggaaaatatgttatggtcttgaaatgaaacttgaaaactttagtatttagtctaaaatatttttctgatttttataaagaaagaaattgaatagaatacttaactcctttactaagcttaaatactgctgatgataaaaatataaatttcatctgggcacggtggctcacgcctgtaatcccagcactttgggaggccgaggcgggcggatcatgaggtcaggagttcgagactagcctggccaatgtggtgaaaccctatctctaccctatctcta

SEQ ID NO: 339051 - DNA, 1743 bp, Homo sapiens
  misc_feature (49)..(49): n is a, c, g, or t
  misc_feature (51)..(52): n is a, c, g, or t
  misc_feature (59)..(59): n is a, c, g, or t
  misc_feature (75)..(75): n is a, c, g, or t
  misc_feature (100)..(100): n is a, c, g, or t
attgtttatcccccagagtctgcaattcaattttcatataaggatgaanannatggaancagaggaggaaaacanagaaaccgcttggaaccaatggatnccatatttgttaagcaagttaaagaaggggaccgctttctgcaattggcctcgacactggctgccaagaagacctgtcgcctttgtttttaagtctccagaaatggaagaagaaggcgaagtcagttgaagtcacgagaaatcagcgaggcatttgaaggcgcttcctgaaaacctttattccctggcacgttgtctgtttcaacagccctgcccctcctcggagcctgcttgtggaattcttccccttcgggtgtgtggtggcattccccgccacgtccaatgtggactccaaaggatttgtcccttctttgtcatttgaaatgaaatgatggccacgcgtcggactggtctgtctgagggagatggtgacaagctcaaggcctgcgaggtctcaaaaaataaagatggaaaagaacaaagtgaaactgtatcactgtctgaagatgaaacattctcctggccaggtcccaaaacagttacgttgaaaagaacatctcaaggctttggttttacattaagacattttattgtttatcccccagagtctgcaattcaattttcatataaggatgaagaaaatggaaacagaggagggaaaacaaagaaaccgcttggaaccaatggataccatatttgttaagcaagttaaagaaggaggacctgcttttgaagctggattatgtacaggtgaccgaattataaaagtcaatggagaaagtgttattggcaaaacctattcccaagtaattgctttaattcaaaacagtgatacaacattggaacttagtgttatgccaaaagatgaagacattctccaagtggtaagttttatttattcatatatgagttgttttacagtcatgaatgttcggaaaatatttttgagatggaagtattaaagatggaatttaaaaaaaattctagaatttaaaaaccctctggttccttttacagaatctggaattctctacattttacaaaaataccattgccaagtttttgcaattaagtgacatggaaatgttatgttgattctacagtgaactcttaatgctctcatttagaatgagattcctaaagagtttgtcctagtgttgccttctagttcatccttggaccaaaggaagagtttagagtgcaagtgcatatccccaggaattagaatctttttttttttccttctcactatgtacagagaaaaaaaaaaaatagaatcttatttttgtaatacgaggacaaactttatgattgccattttctaattttccaataaatattacgtttgtaaattcaccaagcagtattgttagtagtatccattcgttcctaaaatgttcacaatgaacggagtctacaacttaaggggaaaatatgttatggtcttgaaatgaaacttgaaaactttagtatttagtctaaaatatttttctgatttttataaagaaagaaattgaatagaatacttaactcctttactaagcttaaatactgctgatgataaaaatataaatttcatctgggcacggtggctcacgcctgtaatcccagcactttgggaggccgaggcgggcggatcatgaggtcaggagttcgagactagcctggccaatgtggtgaaaccctatctctaccctatctcta

SEQ ID NO: 339052 - DNA, 1871 bp, Homo sapiens
ggcctagcgcgtcccggccgggcccggcgcccggccagcgtctccgcttcagctcgccgccgcgcttcggccgccgggcccgagcgggcgggaagggatctctctaggagctgacactcgaaccttcacgacccattcggatttttccaggactcaggagtggcactgggaagaaggggaccgctttctgcaattggcctcgacactggctgccaagaagacctgtcgcctttgtttttaagtctccagaaatggaagaagaaggcgaagtcagttgaagtcacgagaaatcagcgaggcatttgaaggcgcttcctgaaaacctttattccctggcacgttgtctgtttcaacagccctgcccctcctcggagcctgcttgtggaattcttccccttcgggtgtgtggtggcattccccgccacgtccaatgtggactccaaaggatttgtcccttctttgtcatttgaaatgaaatgatggccacgcgtcggactggtctgtctgagggagatggtgacaagctcaaggcctgcgaggttaagcgttttatgaagttcattgtgccttgatgttcttcatttctttagttactaccaggtcaagtaatctagcacaaaggtctcaaaaaataaagatggaaaagaacaaagtgaaactgtatcactgtctgaagatgaaacattctcctggccaggtcccaaaacagttacgttgaaaagaacatctcaaggctttggttttacattaagacattttattgtttatcccccagagtctgcaattcaattttcatataaggtaagagaaatagttaccgcaaggaaaacaaagaaaccgcttggaaccaatggataccatatttgttaagcaagttaaagaaggaggacctgcttttgaagctggattatgtacaggtgaccgaattataaaagtcaatggagaaagtgttattggcaaaacctattcccaagtaattgctttaattcaaaacagtgatacaacattggaacttagtgttatgccaaaagatgaagacattctccaagtggtaagttttatttattcatatatgagttgttttacagtcatgaatgttcggaaaatatttttgagatggaagtattaaagatggaatttaaaaaaaattctagaatttaaaaaccctctggttccttttacagaatctggaattctctacattttacaaaaataccattgccaagtttttgcaattaagtgacatggaaatgttatgttgattctacagtgaactcttaatgctctcatttagaatgagattcctaaagagtttgtcctagtgttgccttctagttcatccttggaccaaaggaagagtttagagtgcaagtgcatatccccaggaattagaatctttttttttttccttctcactatgtacagagaaaaaaaaaaaatagaatcttatttttgtaatacgaggacaaactttatgattgccattttctaattttccaataaatattacgtttgtaaattcaccaagcagtattgttagtagtatccattcgttcctaaaatgttcacaatgaacggagtctacaacttaaggggaaaatatgttatggtcttgaaatgaaacttgaaaactttagtatttagtctaaaatatttttctgatttttataaagaaagaaattgaatagaatacttaactcctttactaagcttaaatactgctgatgataaaaatataaatttcatctgggcacggtggctcacgcctgtaatcccagcactttgggaggccgaggcgggcggatcatgaggtcaggagttcgagactagcctggccaatgtggtgaaaccctatctctaccctatctcta

SEQ ID NO: 339053 - DNA, 325 bp, Homo sapiens
agcaggtgggttgcataaaaaatatagcatctagatcagggacaaatggaaaagaaggcgatattactgcattaggttcccagaggtgctatacaaacagaaacatgttttctaaatggtgaaacaggtattgaaatgactctttatcagaactatgagtctttttcgcaagagaaattggatttactagttgaatgtttttctcttcctctggccacaaaggatattggggcaacttgagagaggaatcaataatgtagagtctgatggacactcaatgatcagcctcataatctgactacataagcacaataaaacaaagtca

SEQ ID NO: 339054 - DNA, 677 bp, Homo sapiens
ctgggggtggatgggaatcacagctggggtctactgtgattagcaatgtgtgtgggggtggagatggggtctgtgagagcctaataaaaccttaaagccaaatgggctttacctaccgggtttaatagttttaaacacagacagcaagctaccctgcctgttttcatttcttactattaccattgacttgatttttttctttgaagtggcccagggcttccaacccaatcctgtttatttgtgtttccgggggactatatcagcaacttggtgccctttcttttgtgtaatcctttggacgtcacttccccacaaaaggaagcatggtccccattagccaggtaataaaatgtaaacactgcagaaaattccagctttctttgcagtttgtgtgttttcttctctgaaaacccatacactgtgccagctcaggtttgtatcatctccagtgttttaggtttttaaagcgaattaattgttttttgaaataatgtacctctatcttctagttaaaatgcatctgaactcagtctcttctaggggacctaacagatctgcgtgtgtgtttttaaacatactttgataattataccctactccaaagactaatgcagacccaaagtatatgcagtaatcctccacatataaagtaagactagcgtgcctttgactggtgg

SEQ ID NO: 339055 - DNA, 366 bp, Homo sapiens
atatctgcagtaaccatactatgatataaaaatccctgttttattggtgacagtatcacaggcgctagtagtgcaattgcggtttattggctacagtcgtaattaaagtgagtgctgaatgtcagaaaatagagatgtaacttttttcttgttcaagttcgtggatcctctggatttaacagattaagtatccttggctgaggatcacatagctaattagttacagtgccatctgagcaagacagtgatacttgttgaccacctctttgcacataacactgtaccggatattatataattataatgacccgaagaaggcctggccttaacttggtcatgggttttttttttttttttttttttttt

SEQ ID NO: 339056 - DNA, 608 bp, Homo sapiens
caacaccaaataccaactgctttaatgttttacttttgtacttagaagtccagttaagcacatagctaataatgccaaatttctgggttcagggtcaatttccctggctcttcttccatcttcccaggttatacccctcactctacctagctattaagaattcttgcacatatttcacccataggtgggattgctaaatgatgggtccttgattaaatctatcctgactcctggtaaactgtctagtccaggactgaagcccataaaagggattaaggctagacagatagatattgagaatcctccatggagatgattatgaaggcccagggagtagatttctctcaaagaggaagaaaaaaacagcagaggcagaactttagaaaaggctcacatttggcagatggtagaaagaggaacctgtgaaggaaaccaatgcagaagcaacagtgaaataaaggaagcagcatagtgcagaggcacaaaagctgctgcaggtgaatgtttcaaaagaggggatgattaaatgttcagagagagcaaaaggtataaatcctaataaatcccatttgatttgggggttgggcgataacatcgtttttcatcaa

SEQ ID NO: 339057 - DNA, 307 bp, Homo sapiens
aaaatactaaaatttgccatcacacttagtggtcaaagactgaaaaatttatcccctctgatcaggaacaaaacaaggatgtcatctctcaccactccttttcaacactatacggaggttctggccactgcaatacagcagcatacagaaatcgcatatggaatagaaaggaagaaataaaactgtttctggtttgcataaaacataaatgtctgcctgaaaaattccaagtattctaggaaaaaagaaagctcctcaagcaaataaatgagtttatcacatgtggtattagtgagaggacaaatac

SEQ ID NO: 339058 - DNA, 915 bp, Homo sapiens
gtgaggccagtgagataactttctgctgacaccccacagcatcctcgttccttctgccggacttccagatttctatttctggcccaaacctctctcctgaacatcactccatggattcgtctacaaccacttctagtattttcttccacagccagggaagaagtccataaacagctcccggctacatcatacttaggacgcccagaaaaatgtatcagtatatcacatctcagggaaaccttttattgactctgtttaggtgatgtgctcaacaataattcaccacatggcccaggagccaccaccctggaccacaaaccccatagcagatgcagtcagtacctcactcatatacccttggctcactccaaaggttacctgcagatagttcctttatgacccggtgtgtctgtctgtcggagggagttctttagcccctagagtcagcttggctgacatgcagggcaggctggaaatgctgtggaggtaacaactcaggagcaagccacatccggtgaggaaaaacaatagaggacagataatcctgttccttacccttcagtgggataattttgaggtgtgttctccacagttttgcagaaggcttagagagactgagtcacagttgtcctcagtggtaacctgctcattaatgcatcctttatttggttttcctcctctctctgacttcccttccccctcactgtgttttctgggataaactcccaaataaactacttgtaccaaaatccttgccttgggatctgctttctgggaaatcaaaattaagacaacccctgtaaagggaggaggccatcttcctgagtgccccatcaagaccacagggaccagggggagatcttagaccccaaaaccacattgtgacaatatctttgctgacatcccactttattt

SEQ ID NO: 339059 - DNA, 746 bp, Homo sapiens
gtgaggccagtgagataactttctgctgacaccccacagcatcctcgttccttctgccggacttccagatttctatttctggcccaaacctctctcctgaacatcactccatggattcgtctacaaccacttctagtattttcttccacagccagggaagaagtccataaacagctcccggctacatcatacttaggacgcccagaaaaatgtatcagtatatcacatctcagggaaaccttttattgactctgtttaggtgatgtgctcaacaataattcaccacatggcccaggagccaccaccctggaccacaaaccccatagcagatgcagtcagtacctcactcatatacccttggctcactccaaaggttacctgcagatagttcctttatgacccggtgtgtctgtctgtcggagggagttctttagcccctagagtcagcttggctgacatgcagggcaggctggaaatgctgtggaggtaacaactcaggagcaagccacatccggtgaggaaaaacaatagaggacagataatcctgttccttacccttcagtgggataattttgaggtgtgttctccacagttttgcagaaggcttagagagactgagtcacagttgtcctcagtggtaacctgctcattaatgcatcctttatttggttttcctcctctctctgacttcccttccccctcactgtgttttctgggataaactcccaaataaactacttgtacca

SEQ ID NO: 339060 - DNA, 793 bp, Homo sapiens
ctacagaatatcaaaatcaaagttcataaatcacttgagcagaaaagactgcaatttgtttagcactgacctttcaaagcatctcagcacttacgcacaccctcacacaacaaagtttaattttctgacgcaccaaaccgggtcttcatctccaataagttgtgtgtacctaaaccaattattcattctttcactgcctgctgcacactgctctaagggtaatacacacaatagcaaaagacataaatgtttatgaaatccttttaaaatctcatttaccattgaagaagtactaaactaccattggcaaagaagtactaaactacagtgcagaaaatacccatgctccatgatcaactaataagtgcagctggctgggcctctgtccttttcctcagtgctagttgactccctttcccaaaccaaatctgaggtatccttacccccaatccttcctgccttcaccaacaaagatggccccaaagtatggacttctgcctctgcttctccttcccacctaagtctactaatacaaactctttatcaggactgtctaattttttcctattctctctgataaactcacctctcccccactaaatcctccccattggccaaaaaaataacataacaataaccaaactattcagtctcccatccttaaaaagaaggagaagaggagaggagggaagggagttcctgtaagttctcactttgaagatacggcgttcccttgtccatctcagccatgtctcaagagaagacccagtgccacctgctgccaccatcctgt

SEQ ID NO: 339061 - DNA, 658 bp, Homo sapiens
actagatggcagcaaccaaggattattcctgctaaagatgtataaactgaatctaaccaagcctcagacacaattcccatttaacaaaaaaatgtaagggaaagagggacgagttacataactccatcaggaaaaaaacagacagataaagaaacaatcaggacattctacagaacaaccggcctgctagggtgaaaaaatcaatgttacaggaaaaagaaataggtatggggtgtaggggcagtttctgtgctatagcaggagacataacaactgaatgcataccaactcaactatgaatagattctgaacggtcccacagtctggggatttttgaaaatggaccattagaatgtcagagaattcgtgtttattttcttaggtataatagtcttaaagtggtacaggagaatatccttattctccacggatgcctaatttaggggtaaagcatcctgatgtctgtaatttactttcaaagggttcaacaaaaaaatccagaattacgtatacacataaagcaaaagtagcaaaatcttaacaattattgaacctaagtggaagatgttaactgtactaatctttcaacttgtatgtttgaaatttcacataataaaaagaggggtggccagaagcgcgtggccagaagcctgtaatc

SEQ ID NO: 339062 - DNA, 777 bp, Homo sapiens
gagctcggtacccctgacggaggagagggacggcagcctgtaccagagctctgggtaccgctatggcactgtcataaaagacaaagcaagaaaggatgggtatctgttctgcttaaattatttgtcctttagtgaggggtaaggggatcctagttgaagttatgagaggtaaacatttgatacaacctctctgtgcctttttactgtgcagtaagatgtgtggtttggcttctcagatgactggatggtgatgctatattggaactcttgattctatgtgtcagactccaccctcgatcacccaaggcagaagagggattgatgtgttggcctggagtcccaggaagatcagcaacagagagtgggcagctcaggcctccggcagcaaattaacaggacatgggcagcccagaggcaaagtgacttccccattgtcctggttgtaaaggctgaagggtcatgatgctgatctaacattggtaacagctggactttattgagcacttcctgggtgcctggcagtatttgttttcatcaaccttatgagatgggtcctgccataccccactttcctgatgtgtagggactcatcgacctcctcaagatcatatagttacttatttgtggctgggcatgatggcttgcacctgtaatcccaacactttgggaggccgaggcaggaggattgcttgagccaggagttcaaggtcagcctaggcaacatggtgagatcccatctctacaaaaaaattagccaggtacagtggtacgtgccta

SEQ ID NO: 339063 - DNA, 464 bp, Homo sapiens
cagagttttctaactgtgtggttattttgtagacccatagtacttttagagctggaaggtacctttgtacttgcttggtttgatgaagaaactgaggcccagagaggtgacatggctatgcaggacacacagctggttagaaagcacagaatcggtgggtgcttatgtgtctacatgctcgatttccgcttgatctgatctgtccatcacaaacacagattagagcctgggactcgggtcaccgatgcttggaaatgttattcgggagtttgtttatgttgtttttcctttggaaaatggtgatttctcattttgattgaggactgaaatctcagaacgttccttgggcagcacagaaatatcaaaatgctcttaggagtcgcgtgtgtgaacactgaggcccgggtgactgttccattcgaagggttagctctacttcccatttttgggagtagacttagtac

SEQ ID NO: 339064 - DNA, 215 bp, Homo sapiens
atgtacgagcctgtctgaggcattttagacaagggagaaggtgcctacacaagtaccaaacaatgcagtgttaaaactgctttccataggtggcaatcttctatgatgcttaagcattgtaaagcagtgacatttgttcatgtggacataattaaaataattgaggccgggcgcggtggctaatgcctgtaatcccagcactttgggaggctgag

SEQ ID NO: 339065 - DNA, 328 bp, Homo sapiens
aatttgctagactttctgggaaagagaactttgatcctaatgaatttttttaaatggccccctcattcccactaagagagatctttcatcaacctccaggaggcatgccttgggaaactcgccctaggatagaagagtgctgaagagtatctgggctctgtcctggattgtgtcctaaatgttagtgagaagacccatttttgacttgacattggataggatcactaaataatcctgacatgcaactctggggtaatttgttccatgttctcaagcaaactaagtcttaaaaaagcaagctgctcctttgggaacctcaccaaaaagc

SEQ ID NO: 339066 - DNA, 401 bp, Homo sapiens
  misc_feature (318)..(318): n is a, c, g, or t
  misc_feature (320)..(320): n is a, c, g, or t
  misc_feature (368)..(368): n is a, c, g, or t
actaagaaatctagaggcacaattttagaagagaaaaaaattctatccccttaggaagtatttttacactgaaaaaaactaacctaatattttaggaaaatgtaaatagattcctgaaattccactgccaaaaatttaatgaggcttacagttttatggacaaatttacgttaaaaactgtgatctgaagatcaaacaaaggagtagggtgtaaaagaaaaccatgccactagaatcactagattttccttttgcataaaaaaaatcatgccattaatgtgtggaagcagcgaacacacacacacttctcggtgaatntntacttcctgctgacatttcttccacgaatttctcaatactggcagtanaaacttatgatccttgactgaccgttcgctgtt

SEQ ID NO: 339067 - DNA, 410 bp, Homo sapiens
atccacgggtaagagaggtcatgagtttagtgcaacctcagtattcaacagctgcaacatttctaaacgcttactctcagtattcttctccttgtcacagcttagtaacaaaatgtttcctgagccagcacactcttcacactacactttgagtagcatggctctatggaacagagataatggatttaaattcaacaacatccacatcttccttcttggagtagaaggttgttctaggcctgacctctcccagggagctacaggggaagtctagttggcatggacacctttgagcagggagggcagaactttctctctgacagaaaactgttacttggtaggggacttggtaagttgaaggtataggaagtgttataaattcctttgaccccttgctattctcactagag

SEQ ID NO: 339068 - DNA, 122 bp, Homo sapiens
ccatggggcccacaccccgtctccatccatgtctgggtataagcccttcccaatggagcctcttcacaaattccacagcaccagtcactgtgagatggaatttaagtgacatcagagggcct

SEQ ID NO: 339069 - DNA, 461 bp, Homo sapiens
tgtttctggccatgtcttttggtgggcatatacactcatttctgttgagaatatgtctgagtgaattggtgaattataggataggcatgtcaagctttagtagcttgttggactttattataaaagcaggatttgtactttagaaagatcattttgtatatggatgagtggttgaagtgataagactagaggcaagtgagactagttaggtgcctattactcatacccagttatggactgagatgtaaattaaggcaaaggcaatgaggctgaggaatgagaatgaagtgggacgatataggagatggaagaggttggattttggggggatgagggagtaaggatgatctgtacatttatgacttgggtcattaagtcagaggctagaaaaggggtgagcttttagaggaataaaatgaatttccttatgtatgtgttaaattagagttgtctgtgaatta

SEQ ID NO: 339070 - DNA, 144 bp, Homo sapiens
agtgagaatatagtatttggtgatatgtggatgttaggaatgagggagaggcagaaggaaaaagattcagggaagccacatagatttctagcttggatgactaggtacatggtagtgctaactggggaaaatgaagagagaata

SEQ ID NO: 339071 - DNA, 349 bp, Homo sapiens
ctttattttgaacatttacatgaaataaatgaatgcattgctaattgttaaccagatgagaagaacatgagtgagactgtataaagactcagtggaatgcatttgactgaagatgatggtcaatatgagagttaccaaacacagcccttccctggtttaaatggacagtgtgcagacgtttcctctttttatctgtcaaaaacatggacgctatcaacgtgcttcatgtgatttttagagaactccatttaataaaaaggcatgtcccacgaaacacagagaaatccccttataaccctgagttcagaggacaatcaacatcttcaaggaaattacgcgacaccaatgc

SEQ ID NO: 339072 - DNA, 445 bp, Homo sapiens
tagaggcagggtttcaccatgttgcccacgctagtctcttaactcctgagctcaagtgatctgctgcctcagcctcccaaagtgctgtgattgcagtcatgagccactgtgcccgacctttttatctatattgatttttgacattgaaactaagctctcttggttttaatgttattctgttattcagtcattcagtgatatggtttggctgtgtccccacccagatctcaccttgaattatgataatccccatgtgtcaaggatggggccaggtgagataattgaatcatagcaggtggtttcccccatactgttctcgtggtaatgaataagtctcatgagatctgatggttttataaatgggagttcccctgcacacgctctcttgcctgcccccaggtaagacatgactttgctcctcattcacctgcctctatgtcatttt

SEQ ID NO: 339073 - DNA, 416 bp, Homo sapiens
cattcttgtattagtttcccatttatgtgcaaccaattactaccaacttatcttggcttatccaaatattctgcttagggtctctccaggatgtaaccctgatgtctgctggctgcatactcacctggaggcttgattagggaggagtcccggtgagtctcactgaggttgacagaactcatctccttggactgtgtgactgagaatactggctctcccagattgatggctggagactgccctcaggtcctagaagccactccagttctctgccacatatgcaattatgacacagcagtgtgcttcttccagattgggaattgttatttacccacaaaagttcccagttctcttttaagggctttcatccaattttaagtaagatccagtcaagataatgtcccttttgcttgacc

SEQ ID NO: 339074 - DNA, 222 bp, Homo sapiens
ggtaaaatagacatttttactgtgtgaacaatacaaaatgtaaaggaatttagaaacaagtcaactacaccacattaaaaaaatgcctgaattaagatgaaataaaagtgatagcagagtctcttttatagtcagggaaggctccccaaaccttggtgaatggaaacatggcttactaggaaccaggtctgttcttggttaaggctaaggttggatagggag

SEQ ID NO: 339075 - DNA, 355 bp, Homo sapiens
atgatgtcaaagttggcatcccaaaattcctgagcgatatttttcaatggttgtacagaaagcatctttctgttaaagttgtcgtgttttatcttgtttttaacaaagctgagacaaattttcccactgactttcactcacagttcaaaaatgtgctcttacaggaaaacctaaaagaggggaagggaaatagcctccagacacataaacacacccgagaagtcagatgaattctatttaacaacaacaaacaaattcctaagtattatactctataaaggcagagtgtcctggaaatgccatctggtgccgtgcaatctggattcctgtgagtgccagggacaagtggctgaac

SEQ ID NO: 339076 - DNA, 455 bp, Homo sapiens
agtggatgagactaatggcgaagaggacagagtgcttccatgccttcgggatctttcaaatgatggagcaaggctctgcgctcacagctgcaaggcgctaagggacctgagactctgtccctgccatcaaagaccttgtggtcaggaaaagatgtcccaaatggttacagctcatggcaggaacaggggagaagcaacttctgggtagcgagatgagtgttgttaaaaaataaataaggacccacaggcattctaagtagggaggcagagtgtggcaagcaagggggaacatctgtgaagatttctgggaagaggcggcattcaagatgttccttgaaggatagataggatttccggagctggagaggagaagctagggcaagaggcccgttctgggcaacagcaaggtcatggggcaggtcagagcagaacacagtgtcctggggcagtgggag

SEQ ID NO: 339077 - DNA, 198 bp, Homo sapiens
aaaatatgtgttgattagatcttggagtgggaaaaactttcttttatagaaccacagggagaaattgcaaaagggaaattaaacagaattaaaaggtaaactagaaaaagacattaacaatatgttggacaaagattaccattcttgttatatactgcttttagaagtactaagaaatgaaattgacagacaacatca

SEQ ID NO: 339078 - DNA, 566 bp, Homo sapiens
acatgttttatataacactccctataatcagtggcctgtatttacagggtatgtaacttggagtctacaaactgtggtagaagacagtgtttccatgagaaacaattgtttttcaaagactcatcttagtatattcagacacaaatagttagaagagctcagaagcaactaattacttaaagggcctcaaggatatttctggatagaatgaaaataatatatgtcatgaactgaaattcttcccatacaaagaaattccagtttgactacctttaaagtatttagacaattacaagtgatttaatactagtttcaattcaagataaaacttggttatgtaattaaatgcaaacagagattaagtataaaaattagtaaaaatatgttcaaatgtgaatcaaaacaaaaacaaaaaatagcttcttaaaatcaaagacaacaacaataatagaaaaataccttgcagttctgtagcagtcgtatgagatgttcaaagcaattgctgttaagaaaaatggcctgaagaacaggtctatctgtacaatctaacatggctgtgatggtat

SEQ ID NO: 339079 - DNA, 366 bp, Homo sapiens
gcaggcatggtggtgcgcacctgtagtcccagctacttgggaggctgaggtgggaggattgcttgagcccgggaggcagaggttgcagtgagctgagattgctccactgcactccaacctgggcaaaagagccagcccctgtctcaaaacaaaaaacaaaaaattaagctggaaatggtggcatgcacctgtgggtctagctacctgggaggcagaaggatcgcctgtgcccaggagttaaaaaacaaaaatgcaaatgatgctagaaagtttctttaagggttagagagctaaccatttaaggttcaaaaactaatctggctgcatgcacttatcattcagtaagaagtccctgagaacctctgg

SEQ ID NO: 339080 - DNA, 383 bp, Homo sapiens
taccttccctctgacacaatttcccattgagttgatgctttctgactagctgtacaaacgcctcctccaaaatgttgctgcgatcctaagggaattgtgcaattcttcagaaaacccacacattctcctaaactgtccactgactaaaagcattctttccttccagatgggcattggtccctgggctgtacaggcagcccaagaattgtggacactcccagccatgccagagagggaagggccatcttctctttaacctttaagatttggggatgtcagagaattaggatatttgagcatgagttttggagccagactcactagggttcaaccactcgctagcttttaaccttgggcaactcatttaacttcttgaaatctgt

SEQ ID NO: 339081 - DNA, 122 bp, Homo sapiens
gaatagtcttaagactcagaaaacagggtagccaacggaaaaagaggaagggccgggcatagtggctcatgcctgtaatcccagcactttgggatgccaaagtgggtggatcacttgaggcc

SEQ ID NO: 339082 - DNA, 200 bp, Homo sapiens
gcagcacaggagacagaacgtcttctcaaagagttggagcagaatgcaaaccacccacaccggattgaaccggatagcttgcgctatcaggtcaattctgcagtctcagtgtcttcccaaataaattatagacatcaaatgtctggtgataccaaaaactacttgtaccctaaaagtattgaaataaaaagtacataaat

SEQ ID NO: 339083 - DNA, 259 bp, Homo sapiens
ctccacctcccaggttcaagcagttctcctgcctcagcctcctgaaaagctgggattactggcgcctgccaccatgcccggctaatttttgtatttttagtagagacggggcttcaccatgttgcccaggctcgaactcctgacctcaggtcatcctcctgcctcggcctcccaaagtgctgggattacactgcgcctggcctgtaattgattttttacgccacatctttctggacactgactatgtcatacaaacact

SEQ ID NO: 339084 - DNA, 237 bp, Homo sapiens
tcatcgagctcggacccttagggatcttattaaaattgcaacgcatccctcctttaatacccctaatctttttcttctcagtacttattaccatctccagcgttatctattttgtttatctggctagaggttactctatatgtaccgtttgctgtagctgtaggtagcagaagttaaactttcctgtggtatccttatgttcatatcctctgttgtccttgggtttccctagagaca

SEQ ID NO: 339085 - DNA, 846 bp, Homo sapiens
taggcaaggccagaggcagagagggatgcaaatggtggtgtcagaaataaaaaaaaaaaaaaaaggaaaacattggaaactactcttgaattgatttaggtgggaaaagatggaagactttgaggaaggaaaagacataagacctaagttcagagcccagctgagatcaagtattcatttgtaatgaagcaagttgccatttccggagtgtccagcagcctgggggaggagaaggaatccaatgggttagggtcagaattagaggagttccggatttagtaacatttaaagagctgtccaagggtcccaagctgggcaaggaaagcccaagcgatgctgacagcctgagagaatataaagaactgaacgtcttcataagagttttttaaaaaaataaaagcagatattccaggggtaaggaaatgacagaagtggcgaaagagcaagttggagctacaaggtgggttgtcctagttctttgcagaagaaattcaggctctaagggccaaggtataaccaaggtgatgggtgagcgttgtgctgttggtttgtctcaggagactcttaagtcccatgagggcagggattatgcagctcgccttctttacatctctagggctgagtgcagtccctggcacataatagacacacagcaaacattggagggaaccagcggctagggtagggtggaaactaagatcttggtgttgaggcattcaggtatctctaaggtgaggatgctggacaggtttcactgttacagtcactgagggaaatcacaggagacctagtaaagagaagtatagagacttgtattaaaatgatcaagaattgtgggaaaacttc

SEQ ID NO: 339086 - DNA, 311 bp, Homo sapiens
acattttgaattttggtgtcacaatttacatcttattatactgcatgtcctgtaacaaattattgtagttattatttttactaatttagtcttttaacctttcttctaaagatataagtgatttaaacaccaccattacaatattagagtattctaaatttgactatgtacttttaccaatgagttttatatttatagatgttttgtgttactagcattaacacatgtttttgtattattagcattcttttattccagcttgaagaactccattaagcattttttttaacacaggtctggcaatgataaac

SEQ ID NO: 339087 - DNA, 156 bp, Homo sapiens
tcttcacgtttttgtgaagatcctatgccattcctccatggccatgttatgattactgattccacttagcagggcttctggtattgagatgagggtcacatacaggatggggggaggtaacattaagatttcactgaactattcactgtgtattag

SEQ ID NO: 339088 - DNA, 288 bp, Homo sapiens
gtgatccgcccgcttcggcctcccaaagtgctgggattacaggcgtgagccacctcaccttgccgaggatgtttttttagagctgagtaggggaaaaaacatcataaccaactagccaaccaaagatccacaacttacaggataacgtgtgtgtatcttcattttacaccgtggtctttgaaaacaaaatgtgtgtgtgcatgtgtgtgtgtgtatgtgtgagatttttgcttgttgttttattgtttaagacactttgacagagggattacgtgcaaaacattaaca

SEQ ID NO: 339089 - DNA, 491 bp, Homo sapiens
ctggacccagttagcagggagaacacgtgtgttttgatgacagactatgccaagataggtaatggatggagaagaaatttgggctttagagggggatacatgattcccctttgagaatagatgttgaaggagcaggagggtatcctgttgggaagattcataagaggggatgcagaggagaaggtcgtccacatattgaataaggtgagaaacagatggacagaaagaaagtaaatcatgagaaagagcttgactaaagtaatgggggttgtctctgaagccttgtggcagtacagtccaggtaagttgctgagattggtgggtgacaggatcagtccatgtgaaagcaaaaagaggtcgggatgaggggtgcaaaggaatagtgaagaaagcatctttgaggttgaggacagaataatgagttgttgagggaggtattgaggataggagagtatatgggtttggcaccacggatggataggttagacaat

SEQ ID NO: 339090 - DNA, 130 bp, Homo sapiens
catcatcagatgcctgcgggtgaaggtgggcccgctatggccagcgtccctttttatttttatttatttatttatttgagatggaatctcgctctgtcgcccagactgtagtgcagtggtgcgatcacgg

SEQ ID NO: 339091 - DNA, 683 bp, Homo sapiens
gggctcttttttggttccatatgaactttaaagtagttttttccaattgtgtgaagaaaggcattggtagcttgatggggatggcattgaatctgtaaattacctttggcagtatggccattttcacgatattgattcttcctacccatgagcaagggcaattaggcaggagaaggaaataaagggtattcaattaggaaaagaggaagtcaaattgtccctgtttgcagacgacatgattgtgtatctagaaaaccccattgtctcagcccaaaatctccttaagctgataagcaacttcagcaaagtctcaggatacaaaatcaatgtgcaaaaatcacaagcattcctatacaccaacaacagacaaacagagagccaaatcatgagtgaactcccattcacaattgcttcaaagagaataaaatacctaggaatccaacttacaagggatgtgaaggacctcttcaaggagaactacaaaccactgctcaaggaaataaaagaggatacaaacaaatggaagaccagttccttttgtctagtcaaggtgatctagtagtcttcactttaaatcattcagagatttcttaaaaagttattaaaaccacacacttaatttcatgtttgaagaccttattttgctatgcacatctttaaccaagcaagccctgtgtcctcta

SEQ ID NO: 339092 - DNA, 156 bp, Homo sapiens
accccaaccccactgtaggctgaggcagaaatgctctgacgcacacaaggttctccattctcagggccaccctcggcaccacagctgccttgtcaggacctgctcaaagtgagaactcccgtgcaggccttggggtgacccaccctggggtgcaga

SEQ ID NO: 339093 - DNA, 439 bp, Homo sapiens
gagcaaagggagtctctcgccccgcacgtactgtgtgcctcgttctttatctgtgttcgtttattcactcctcatgtcagcctcgtctccactcgacaggggggatattccaccccaaaccctgcaggactgcctcccacacgggttctacgtccaggtggagggtagatgcgggtaggaattgtataatatttgttagaattctcgggagtgaaaaggtgttagtttagaaagtaggatgcctgcggggaaacagaagtggtgggtacagcatgaaaaagtgggccttttggtttgcccggctgtgcgggtggcccggcagcgagggagcgcggttatccacgagcagaccgcagagctagtctccagccattgccgatagctgcatcacctttcatcattaactgaagggaacctatccagaaaactattttacatt

SEQ ID NO: 339094 - DNA, 660 bp, Homo sapiens
aggcagtgcagctctcctctgggtatggccagccggggggcccggagcccaattttcatggcttttctcagcttcagatgtagtgtgtgagtgaagtgggcggtatgtgcccatttcatggaggcagggcagaagggtgaaatactgtggggaggtgggagctggatggcattccagctcagcctgtctccatagctaagcctttcttccctgaagtcagagagagaacgcttaagattgggcctaagcctttatgagtggcccaaaaaataaactcagaggagtcaaggtaacttgggctagtcagttggttaatactgatattctacgtcatttggttaataatgatattctaagtcagttcgttaatactgatactcttaagtcagttggttaataatgatactctaagtcagttggttaataccgatgttgtcaatcagttggttaataccgatgttctaagtcagctggtcttgcactcctgacctcaagtgatccacccacctcggcctccaaaagtgctggggttacaagtgtgagccaccacacccggccacgacgttgtaatctctcccttcccctgctcttcccagcccatcacaggtctgctttctgtccgtgtagattagtttgcattttctagactttagtataaat

SEQ ID NO: 339095 - DNA, 458 bp, Homo sapiens
attctgcctgggactggcaaagccaggcaggggcacaagaagggggccatgagaggtggcaatgacatcccaaacaagcttccaggtttagaagggctccttctttcccagagcaggcaaaacttttctcactctggttgcggggtgaaggaggagaaaaggaagaggcctaagagacccaacggctaagaggaattttgattttctgtatttagtggcctccactccccactgacaaccacacaggagccttggattccacaaaggagaatgaggctgagagcttccagttgggcattaggaatttaaagcaggccaggccagccttggagaggtggcacaaagcagccagtgtcacaggcgctatgtggcagtcagcaggtttggactcctgcacccagagttcagtgtcaatctgacgacaggccctctttggtgcttgaaggtccaagtagagg

SEQ ID NO: 339096 - DNA, 418 bp, Homo sapiens
agattctacagggaatgaaaggagaagctacaaggaatgaaaggagaaggaatgaaaggaatgaagggagaaggaatgaaaggagaagctgactggagcaaacactagttatgaaaggattccctatgaagtgagacttgagatgaagaggaagcagcagattccagatgaattttagggttggaacccatatattaccttcataaccagagagcctggtattcttgattcttccactatagaccactgatgtggtttgagaagagagtacagaatgacaccactttcaacaatacccagaggcataaattgctccaaagctttttatcaggcttgaccgaacacggtggctcacacctgtagtcccagcactttgggaggccaaggcgggtggatcacatgaggtcaggagttcgag

SEQ ID NO: 339097 - DNA, 660 bp, Homo sapiens
tgggattcaattatgatgctgcagaggattatttaaagctggtcctcagtgacctgctggtgaggaaagagtaattcatgctacaaatcctttggaagagtagataatcaaaaagctaatttcttcattgctgtagaacacatgttgttattttgcagatttaacttccgaggagtgtttggtttagagtaacattaaaagaaattgactttctctgaggataagccatctaaccataggaaaagggaagggaattttactacaaaggtagctctcttctttcattacttctctttgtttttggactatttgttctctccacaattaagactataagttcctgggaagtggggactgagctccgctgagctgtttcccataatgccagggacagggcagccgttcaataaacacttggagaattacaatcgtttggtactatgtcctaatcttgggtggatatgcacatgaagaaaccaatattttttttctctctctctctctttttgtagaggcagggtcttgctctgtcacccaggctagagtgcagtggtgcaatcagagctcattgcagccttgaattcctgggctcaagcagtcttctgcctcagcctcctgagtagctagaattacagggatgcaccaccatgcctggctaat

SEQ ID NO: 339098 - DNA, 282 bp, Homo sapiens
aactggaagtcaccttagatcacacaacctatttgcgttctcacaggggagggatgggaaactgtggaggaaaggaatctccggattcacttctgtggggtggctcacatggctccctgtagcctgcaaggaaatgacaaaggtggggtttggggtcctgggcctgagcctggggcttgggtactgattgacagctttactaatgatttatttttatcttggatcagaggcttttagatgctctcaactccaacatcatggcaaacccctgtgtgctgagct

SEQ ID NO: 339099 - DNA, 296 bp, Homo sapiens
cctcttttgggggtctccgcggtgtcaggacttggagagcctggtcgtgggacttgatcagagaggccttgagtgcagtgggtgcttatctggtgactgtggccctgaggtctgggacagacactgccagtctttctgggccacacccacggggactgccagcccccctgggcttggcacagtggaggggagcctccaccacagtggaggagagacacacccaaggccctggatgtgcccggctctctgcagctgtgggtgcctcaggccggccgccgatgggtctcagtttctga

SEQ ID NO: 339100 - DNA, 443 bp, Homo sapiens
cccaatcctctatctgatgaataaaaatcccccactcagtagcaacaaaaagtggccagccagcatctacttccacatctgtaataatgacaacccttctttcaagacagcctgtctgcagagagcaaaatattaattaagaaatgtttttatacgttggactgaactcttccccattcccctaagtatccatttcctggttctaacaagcgtctgttcttttttccaaaaaacaaccttttaagactatggcactcttctaaaccttctctttttcaagctaaatagtctcagtctttgaatcattctttagataatatggtttctgaatctcctaacttttctgtttattgtcctctgggcctatttccatttgcccccctcactcttaaaagaatgacaataagctcagttccaggtgtgacccaatttgggcgtacggc

SEQ ID NO: 339101 - DNA, 110 bp, Homo sapiens
tcaactctaagcacataaaggagcatagcaacaaagaccataccctttgaagtgtgctgttctctctctctctctctttttttgttttgttttgttttcaggcagggtct

SEQ ID NO: 339102 - DNA, 256 bp, Homo sapiens
aactgcaagtcctgggaatctttacacttaacaagaccaaaactgagcttcacattattatccactgtgcaataaaaaggttaccacagaaggcctgaggctgctatacttagaaaggcctgcttgcaaggttggcccttggttagtgtctagaaacttggatttttggagggttcccaccattccctggtaatagtggctcactgtgcctagactgtacaaacaatgcaatttaggctgaatacctgctttcttc

SEQ ID NO: 339103 - DNA, 230 bp, Homo sapiens
ggtcttggctccgtcacccaggctgaagtgcagtggtgtgatcatggctcacagcagccttgaattccttagctcaatcgatcctcccacctcagcctcccaaaatgctgtgattacaggtgcaagccactagacccagctgaattatggatttttaaggctgctttatgtcaaacattgtgggttcttttaatattgttttccagatttaaggaaacttttttctttta

SEQ ID NO: 339104 - DNA, 746 bp, Homo sapiens
aactccaacaatatcttggcatcatgaactatgatctgaggctggtctgtgacacagtaacagaaacagaaaaaactcagacatgagctgctcatctcttcactctttcctacatttttgcacccaaccctcactagagctaaatctcaactgaagagtctctactcatccacacccgcagatcagggcccctttccaggtactgctgctagtttctactctccacagcaccgaataaagcacaatctatgtctcagatacgcgactacacatttaccaaaacgaccaggacaaagaacaaaaaaagcctttgcatccaggccagttgctatagagtctttgaatattcccaacctgccttctctatcatctaactactttgtagcgacaggctggaacaagaagaatggatgtgctgtgagcaggcaaggtgagaagtggagaacaagcggcgattgtactgtagttaattattttaattgagcatgagaagggaaaggcttgaactctaaggacgttggcagagccccagagtttatgtaaaccaggaaatgcctctagcacgccccagatagcaggagcaactgaatagaagtggcccatctgctgatgcaacagcgctgcaaacaatggctgctctgagagagggtcagttccacagagttttcagaggttgtacacctctttgttcctgcatgctcacaggctgtgttagaagcctggaaatcccagtcaaatgatgtcac

SEQ ID NO: 339105 - DNA, 125 bp, Homo sapiens
gagtgcagtgatgttctcagacaaagtcagaccgcaggctggcaatatgtcaagctcatctgaggcaaattccagtttgtcatgggaaaaaaaaagtgttcattttcttctgggattcaatgaat

SEQ ID NO: 339106 - DNA, 458 bp, Homo sapiens
gttgaagctctgcccctctggtatcctctgtgggcaaggtagaaaaccgtaaaggctgagaaattactgttgagagactcatggatccaactgatataggaaatgcacatctttgcatacagcctataattcaccaacaatttctgcagagaagtattaagattgcactacatttgaagtatcctggaaggtattctagggattctaaggctatacagttcctgcccttcccctttttgttgccattttaaaattatttagcactcctttgtcattcaaagaagcagaattcaatttaaatggttcagaaaattttgaggaacagacggctatttagaggtgtaggcatagtaaagtgaacctacaggcggtattaaggcacccagagattagcaacagcagcaagccattatcacctttaggtctggaggggactagaggggaagtgttactggagc

SEQ ID NO: 339107 - DNA, 307 bp, Homo sapiens
ccccctccccgggtacggtagctcacacctttaatcccagcactttgggaggccaaggtgggttgctcagttctctggcttaatgaaaatttcaaaaaacatattttcctttgcattttgaatctgactttgtgctggggattttgtttgaatttaatgatagaccaaaatgcaattactgtacacattaccttaatgtgtgtcagtttaaaatagttttatattgtcatagattttgtggatttatcttggtttcttataccaagataaattcttaccttacactgtcttttactgtctcttaccc

SEQ ID NO: 339108 - DNA, 412 bp, Homo sapiens
tatcatacaacatacatctgatactgtccttacattaccatgaaaaacactttgagaaacatgtcattatttctgcattttacttataagtaaacagaaggtcatcaaggttaagggggtcacctctcaatgtcacacagctaacaggctgtcaatttaggaactgaatcaaagttttcattctctaattcagtgatctttccacttcattacaactgcttttaatgacattggttgtattcagcattagaaaaggtattttgcatatagatgttattgtgtaagatgactaccacttgttttaagtatttcatgcggtaattatgaaaatagttttatctacattcccatcagaccataccttaaaattaactgtaaggctactctttaattatatcaagtcataaatact

SEQ ID NO: 339109 - DNA, 363 bp, Homo sapiens
aaatcaattaaattatataaaaccatcatggtgaactataaattaaactgggaccttgatgaatgattgtataagagagatgagaatgtgctagaggtgaagaatgaatgcaagcagagaatccagtgagaatcaggaatagtgaatatttcaaggaacagtgaatatttaatcttgcttagaatataaagcatcactgaaaagcttttaaggaagactataatacaactgatatcagagtgcagaggaattgagatgctagtgtaagaaagatgaaactcatgcaataaaaaaggaatcttggcatgtattagtttctcattgctgctgtaataaattgtgacaaacagctgggcacggtgg

SEQ ID NO: 339110 - DNA, 330 bp, Homo sapiens
ctgcttccaggtgccgcggacttgtgatgataaaaataattgccatttattgagcacttactgtgtacctggccactgtggctctcacagtgttacatgcattaattagctcatttgatcttcacaccagcctttgaggtaagtatccacgttttgcagatgagaaaactgaggtacagaaaggtagagccactcattcaaagtcacgtgacttctaattagaagagccgggattggaatccagatctgtgaacccctacccagtgctgtccagcagggctttatgatgatgaaaaagtcctctgtctgcacagttcaatagggtaacta

SEQ ID NO: 339111 - DNA, 158 bp, Homo sapiens
gccagcgaggtttggctggagtgacccagggggcagcagtgagactgcagacattggcagggggctggttccggaaggtgctggggaaccgtggggcggtgtgaagcaggcgggttgtgttagacactgtgcggcttgaagggtggactgggaggtga

SEQ ID NO: 339112 - DNA, 83 bp, Homo sapiens
tccccagaatttttattgagaatttgttctcaataaaacatttgggaaccctctgcctaacatgtaccaaaatttcagattcc

SEQ ID NO: 339113 - DNA, 214 bp, Homo sapiens
cctaactttatttaaccaatttcagagtcaacttccatcttaaatggatttctagaaacagttccagcctaaagagacgggaagctaaaataaaaccaacaaaggctgagcatggtggctcacacctataatcccagcactttgggaggtcgagaatgaattttttttttttaaagggaacctttttttattgaggctgttaggtctacctggg

SEQ ID NO: 339114 - DNA, 568 bp, Homo sapiens
  misc_feature (109)..(109): n is a, c, g, or t
  misc_feature (116)..(116): n is a, c, g, or t
  misc_feature (118)..(118): n is a, c, g, or t
  misc_feature (132)..(132): n is a, c, g, or t
  misc_feature (136)..(137): n is a, c, g, or t
  misc_feature (139)..(139): n is a, c, g, or t
  misc_feature (192)..(192): n is a, c, g, or t
  misc_feature (200)..(200): n is a, c, g, or t
  misc_feature (279)..(279): n is a, c, g, or t
gggagatgtttctccctgtcatgtacattcgatgtgtcttttattcagagcaaagtgtcttgtattctgaaactggaaactgaaccagtttgtttctcctagtcaccangcatacncncctggctccccaantacnnanatgttctcatctgtcgcacccctgtatttgcctcacccctgcatggtcggaantcttcgtntcaggtcagaacagcctggggtctgtgggtaaaatcagcccttctcccaggcctgtgcacacaccccctcagcactccntgtgcgcgcactattccattggtgtcttagaattgtcctgacacccttttcatccctgaggttttcccactacaaggcaagtgcatcatggtaagagaagggtcagaggaagagttatgccattttttttaataatggaaaaagccatggtggaaaggaatttgaaaacagaactgggcgcagtggctcacaactgtaatcccagcgagttatgtgttctttatgtattctagacacaagctgcttatcacatatatcttacagtattttctcccatactatggttgtc

SEQ ID NO: 339115 - DNA, 86 bp, Homo sapiens
attgacacacagtaactatatatactgatggggtacaatgtgatgtttcaatgcatgtattacagtataatgatcaaatcagtgta

SEQ ID NO: 339116 - DNA, 493 bp, Homo sapiens
atcatgaaattggattctgttgctttaagcatttcatgactgagctgctgtctggatgctacctgaagagattctcattgaatatcattatggccagtaagtgttccataattttctttaagctccatctatgtaaatatttttgaacaattttgcacaagtacagggccacatacctatttgttataaacccgacgttgataaaatgcactcttagtataattgggtcttgttttgatcctggcagtttcatattgggatttggcagtgagttcaacagaataagcattatcctcttgaggcccatctaggattgaactaaagggcttctacaatatccacatgatcatacaattagttctctctctccctctcttttttttgtgctgtgatagtgtaactgaatatgagctggttgccagggtattgtggtagaataataccctgcagtaaacagttaatcatgcagcagaactggcttgatttgtcgacg

SEQ ID NO: 339117 - DNA, 726 bp, Homo sapiens
gggaaaggtagtaaggaacatggctagatatagagattggttgagaatccagaaagcagttggacaaggatctaccagaagtttaaaagaagtttccaacttaaaagagaccgaagccaaaagggaaaattaaaggaacttggaagaaacagagacaattcaggaagaaaaaaaaaactataatattataatatcctcagggagctaaaacaatatattgcaatcataaaaaagcaaaatactatgaaaagggaacagtcagaaagtaaatgtggcagatacaattgaacattatcaatctcttcttccttcgtaatagatgacccatattgttggaggcagtgacacactctgctaaaaactttttttagactcccttacagatagggtaaccaatgacaagtaagtagaaatatttaggtgggctttcaagaaagttatcctttatggcactgccagaacttccataagggtcttgaacttgatctcctttaagacctggactagccacaagcagaggatgcttgacatcttttagtcccagacaaggtcaaatgtggaggcactggccacatcataagcttgtaccgcaaaatgacccaccaaaaaagccattttccccaaaagtgtttcagttctacgaagtacaagtacagatatggttgctgtaactaaactgaataacgaggctgggagtgatggctcacgcctgtaatcccagcactt

SEQ ID NO: 339118 - DNA, 357 bp, Homo sapiens
tgtggggggtagaggtatgagtgtgtgttcctcacagtttttctaaggatgagtacgatcttgataaccaattttcaattttaaaaaatctgggaacacataggtatttacccaaaacagttctttcacagtatggaggacaggtgccactgacatgataaggtgacagagactttgtttcctcagctttgtgttccccctgaactggtctgagtaaaaaatccatgcccaaatccgggctctggggcgaaaccactgtttaattcagcagcagcgattaaggtcacctaaaaagattattgaaagcatgatgctagcactcattacagagggctagggttgatccctgggttagca

SEQ ID NO: 339119 - DNA, 544 bp, Homo sapiens
aattttaagaagtttttatataatcctgaaggcacccacaaagaaaatgtctgtacaggtacaaaaaaggaaataagaaagtagtgacagcctatccatacaaaaatcaaaaagacacaaaggaagatagaatgagaaacagacctacaagaatcattaaacaataaaataacagtaatctttgtcttcagaaaataaatattttaaaaatagacttgccaatcaatacacatacattgaatagagggattatataaaattttatataccaagatccaacttgcctctcttcaagagtcacttgagatctagtagtgaaatcagcctgaaagtggcaagtggaagaagacattttaggcaaacatcaaccaaatgagagcagaagagatcaaaattgtattatacaaaatacatcgtaagtcaacaactctcttattttataaaatatactttatgtcaaaattcacaagagaaaaaaaggtcattaaacaataataaagatatcatttattgaaaatgtatgacaaatatgtgcatacatata

SEQ ID NO: 339120 - DNA, 248 bp, Homo sapiens
ttgctgggggcggtagaggccagtcactggacacgatgtgccattacatagtcctaacaaccttgtgggcttgtctgagaagaatcctgcatgtctcaagccagagagaatttttcatgctcttccttgaacctgagtcatctatttcctgtacactttgtctaggactctgtcaagcatctctcagtcttaggacccctgctccaggaatccttacctaatgggattgacatcttttctatactctt

SEQ ID NO: 339121 - DNA, 209 bp, Homo sapiens
gccaataccccgtgtgaggcttctgtcaactatgaagtgagtcctctttgattagatatcaaggccaaggaaatggctgggtggagctgtggacccagtggtcccactgggagctgggcctaggccaggatgattcttctttcttctttcttccttctttcttctctcctcctcctcttcttcttcttcctcttttcttcttcttcctt

SEQ ID NO: 339122 - DNA, 514 bp, Homo sapiens
cgtcatcttagcacacaaaattttgaaaacattttaattcatgcaagtcaagttcattcttaaatattacatttcattcctctggaaaactgtaacagccaatggagaaacagtaaacatgtctcttctctacattttcactactatggaaatgagaaagaaaagtgaagtaggactgcacttacccatttccattctcaaacccttctttacaatagtgctagatgaaaagattgttacaggccaggtgcagtggttcacacttgtaatcccagcactttgggaggccgaggcaggtggatcactttaagaccagcctggccaacacggtgaaaccccgtctctactaaaaatacaaaattagctgggcatggtggcgggcacctgtagtcccagctactcaggaggctgaggcaggagaatagcttgaacccaggagacagaggctgcagtgagctgagatggcaccactgcactccagcctgggcaacaaagtgaaactccatctcaaaaa

SEQ ID NO: 339123 - DNA, 527 bp, Homo sapiens
attacaggcgtgtaccaccacgcccggctaattttttgtatttttagtagaaatagggtttcaccatgttggccaggctggtctcgaaatcctgacctcaaataatccacccgtctcggcctcccaaagtgttagaggattacaggcttgagccaccaccgctcgctaacatattttctctattattcttagttgaaaacaacagagaagtccaagtgccactccatctctgaagcacagatagcctttctgctgaaggcaatggtctgggagcaccagtctcgaatcagatcaatttcatacccacctagaagctacgtaagtgaagacccataacccttaatttactttttttccatttataaaactaaagactacaacaggaaagaaaaataaaataaaacagatgtaattagagaaggagagtaggtagaaagaacgcaaaagtgaagccctcctggccctgagcttcacttaaggaaacgaacatgacaccccagtgagcgatgagcaatcaggtccggcta

SEQ ID NO: 339124 - DNA, 310 bp, Homo sapiens
ggagttagaaagagggcagggggcaaggaaggaagacacgaagggcagagcagtggagaaggctggggagttgctgagtccagttgaacaaggacccactaggacagtgattcttgttttttttcgaaggcacaaaacccttcggagaaactgatgaaaaatggggatccttccccaaggaaaaaaaaatgcatgcaaacacacataagcatatatttccaaggacttcaaagatcccagcttaagaatcctttactttggccgggcgcggtggctcacgcctgtaatcccagcactttgggaggccgag

SEQ ID NO: 339125 - DNA, 371 bp, Homo sapiens
tcagttctgagcagaaggaaccccccgaggaggctgagcctgtggcggcagctgagccagaggtccctgagaacaatggaaataactcgtggccccacaatgacacggagattgccaacagcacacccaacccgaagcctgcagccagcagcccggaaacaccctctgcagggcagcaagaggccaagacggaccaagcagatggacccagagagccaccgcagagtgccaggaggaagcgcagctacaagcaggccgtgagtgagctggacgaggagcagcacctggaggatgaggagctgcagccccccaggagcaagaccccttcctcaccctgcccagccagcaaggtgagccaggcacctgccctc

SEQ ID NO: 339126 - DNA, 1228 bp, Homo sapiens
tcagttctgagcagaaggaaccccccgaggaggctgagcctgtggcggcagctgagccagaggtccctgagaacaatggaaataactcgtggccccacaatgacacggagattgccaacagcacacccaacccgaagcctgcagccagcagcccggaaacaccctctgcagggcagcaagaggccaagacggaccaagcagatggacccagagagccaccgcagagtgccaggaggaagcgcagctacaagcaggccgtgagtgagctggacgaggagcagcacctggaggatgaggagctgcagccccccaggagcaagaccccttcctcaccctgcccagccagcaaggtggtacggcccctccggacctttctgcacacagtgcagaggaaccagatgctcatgaccccgacctcagccccacgcagcgtcatgaagtcctttattaagcgcaacactcccctgcgcatggaccccaaggagaaggagcggcagcgcctggagaatctgcggcggaaggaggaggccgagcagctgcgcaggcagaaggtggaggaggacaagcggcggcggctggaggaggtgaagctgaagcgtgaggaacgcctccgcaaggtgctgcaggcccgcgagcgggtggagcagatgaaggaggagaagaagaagcagattgagcagaagtttgctcagatcgacgagaagactgagaaggccaaggaggagcggctggcagaggagaaggccaagaaaaaggcggcggccaagaagatggaggaggtggaagcacgcaggaagcaggaagaggaggcacgtaggctcaggtggtggctgcagcaggaggaggaagagcggcggcaccaagagctgctgcagaagaagaaggaagaggagcaggagcggctgcggaaggcggccgaggctaagcggctggcagagcagcgggagcaggagcggcggagcaggagcggcgcgagcaggagcggcgcgacaggagcggcgggagcaggagcggcgcgagcaggagcgacagctggcagagcaggagcgtcggcgggagcaggagcggctccaggccgagaggtgagggacctgctggcccgcctgcctgccttccatgtgtgtggaagagagacggtgtgaaccttgcctggacacagccccacctgcatgtgacggtttgcaggtgctttccttggcaccaaacccagaggcccacctgaatacac

SEQ ID NO: 339127 - DNA, 364 bp, Homo sapiens
tggaaagcaacgcagggcaaggagagaggtggccaggattaacctaataatcagctttataaaagtcacacttatgggtcccatggtgtgctggaaaggacttaactctcccaggtctcagcgagcagcctcagtgtgtaaaatgaagtttgctacatgatcctcaaggccttcttcatgtctgatttcctatgactaaattccgataattaatatattctgctgaagagctcagactgaacatgatcattgtcacggttcagtttctacctcagtttccttggaactttggaaaggacctgtcatgtgtagagtgagcacaaactatgaacagaaaaagagccgggaagccccagccttggta

SEQ ID NO: 339128 - DNA, 94 bp, Homo sapiens
ctgacaactgtccttagggcactgcacttgatatcatgtaatgacaaggggacatataaataatctggttgaaatgacaggtcgaggttagtaa

SEQ ID NO: 339129 - DNA, 685 bp, Homo sapiens
tctctcactggaggacctttactcattgcctttcacttcaccattagtaacatgtcaagagctgcttggatcataaataacacgaaccgttcatggcacggagagcagagaacaggcagatagtactgacacacgtaggatttcgtaatatgtgtgccaacccagcacacacactgcagaacctgcttctcccctgtccacttgcccagaccctggagagactgggtacacagatgtcaggattctcttttgtaaaactgacgtttgtctggtgggggtcagagccttccagcggtagccacccacttgtgttacagatgtcacctcatgcctctcctgcaccttcccctaacaagtctcagatgctgagacttggagatgggaagagtatttttgcaccatctctgcacagtgtggctcagggacctcacagcctaaaggtcaccctgtgcaaggcaaagtgctcctgcttgaataaccacagtctttgtccagtgtctatctcttccctctcagtttatttgcttctctgcctctacccctaagaatctgtataaataatgagcttctcaggtcattcaagggcaactcattaactcccttaggaaaagccagcaatgtcttttcttccaaagtggtggcttaatggccacaagcagataatgctttataaaaaggtaataat

SEQ ID NO: 339130 - DNA, 284 bp, Homo sapiens
ggggaagttcattggggcagagacttagtttgagggcttgcagagagaggtggggacagtaggagaagggtgatggggatggagagcaggaggtgtgtggggcatttaaaggatagcgggagaagtgcgtgaaatggagggtgtttatgcaggaagtatggaagaaggtgggatcagcaagagagggaattttgaggtaggacggagggtgaggggttcttggcaagtgttggaggacgttaggggcaggagctgggggagagggacaggtgtggggtggcgtg

SEQ ID NO: 339131 - DNA, 280 bp, Homo sapiens
ccaaatgtggctgctgtggaagagagactctcatggtcaagcttagcagcagggagaaatagcagaaggccctttcctctttccaaatgagagaggatggatagtcatttgaactggaatcttggtggtgagagggtgagaagtggttcggtctgtgatctctgttagagccagagccttcagaaattactgctgcactgggtgtagagtgtggtagaatgatactagtcaagagtgaatcctaagtgcttagcctgaaaagttgggtgaatactattta

SEQ ID NO: 339132 - DNA, 244 bp, Homo sapiens
actaacacagttgcttaaagaggtaatgtggaaaaatggggaaaaaattaaaacactgacttaaattctggttccttttctaccacttttggttgagtaacttatacaagaaatttaacctttgtgtgccggggctttcatcagtggtcctagtagttagcctcctgcactggtcaggttaggctaaactctgttgcaataacaacttaccctctaaatctcaggtccctaggccagagtttgg

SEQ ID NO: 339133 - DNA, 163 bp, Homo sapiens
aggtgtgagctaccgtgccctgctgaaacagacagtctttgatttgatctctgcaggattaggaagaaaagtcttttcagaaagaagcaaagatcagaggtggaaagtctgcagatatgcaggaaatggtctgtagttgagtgtagctacaggatagactttg

SEQ ID NO: 339134 - DNA, 376 bp, Homo sapiens
catagtacactacttgactcaccagtgacttttaaaaatggaattccatctactactcaaaacctctcaggggcatttcaccacacttagaataaaatccacacttaccaggactaaggaacttcaatgatgtggctccactcctgaaatctcccctctcagattatgctctgggaagtttcatttgctgttccatatgcatgggacactcttacctccagaccatggtactcaggtgtcagctgaaagttcaccttttctgtgaagctttccctgaccagtcagtataaatttgtaccagctttctctcagttctgtcactactgcatcatttcattttattcatattgcatcactgactgaaaatatttgatat

SEQ ID NO: 339135 - DNA, 174 bp, Homo sapiens
ttcaggcttttgagagaaataatcttattggatggtttgggtcagatgttctcttggggtccaatcagctatggcctaagagtggtgtcatggagaacaaatatggcgccaaatcttaccctgtggacagaatggatacctcaggggaggcccgttcctctggcgctgtagaaa

SEQ ID NO: 339136 - DNA, 319 bp, Homo sapiens
agcatattaaaagtgttatataccattagtaagtggaatttatcccaggaatgtaagggtgggtcaatttaagaataatagtcaatgtaatacaccacattaaaatgaaaatggaaataccatgtgatcgtctcaatttttgcagaaaaggcatttgacagaattcagtacccttttatgattaaaaaaatgagcacagcaaaactagaaataggaaggacaagatgatgaaggacatttgtaacacaaccacaggtaacatcacactcactggtgagaaactgaaagcttttgtcctaagatcaggaagaagacacag

SEQ ID NO: 339137 - DNA, 368 bp, Homo sapiens
tactgtgtgtgagagagatcgaagagaatggaaagagatttaagaaaataggccaaatgtcaattcaaaagggacaaagtgttctaaaaactacataaattgacattcacaactgaaaattcttcagaaataattgttaaatatatgatttgtgacatttaggggaataaagcactgactaccaggagccagtacagattctggaaaaataagccaggcccctataacttcagctcattttaaaaatagggtttccagcaaaggaatgctctgatgtattttgcaatatattttgacttcagacaagatacgggcgaagtgtctttcaagatttcttgtggagatatatgttgtcagctaaataactc

SEQ ID NO: 339138 - DNA, 517 bp, Homo sapiens
ctttatgacctgaaaccatgaattaaaattgtatgtcttcttgatggattgacagttttatcaagacaatccctttctgtctctggtaattttcattggtctgaagtctactttatgtggtattaatgtagccactctagctactaatgtagcctctctagatttcttttgattggtgtttgtatgacacatctttactttcatactacctctatcaataaaattaaagttagtttctcatagacactgtattgatgagtcattttttttaaatttactctaccaatctctgtcctttaactggtatatttagaacatttacacttaataaaattattggtaatttgttaaggctcaactctgccattttaatatttgttttctgtttgttttcctttattgttgtttatctgcttcccctttctgctttcctgtgagtgatttgaacatttttagtgttccattttgctctacctatagtgtttctgagaatatctttttgtatatttttagtggt

SEQ ID NO: 339139 - DNA, 278 bp, Homo sapiens
tgtatctcaaatatattggctctcattcagttcctaacttcaggaactacacaatgttttactcctttaccttgctgattattccatttttgaggactcagtttaaatgcaatttccacagacactttcttgaacccttcacactaagtaattactcatcgaggcaatactaatgctctaacaaagaaaatgtctttgacaatacctttccctcaaatacttgttgggctccttggtaggcttttaatctacttactaatcagttccatgttctagtg

SEQ ID NO: 339140 - DNA, 508 bp, Homo sapiens
tatgcaagcattctaagggagggaggcaggaggagggaaaagagaggaaggaaagagggagggagggagagagagagagcaacaaagtgaagaaaaaatataaaatgaaagtatcacagcatataggaactaaatctagaattttattcaaataaacagaaagaaatcctcacacaaacttcctactgtagaataacgagttcaatgaaaattgaagtttaaagacagaataatgaagaaatctgaatgagatgaaaaaggatattgtggacctaaggaagcaaattaaggactaaagatcataattttagaatcaataaacaaatcagaacatcagaagcagagtagacacttctgatagttgaattactgacacagaagaaaggacccaggtaccatgaatggagacacttctgatagttgaattactgacacagaagaaaggactcatgtaccatgaatggagatgaaaatgacaacagattttcatcaaatgataaactaatag

SEQ ID NO: 339141 - DNA, 683 bp, Homo sapiens
ttggggggaagaaataaatagatgttttcattaggattttgcagagggccacctgattatttgtatgtctttgtatcatttacggggaaattatatgttgcctatgacttggaagttttcaaggtgagttgctattgtcatttttaaggttgtgatttgttttccttgtcttgccagcctcctgtgattaggtaggttctgcctttggaatgacaaggttcttcctgcatgtttttctcatgtgcgcaatggtttcgtctcccctccacccttagaatttgcaggtctaggtcttccgcctgtgcttcccttcatgccatagcccccatgtgacaggtgctagagactgtgtgacagccataactaaatgccacttgggacttctgcacagcatgtcagatgcacagctcattgtttgcctccaggcctacagttaaccaggaaagatttttgttgtctaattattttataatttcctgagagcagaaaaagtggattttaattaagtaccagatgtcttttaaggtcctaccttctaaaagttttccaaaaagtttttaaaacaatttttctagatttggaatttcattgtggacttgttaatatctctgaagtgtctcatgtcttgagaatcttgcaggactttattctctgcggttcagtccaagtttgcagattttaaa

SEQ ID NO: 339142 - DNA, 136 bp, Homo sapiens
cctggatagaaatggacctcagaatacagaatggagtccttgagtgtcagttggtgaggaccatggagtcctgccagctcaacctgtcatttacagactaagaaagggaagtacacacctggcttgtggccagtct

SEQ ID NO: 339143 - DNA, 328 bp, Homo sapiens
tgatggagttttgctcttgttgcccaggctggagtgcaatggtgggatctcggctcaccacaacctccacctcccaggttcaagcgattctcctgcttcagcctcccgagtacctgggactacaggcatgcaccaccatgcccggctacttttgtatttttagtagagacaaggtttctccatgttggtcaggctagtctcaaactccataccccaggtgatccacccaccttggcctcccgaagtgctgggattacaggcataagccaccgcgtccggctgaaaaaaaaatattcttaatccataacacttgatcagaaattatttt

SEQ ID NO: 339144 - DNA, 937 bp, Homo sapiens
tatcctacaaagctaggtctgatgtccctacatttactcttggccttcatctgtaccacactatctcagtcactccacaccagccacagtgaactgtccgtcccttggccatgccagcctgattcttccttgcatcagggcctttgcactgactgttctcttgccctagatgttcttttcaaagttattccctgggctcttcacatccttgagatttttactcagtcacctcagagatgccttcccaaatcaccctatctaaaattctaaaacctcaccccacttctgtgactatcctttctccttccctgctttatttctcttcatgccactcatcactttctgatacagtgtgtattttatttattcatgtaattggcccatctttctcctctagactttcatgtcagtgagggtagatttttgtctttgttcacttctgtatccccagggtttaaaatagtgcctatcacacagtaggagcataataaatacttgccaaatgaaggcataatccataggagtaatggatgaggcagactaggatgttgggaaatggtctacagagactggcaggaggcttttgccattgtcctggtgctccaactggtgtaggggtggggaggaattgagagagttggcagaggtggaatccatttgccttgataattggtttgatatggaaggtagagagaagtagtcatgggactgagtaagtgccatggatgacaggaagatgcttctgttatcaggtaagctgaaagagagagggcgcagtatgtcaataaccagcaagggttctggttattgactgctacacaacaaaccactctaaaactgagtggcttaggagagcaactatgttttaatctcccacagttctttgggtttacccaaagcggatgtgatcagctgagatgtgagtgatgcatcttgc

SEQ ID NO: 339145 - DNA, 325 bp, Homo sapiens
ctcccaggttcaagcgatcttcctacctcagcctcccaagtagctgggactataggtgcgcaccaccatacctggctaattttttgtatttttggtagagacagggttttgctgtgttgcccaggctggtctcgaactcctgagctcaggtgatccacccacttcggcctcccaaagtgctggaattacaggtgtgaacaaccacgcctggcctcaatatcctttttctaccccaggacctcttgggatcccacatgacatttagacattaatctccttaggctccatggttcaaattttaagtgagttttgcagtgccttttca

SEQ ID NO: 339146 - DNA, 338 bp, Homo sapiens
aggcgtggtggctcatgcctatatcgccaacactttgggaagccaaggtgcgaggatcacttgagaccaggcatttgagaccagcctgggcaacataggagaccctatccctacaaaaatttttttttaattagctaggcatggtggtgcgcacatatggtcccagctactcaggaggctgagatgtaaggattgcttgaacccaagaagttgaggttggactgagccatgattgtgccactgcgctccagcctgggagacaaagtgagatcctgtctaaaaaaaataaaaaattttaaaaaaggaacatctactatgtgctaattgtgcgtgttggg

SEQ ID NO: 339147 - DNA, 239 bp, Homo sapiens
aatatagtatgtgtattataggataatagggtaattaggatggaagatggaattgttttctaattctatttaagtacagaaatataattactattgatattttgcttttacaattggagataatctcgtgatgacatatggaaaccttgggaattactattttgtaaataagcttaaagcgtactagacataaatgttcagtctggtatttagagaataatggaatagttaaatatggg

SEQ ID NO: 339148 - DNA, 529 bp, Homo sapiens
gcataaaaacaacattaatctccttgtacaactgcagcagagctcttagtgtacaggtacatggcctgtaatattttgaaaggaatttttgtttttgtccagtaggtcccaacagcgggcttaaaatattcagcaaatcatggtgtaaacagatgtgctttcctccaggctttgttgttccatttatgtagcaaaggcagagtagatttatcgtcatttttaagggtttaggatttttggaatggtatatgagcattggcttcaacctcaagttccagcttcatcagcctttaccaagagagtcagtctttcctttgaagctttgaagccagatattgacctctctctagctgtgaaatttctagatggaatcttcttccaatttaaggctgttttgtctctattgaaaatctgttgtttagtgtaaccaccttcatcatttatctcactcagctggatcttctggcttttcttgctgagcttttctgtcagcatttgctgcttccctttgcagttttattgttttctc

SEQ ID NO: 339149 - DNA, 250 bp, Homo sapiens
ctcctatcaaatcgcctttccctcccccggcgcgagaatcgcaccttgctccttgtggatcgggcgccgccgacggaaccacctgctgtctatagagggcacctaggacgcagcgtccaattcccctcactggcttcaaaagacaaatctccgtattgttgtaccaggaggcacgagaagcctcaccactgtaggtttttcagcagaggtcactggaggtctggttaaacccgtacagcactgaggggga

SEQ ID NO: 339150 - DNA, 323 bp, Homo sapiens
tcggctcggtacccaggtagactaacttcagtgacagcccaggatgtttgctccctgggttcagccggcaatctccaaagcaaggaactcccccttttccccaaatgtctcaatagttattccttcctttgaagttggaagaaagaataaaattactttcatctgcctagaaaatagagtagagaggaattctacttggaatcagaatgagaatcagaagaggaatcgggcagctcaaatctgttaggtctacctgggcctacgttttcacacttctagtaagcctctacctgggttaggttaccggggttaggtctaccggg

SEQ ID NO: 339151 - DNA, 352 bp, Homo sapiens
taaatcatggactaaacgggcttccaggagctacaggctgcagcagcagcttctcctctacgtccttcactgcctcaaactgttgttgactttgaaagcttctttcagtctagttttatcaacagagctagtatttcatgaggttctactacataccaggttccagaaagctaaatgccttttgtttgttattattctctaaatacaaatcacaactcctcattactcacacaacaaaatttagctgcgggagattgagtgactttcccagggtcacatagctactaagagcagagtcgtgtttagattcatgtgggaatattgaacacagaaatgaaccagtggaaacatc

SEQ ID NO: 339152 - DNA, 157 bp, Homo sapiens
actttacattcattgaaggagtcattgttggaactaagagagcaaggaaaccgtcgtctgtgaacaggagttaattacattgattaactctaaccaagttgtttttttcaccaggaccattttaagagaccacaatacccaggcagcagcttcacag

SEQ ID NO: 339153 - DNA, 263 bp, Homo sapiens
cagctatggcattggaggctgaaattgttaagtgtagaagttcagattgactctagagtttcaggatacttacatctgattcggctagtacattttttgtcttggtatagtaatggattcctggcgttttctgttctcccatcttccctgatatccttttctttttcgtcttcatcgtctttgttttcatcgtctttgtcctcttcgtcatctttgtttcttcatcctccttgtcctcctcctctttgtcctcttcctcctcc

SEQ ID NO: 339154 - DNA, 410 bp, Homo sapiens
acacttcaatagtatacttgtatctatttttggaatcgtgagtatgtaacttccaaagtaatatgaggaaacaaagatcagaactgtgtaatctaatgtgtagggaaagattagtgactgctgtgtttcttgttttttaaagttctctatactgttcagaaagaatctgaaattgattagtatcttagatggaatcaaataggcatgacaaatttccagggaacagtttattgtgagtttgtggtagtttaaacagtgatattagtatagtaatacacagagcacaggaacagagggcacagggtgcacctctctggtaatacatggagagaagggtgttgtagggtacatattttattttattttatttatgtatgtatgtatttatttatttatttttgagatggagt

SEQ ID NO: 339155 - DNA, 126 bp, Homo sapiens
atgaatctctatcagaacagccaacagagaaaatgtattcagatgcaggaaggctagaaggcagcctgtagcagcaactacacccatttcactctgtattgggtcaggcaagacttcattaacaac

SEQ ID NO: 339156 - DNA, 431 bp, Homo sapiens
ggggtgggggccatccaatgttaattctctttactgtgacaatattgctggtacagtaagataaaactatcttaggatgctaaacttactctctggatgtgctttgtacactgcttgtactatgtgtgactcactttattgactttattaactaggactgtaagatgctttagttttgtttgtgtttttgtacaaaaagagtctcattctgtcacccaggctgtagagcagtggcgtgatcatagttcactgcaacctcaaactcctgggctcaagggatcttcccaatgtagcctcccaagtggctaggactacaggtgcacaactctatacccttcgctgttgaacgtatagaaagtacccagactacaaatgagtttcgtctgcagatatttcaaataatgaagactgtagaaatctaccccatattt

SEQ ID NO: 339157 - DNA, 430 bp, Homo sapiens
ttgaaactgggcacagaaattcaatggaagccaattacactgctaaaacaatagctatcctgtacctttacagaatcaaacaaaatagcaggacaaagagaacatgagagataaaagatactgctagtttctaagaggaatgcaagtctaagtggacactgaccccagcatcttggatgtgtgttctgttctttaagaaatgtagttattcattctctttagaaaaacaaagtgtaggaatttataaaccatgtcaatcaaactagagactgggtttattcagttccactatttctcagtacattttaaaaacttacatacataaatatttgggttgatcagcatttgtgccaacttaactaccacttttgtagaaactggcagtcaatttctgtgcccatttcaggtaccgactcgattctatctatct

SEQ ID NO: 339158 - DNA, 312 bp, Homo sapiens
ctatcagccaaactttcctctattcccatccattatacttattctatctcttttccctgaagaatctgatgccttgtggctttccctgccagacttcaaaacactaacgagtacattctagtcctcaagtaatagatttgctaaatcatttgctaaacaatttaggaccattctttattaatggattccttcaatttctaaaattgacagtttcctacagtatctttatcaccattgacctaataagtgatttttatcctaagtcacacatagaaatggctactccttacatccttacatgaaaacattttt

SEQ ID NO: 339159 - DNA, 292 bp, Homo sapiens
aagctattatgagcatgtacagagagaggtaggtttggaaatggtgacacaccacacttaagtgacttcttctgggaagtgggatttaacggagaaagatggagggtgttttcatgttttattttaccctcctaaattgtttgtacatgtgttacttttgctcaggcaatccttccaactcagcctcccaattagctggaaccacaggcgcatacgacaatgcccggctaattttttgtatttttactagagacggggctttgccatgttgcccacgctggtcttgaactcc

SEQ ID NO: 339160 - DNA, 113 bp, Homo sapiens
ctcatgtaaaccagatttgcaaataaacactgagtattcaccagcccataaaaatggtctggtcagctcacactgcagaaaccaaacattagattctggtgagtgataaaata

SEQ ID NO: 339161 - DNA, 1011 bp, Homo sapiens
cttggttgatgattgttagaccagcagccctctagtattcctttcagcactccaagctaaaataaaacagctgatgtttagtaacaatttctgcaaattattcaacaccatagaagagtgttttgttaagactagagactaatctaacacaatctactcaacaatgttaaattgaccagtaaccaatagatgactagaagaaagtgtatgtaactagatataccaaactatagatactaattttaaaatcttggaaaggttttggaggagccctactgtttctgaattggaatttttcatttgcaaatacttaacaaaacccaccaagccagatagagctctatagcgatgcctatggaggagccttataatgatgttgtccaagtaatgtgcttaacaataatcacactcaaagccaaaggttcccatgctcctgccaatataacatgctcacaacggtcaattccaaaggaagagctgtcaagaagtgcctgaagatttcctcaaagggagagataattcatgagcaaacaaacatcatgtccctaatcttctctatcctggggtaaacaaaatatagttttctcccatgatttcagttgctttctataccaagtcagtaagtaaaactgattcatactggtaacttccaggttccagccttggtttgaaggggcacacaattcaataagagtaaagaagactggccatgtaagcccatcttgaatactgacaacttccgtaccatttacctaacactacaaaccctactccatttaagtctctgagatctttttgatgtattttgagcttttcaacttgccttttttggtgggagaggagggaggaggagaacaaagggagaatttgaagtttttatttctgcttgcattgactcaaattgtggtaaagaaacttaaaaggtaactttaaaattctagtgacactagccaacaatgaaaactatctaattagaatgttagaggttttttttgtttgagacagagttgc

SEQ ID NO: 339162 - DNA, 507 bp, Homo sapiens
ggggagaaaaggtactggtgctgagacattttcaacagggcagaacactgtgacattggtgttctagaaagatccctggtggcagtgtacaagacgcactggaggggattagaactgcaaggcagacagcgctgggcagaagacacagtaacccagacaggaagttgtggtgcctgaacttgacagtggccagtgggaaggggaggagacacaggaaagacggtagttaaatcttcctaagagtgcgcagaggtagagatgagggtaagggaggagactggctgatgcccaggtggaaagctgtgttttcaacaagacggcgagccctggaggaaaagcagaacggatgggtatgagagcctgaggggcactgaggttagatagaggcagagggatggagcgatatgggagtctgcagtgtagtgaaggccttggaggaagtgacacaattctgaagtagtgattggtctcatgtgggaatatgattgctatggtctgaatgtgttc

SEQ ID NO: 339163 - DNA, 1528 bp, Homo sapiens
agcggaatttccgtttccggcggtgtccaagcggacctaaggagtcgcagttgtgaacaggttagagttacttgttattggtaaatagccactatggagactaaggaccagaagaaacacagaaagaaaaacagtggacccaaagctgcaaagaaaaagaagtggcatctgcaggatctccagctaggagacgaagaaaatgcccagaagagaaatgccaatgcttttgcagttcagtctgctgtgtggatgtctcgatcctttcacaggactctggatttgaagacacaaaagcatcatattccagtggttgatggaactccactagagccgccaccaatagcggtagtggtgacggggcctccaaagttggaaagagcactttgatataatgcctcattcggaacttcacctggcagaagttcaccgagatcagaggccctgtgacgatcgtgtcaggtaaaaagcgcagactcaccattattgaatgtgggtgtgacattaacatgatgattgatctggctaaagtagcagatctggtaagtgagcaggggcagcctggggtgctgatggagacttacagcattgtgataggttatttaccccgtgatgaagggaagagagtttgtgattattaacaggatcatggtcattatcagggatatagtaagatgtgattgaacttgatgatgataataataattagtaataaatgttgtcatattaataatacaactggaatgtgcacaatgaaatgtgttccaaaatctaaaagcagatcacaggatggagaaaacctttaatgagcacagctaataagagctcattaacattcatacatatatatgtacaaatatatcatagtaagtaccatttcttcttggatccttcctggcactgtgctaactgctttctacaaatttagcttacataaacccttgatacacccttgaggtgagtaggtattatctatagtttacataagatgaaatagagcctcccagcagttaagtaacttgtgtgaagatgggacccttgttcctgatggttctagaaccttcatccttaatgataatgctaaagtaagtacatgaattgcctgaagaagtggtcagagtttatcaatagaaaatttagatagtactcagcgtgtggaaaatgtacatttatggaaatgataatgttcactatctctgatattctatgatcttttacattagcaaaaaaaaaaaaaaaaaaaaaaaaaggccagacacagtggctcatgcctgtaatcccagcactttgggagaccgaagtgggtgaatcacctgaggtcgggagttcgagaccagcctgaccaacatgcagaaaccccgtctctactaaaaatacaaaattagacgggtgaggtggtgcatgcctgtaatcccagttacttaggaggctgaggcaggagaattgcttcaacccaggagatggaggttgcggtgaggcgagatcgtgccattgcactctagcctgggcaacaagagtgaaattctgtctc

SEQ ID NO: 339164 - DNA, 871 bp, Homo sapiens
agcggaatttccgtttccggcggtgtccaagcggacctaaggagtcgcagttgtgaacaggttagagttacttgttattggtaaatagccactatggagactaaggaccagaagaaacacagaaagaaaaacagtggacccaaagctgcaaagaaaaagaagtggcatctgcaggatctccagctaggagacgaagaaaatgcccagaagagaaatgccaatgcttttgcagttcagtctgctgtgtggatgtctcgatcctttcacaggactctggatttgaagacacaaaagcatcatattccagtggttgatggaactccactagagccgccaccaatagcggtagtggtgacggggcctccaaagttggaaagagcactttgatataatgcctcattcggaacttcacctggcagaagttcaccgagatcagaggccctgtgacgatcgtgtcaggtaaaaagcgcagactcaccattattgaatgtgggtgtgacattaacatgatgattgatctggctaaagtagcagatctggtactgatgcttatagatgccagctttgggtttgaaatggaaatgtttgagtttctaaacatctgtcaagcacatggctttcctaaaattctgggagttctcacccacctcgactccttcaagcataacaagcaactgaagaagacaaagaagtgattaaaacacaggttctggacagaagtttaccacggtgccaaactgttctacctttctggaatggtgcatggagaatatcaaaaccaagaaatccacaatctgggccattttattacagttatgaagtttaggcctctcatggcaaacttttcacccttatatcctggcagacaggt

SEQ ID NO: 339165 - DNA, 418 bp, Homo sapiens
agaatgtgcccagttattgtaggagacagagacggtcacacaccggcctatctgcagggcagagtttgggcattttcagctgctctgtgtgtattgaagagttaaaaaaatgaaaagacggccaaatagttatcaccaaaaggaggccgtcagtcattgctcatgaacacagtctaaacacagttcaggcatatttagttcgcgtgtttctccccagcacacagcaaatcagaagcaggcaggagaagggaagtagtaatgcacattggaagcttgagtatcaggaggagctctccctctcatgcagatattcccagcgtgctccctgtatcggcagcctcagcatcacctgggaccttattagaactccaaattctcaggcccttcaccctagaccaacctaccaaactagaatgcc

SEQ ID NO: 339166 - DNA, 1123 bp, Homo sapiens
aggaaagaaagaaaggaaagaggaaggaaggaaggagaggggaaggaaggaaggaggggaaggaaggagagagagaggaaggaaggaaggagggaagggaaggaaaggggaggggaggggaggagagggagaaaagaaaggaaaaagaacaagtggatatcaggggacagaaaccattcgcagcccatccctcggcagatgcagagggagtcagcctggaacccccacccctgctggctgtgccccaccgctgtctccacaccccagcccttcctccagacacccagccgtccactgcagcaggagcacaggtgccccaaggggaccactgttggaaaccaggcagccctccactcacccacacagtgtgtctctgcaccccctctttgacatgggagccggggcgctcttggaaataagggtttacctgaggggtctgaagacttgggcagtggggggctgtgaagccttggggagggaatcagcttgtccaagagtctggggcagcgagtggtcgggggctacccggtctgaccccatcaaagtaaccttcctgggggatatttccattgcagggtcacaaaaaggcaagggctaaggttcgagagaggggtctctctggggtcccagccaccctgctgtgggggcccttcccaagcaggacactccaggcaaaggggatggctttcccttgctcccaggacccataggtgaggtcctggctgaaatgcagactgtccccagatgcccctggggacttgtagggatttgggggattcagtgttgcaggagctggaacccttgcttgctggacgggtttgagctgtgctgtcaggcccaaagctcctgggtctccaggatggtgcatgagggctcacaccagctgctccctgccacccttcccccacctcccaccccttctcctggagccccagtcctctggtctccaagctcagcttcaaatgcttccaccacttctgtctcttctacctcgagtggtttgtcaacctccaaatcacacggagttcaagaatatctcaaatatcgaccaggtgcggtgtctcacacctgtaatgccagcactttgggaggccgaggcgggtagatcacctgaggtcaggag

SEQ ID NO: 339167 - DNA, 482 bp, Homo sapiens
cctgaaacagcaggggtggcggaagagcagctgagggagacgtgggctctcccagccccattgtgatcactgcatcacggagttgactggaattcaagaaatggtgttttttcctgtctggatatttggctgtgaacgtaagtactttcctgaggacgcagtggagtctatctcggctgcggctgtgttctcaccctgggcagtggcctttgggttaagaatgccagggacgtgtctttaatccccagcctgtatctggcacggaggatgtgctgagtaactatcagaaggaagcaccatcccccgccctccccttagagggcctctgttacgtggtcacctcacagactgtgcttcagcccagccctggggtgcttgggagaataggcggaacagctacgtggtcagcggccatcccttgcaagtaacagtccccctcctaatgaccctcacgctgcatggcccgttacagtggttcagta

SEQ ID NO: 339168 - DNA, 541 bp, Homo sapiens
atcacctgggcctcctcagcactgcctcctggctggggctggggctggggataagagagtaactgcaattgtgcttccccggcaccttcgctttaggtcactccaccgaagagcctgaaagggaagtggttcttgcgaaagaatgagctgaagcaggtggcagatgctaccaggcaccgtgtagttttcaaaggggatctttttctgcctcagagagaaattctggggtttgcacagcaagaaaccgatgactcaatttcctttgtgtccctgctttaatgggaaggttgtaggcgttctttagaatggcagggtaggttgataccttctaccttaaatttgaatcccacttttcactcacttagcaggttgaattttttttaagtgtaccccccacagctgcccaactgggtttgcgaggcaagcccaacttgccagagtaaaccggaaggggtgctttctaaagtttgtggttctggagtctggccaggcatggatacagtcattgtgcgttccagattttctgggagagtcaggatct

SEQ ID NO: 339169 - DNA, 407 bp, Homo sapiens
tcttacaatgcgcatgtgtgtactggggaggaggtcttgacggaacaatgaaacattccacttccaagaaaatgtggaaaatgattcataaaataacaacttattgctagcaacttcctgtcagttacaaatgaccaaagtacaacctaaaataaaatgaatcagttagcatgatgttcagaaacctcattgatgttatataaattcagatacatgggaaacagctccaagtgggacagaaggcagcgtgtgtgtgtgtgtgtgtgtgtgtgtgtgtacatatatatatattttttttttcagataaggtcttgctctgttgccccagctagaatgcagtgatgccctcatggttcagcacagcctcaacctcctggactcaggaggcatgggactcacctcccatg

SEQ ID NO: 339170 - DNA, 471 bp, Homo sapiens
cccgaggccggggtttccctgtgccccagattgggccccctcccatcccccctgggcccacacaagtgaaccctttttcccaaaaaaaaaaaaaaaaaaaaaaaaaaaaaaaaaaaaaaaaaaaaaaaaaaatcacataactgtatggttgaatatccattgtgttctttacaaagtatgtcattctttctgtaacatccgtggtggaatataaccttagtattacacaaccaccatcagcagcagcagcatttgagagcttagcagaaatgtagaatgtcgggctccatctcggacctactgaatcaaaatctgcattttagcaagatctccaggtgatatacaggatcattaaagttagagaagtcctggtatacaggataagtcttaccaattgctgtatagacctatgttcacttcatggataacatttgctctagaaaagaaaaattaaccagtagagagggccag

SEQ ID NO: 339171 - DNA, 103 bp, Homo sapiens
tgcctcagccccccaaagtgctgggattacaggtatgagctcccgtgcctagcctagattagtgtttaattgactgaatactgtagctttgctacgtggacac

SEQ ID NO: 339172 - DNA, 247 bp, Homo sapiens
ccatctgcctccactctgcttaggaccgcagactgatacctcaggagtctagacccacggaatctgtaagcaagctgatcaggactttggaacttactatatataccctacgtgttttttgttttccttagaaattcatcaatggtcttgtgtttgttcttttttttccttaactttattgagaagtaatttacatgcattactatgtctgtctaaaatgcacacctcgttaagttgtgactgttgt

SEQ ID NO: 339173 - DNA, 279 bp, Homo sapiens
gcgtgtgagtgtcctgatcatggacacagagcgtggggccccttggagggctggaacccaggtgggggatgcctgggtggtgggacagagtggggctggaggagagggtctgaggaatgttccggccacagacaccccaagcccacgggaggtcaggagttggtcacaaggaaggtgaggtggggaacagagctggggcccagggtcctgatttggggtgagaggtgacgccatccccgagtcagaaagacggccaggggaggggaggaggtggggaaa

SEQ ID NO: 339174 - DNA, 384 bp, Homo sapiens
tgaagaacaattctttaaataagtcttttgagtacattacaaagcaaaagagatcttgattacaggaaaggtacttaggcattaagagaaattttgtgaaaaaaaatctaggagtgttgtaagtaaaaatctggaagatataacttgtcttgtagttcacattataatttctgttaccatagttaactatttagctgtcatctaggtattattaatatatagaatgcatgatacgtaacaataaatagttatgtcatagggagactctatcataaacaattctttttcgtgataaaagtggtaggaatagcattttaaatgaataactttagctaacatgtagcactgcgtatcagatactcttgtaatcacttcatgtgaatt

SEQ ID NO: 339175 - DNA, 274 bp, Homo sapiens
aaaaattagccaggtgtggtggtacatgcctgtagtcccagctacttgggaggctgaggcacgagaattgcttgaacctgggaggcggaggttgcagtgagctgggagcacgccactgcactccagcatgggtgatagagcaagactcagtctcaaaaaaaaagaacttgcagtattttgtaaaaatggactatgcttttcatactgtttttcaccttgcttttttaacttactatcatttggacatctgtcaggatgttctttttaacgcgac

SEQ ID NO: 339176 - DNA, 525 bp, Homo sapiens
tgaaacagtaagtttcttttcaaaggggtggggtttttactttttttgtgtgatgaggcttgaggacaagccctccacaacaacagactgcctgagctgttgaacctggacaggtggcagcttccagagacttggatcatcttctgtaaagaggcactagaacagcagatgccacctgcaagtcacatcccactctgccattctgggctctgatctggcttaccagacttgatcaattcccttccagacattttactgcacaataccaagtaccatagaattaatcatgcaaggcaccatttgcaaagaggtaacagcattccagtgtgagatgccagggatgtttccttcctctcatcccagttctgtctgccgaagctcgtgagcagggcaccctaacatcccacttatgggtgatggcaccttcgactgtgatctttgcttatatacaatagggaggagcaaggaaaccccatcttggtataagggaaagtgaggaatataaataaggagctgggggaggag

SEQ ID NO: 339177 - DNA, 198 bp, Homo sapiens
ccactgtgtgttggggaggagacttagggcttagaccttgccccagaagagctaaggctcagatggggcacaggagtactctcctccttagcaaatgaaatgagatgtacctagactatgtgctaatagtgggacccaaaaacacattccaggagatcggaggaggaagctatcaccctgggcgcggcagggtctaat

SEQ ID NO: 339178 - DNA, 367 bp, Homo sapiens
agatcagctgataaataactagaaaaacctttgaaactatcagtggtccaatatttacattttgtttttagacatacaaataatatgtaagtacattctctaaaaattcaaacaatctaaaagaataaaataaagagtcctcttcaactccttttctccttatttctctttcttcagattgttaacagtttggtgtatagcctttcagatatttttgtaaaaagaatttttttttttttgagatagagtttcactcttgttgcgcacgctaaagtgcggtggtgtgatctgggctcactgcaacctctgcctcctgggttcaagtgattctcctgcctcagcctcctgagtagctgggattacaggc

SEQ ID NO: 339179 - DNA, 368 bp, Homo sapiens
agagtgtgtaacagtgatgactttgtgtggagtgcaaattgtatgcatctcacgatatttacattgaatcatgtaagtatcattgatatgtaagtatgatatgatacacagaatgatgtaaagatctcttgagtgtggtttttgagttctttctatggaaatgtttatgaatttacattcctcagttggtttcctttgtgactaacaatttgttttcacaagataggtcaacaatttgcatttcagtctgttagtgaggttaactaatccatactgaccatggcctcaggggtatctggctacggctgtgtttgctggtgaaactaagggaagtaagttaaaaatcaaacaactctcttagaaagact

SEQ ID NO: 339180 - DNA, 118 bp, Homo sapiens
ttctgttgcttctgtcttcgttcttgcttctctcccccgtgtactgcgttgatttctgccattatttcttcacgcggctcttgcggttatcctctccccattctccctggctccccaa

SEQ ID NO: 339181 - DNA, 571 bp, Homo sapiens
aaccaagacttcttagctggactaagcaattgattaaactcgctacctgccgccttctgctcttgccaccctccatacccaaagaagaaagaaaggaaacaaaccttgtggactatccacaggataacacaagaagagagtaccacatctcaagaccacaagatggcttccagaggcaatggggaatcaagcttcattaccatattttacaggaaagatgttccataatgtcatctctagactaagcaaattcaacgtaaataaaagcataaattggtctctaacaacagctcgagggccttctggcaaggactaagtgaccacccttcaagacttcagtctgtcaatcaaatcttaggaaaacttgtccttaagaaagaggagaacttaaaaaggaaataaaagaaaacttgaaaagaaaaaagaagaaaggggaaaagtggagcttgaaggacattattgactcagtatacagatcagtaaaaagaaatgaaatagaaaaatataaaataaataaaataatttgaagagccaaaaatgaaataaagttcttgggctgattttaacccac

SEQ ID NO: 339182 - DNA, 548 bp, Homo sapiens
aaccaagacttcttagctggactaagcaattgattaaactcgctacctgccgccttctgctcttgccaccctccatacccaaagaagaaagaaaggaaacaaaccttgtggactatccacaggataacacaagaagagagtaccacatctcaagaccacaagatggcttccagaggcaatggggaatcaagcttcattaccatattttacaggaaagatgttccataatgtcatctctagactaagcaaattcaacgtaaataaaagctcgagggccttctggcaaggactaagtgaccacccttcaagacttcagtctgtcaatcaaatcttaggaaaacttgtccttaagaaagaggagaacttaaaaaggaaataaaagaaaacttgaaaagaaaaaagaagaaaggggaaaagtggagcttgaaggacattattgactcagtatacagatcagtaaaaagaaatgaaatagaaaaatataaaataaataaaataatttgaagagccaaaaatgaaataaagttcttgggctgattttaacccac

SEQ ID NO: 339183 - DNA, 184 bp, Homo sapiens
cattgcactccaggctggatgacaagagtgagactccatctcaaaaaaaaagaaaaagaaaatagactctaaaacattacaagtctttaagcaatcatgtcaaaactttagagtagttaagatattaaagtgaatatatctttcttcaaaactaccagtacacagccaacatacacaacaaaaa

SEQ ID NO: 339184 - DNA, 456 bp, Homo sapiens
aaagccatggtgtgttacttgagagagaggaagtttctggctgtctggctggaaaacaggacatcataggtggttttgggctttgcttggaagaaattaatggatgcctctatggatgcctctatatcccccagggtaaccgactttgctttatttttctagacattttcttagtcattcagtatgcttagggaacgtgcttacctggtcagaatcctctgtttcagctctaccccatctagcctccattgcatacttgtattttgagagatcgtaaagatttcttcccccaaggaaaaataagtttgggaaatgctgagtgaaattgatttctttaccacaggacttttaatatgccaatgtgcattatgaatttccaagaaaagaatagtatgtggtggttccttatttgacactggtacctttttttttaaattaatgaaagaccattagcat

SEQ ID NO: 339185 - DNA, 412 bp, Homo sapiens
caaatatctaattcaactactgaacattaaactggaaatataaagatggtggccgtattatttataatctgacacacagcccttctagtagagcttatacattcagcaagtgaaagaatatgagaatgtgagtattttgtgtgctcttcacgaaaataaagttgacattctgtagcatcctaaaacaagataagctaatgtaatttgaaaatggtaagtatgtttctaaaaatacatgttagaaagtttgaagtttgtgtttatagtcaatagtggctgacttcatctctagaattcttgaaatccaagttgttgatagttttaaaattttgtagcatgaggggggtctggtcatttggtccatattttattttattgtattttattctttttttttttttttttttttttt

SEQ ID NO: 339186 - DNA, 464 bp, Homo sapiens
cgaatgaagaaaggaagaaagttgcccttaggaaattatactggcagaagtgggagggaattagaaggaggctgttattatttatgtgattttcttttaccatttgtatattttacctggatttaaggaaaatgtcaattatgaaggccatatggcaacatctgtgacagagtgttaagatacaatatttgccaagataccactgagtactgagtatttatattactggttctcagcacttgacattttcctaaggatttatcaatggttatatgaaactctgtgtgctagctttctcacttaggaaaacataccaaatgtaagagagtgaaattgacattattataactctaatcttgggtgtgctatgctatattaaaagagataaaccttagcaaactggggtactttaaatatgattaataagtttaggtagaacatctcatgattcatcgctccatagt

SEQ ID NO: 339187 - DNA, 435 bp, Homo sapiens
taacaatgccaaacaaagagattatttttataggctacctctttctcagagaaaaaaagctttaaaatgttttaccacaaaagagtcaataatgaagttaataaaataaaaccagaaaaccagagccaaggcaatgagaaaaatgcgaatgtggtaacattgtagggaacaggtctgctgtaactgacctgcacatttgccctaggttttctggcaagaagggccagggacgtcatgagtcacagcaggagagaggaagcagaccaggttcctgatgggaatgtgtgtccccaacaggaattccaagtttgcttataatgcactttatatcaagtgctgtggatgatgtagtcagcagtgccttcaaaaccattttttgaacagtaaataaagacatattttatgcgtagagaatttggttaaaacaagatagta

SEQ ID NO: 339188 - DNA, 822 bp, Homo sapiens
gtggttgtggtgccccttgctgtctcagtcgcctgcctgaactctgattgtcacatggccacagcgctgcctcttgggcctggagcctcagtaagacccaccacaagggagggtggaaggtcccagggccccttcctaacgggaccagagctcaacacttgcccttctcaccattcagggtctcctcactgggactgtcactctggagcttcgcagagcaccccgcctttggaaggtgagagggaagaaaacgcagcactgtcctcccactccctaaaacagacacctacaaccctcagcctaggaagtaagtggctaagtgttgactcattctctcagctgtcaccactgactggcctcaatcactgaggaggaaagcaaaaaagttaagagggcttatggccctgtttggaggctgagaagcagaagctgagttttgtcttcagctaggctgcaagtggggattgaggttggaatgactcccctaggctgggcagggctgagctggctcactggcaggtgcgggccatgatgatattcaacaccttcaacttgatcttgggtttcatcgtggtggtggtcgaggtgatgaagacagccttggggcctgccccaactgcctcctcccaggtactggtcaatgaaggagaaggtgggaggataaggaggcaagaggaggtgggaagggaaaagggcaggggcaaacaggtgcggggtccctgcattctcagccctgtctacctgcagcatgctggcttgctggtgctggaactcagtgctgaggccttcaccctagggggagtgctggtctcagtgcacgcc

SEQ ID NO: 339189 - DNA, 705 bp, Homo sapiens
gtggttgtggtgccccttgctgtctcagtcgcctgcctgaactctgattgtcacatggccacagcgctgcctcttgggcctggagcctcagtaagacccaccacaagggagggtggaaggtcccagggccccttcctaacgggaccagagctcaacacttgcccttctcaccattcagggtctcctcactgggactgtcactctggagcttcgcagagcaccccgcctttggaaggtgagagggaagaaaacgcagcactgtcctcccactccctaaaacagacacctacaaccctcagcctaggaagtaagtggctaagtgttgactcattctctcagctgtcaccactgactggcctcaatcactgaggaggaaagcaaaaaagttaagagggcttatggccctgtttggaggctgagaagcagaagctgagttttgtcttcagctaggctgcaagtggggattgaggttggaatgactcccctaggctgggcagggctgagctggctcactggcaggtgcgggccatgatgatattcaacaccttcaacttgatcttgggtttcatcgtggtggtggtcgaggtgatgaagacagccttggggcctgccccaactgcctcctcccagcatgctggcttgctggtgctggaactcagtgctgaggccttcaccctagggggagtgctggtctcagtgcacgcc

SEQ ID NO: 339190 - DNA, 258 bp, Homo sapiens
ggtttgctgaaggaggaagatggaatgggagctaggacatttggaggggctagatagaagcagggacttggtatgggacaaagcagcatcttttctctcaggcctcatggactgtggagttttcatttcttgtaagcatttgccctgatgggagcatgcgctttagctctgacatcattttcaagaaagagaagggcaaactggcaccaaatagctacagaaaaagggaggggaatctgtcctttttttttttttttt

SEQ ID NO: 339191 - DNA, 294 bp, Homo sapiens
tctgggtttcctttgggaaacactcctccccagtcttcattcaagtggtttggatggggctaaatctacgccctatttgtagaggtagatgtatggtgcagacctaccttgcatttcatctccttggacagagtgtttgcttccaaggtggccacaggacccaagctggatcaatgagatacaaccttaggatttttgatggaactcttgggaaagagaggctcttcttcaatggttcctaagccttgaaatgtatgtctagggataccattctgtcacctcatgcccagagcc

SEQ ID NO: 339192 - DNA, 150 bp, Homo sapiens
agaaataatgttgattctgttccatatgtcagaccttggaaggtcaactgcatgactgtggctgagactttgtacttgggagtgtgcagttttaaatcctgaccactatcttaggcaagtcccttctcttttctgagtgcctgtctgctt

SEQ ID NO: 339193 - DNA, 801 bp, Homo sapiens
cccacctcaacctcccaagtagctgggaccacaggggcatgccaccacacccagctgattttttaatgttttgtagagatcaggtctcattatattgcccaagctgggggagttgattttaactttatgttagagtagtcagggaagacctcactgaggtgacatttaagcaaaaacctgaatgtggtgaagcaggtatctgggggaccttggaccacacaaagggaacagcaagtgcaaaggccctgaggtaggagcacgtagttgtggtgatgacggagagtagcaggaatttgtgtcatagaaatagtgggggctggccaggcacagcggctcatgcctgcaatcctagcactttgggaggccgaggtgggtggattacttgaggtcaggagtctgagaccagcctggccaacatggtgaaaccccatctctactaaaaattaaaaaaaaaaaaatggccaggcatggtggcgtgcatctgtaatcccagctattcaggaggctgagacatgagaatcacttgaacccgggaggcggaggttgcagtgagccgaaattgtgcctctgcactccaacctgggtgacaaagcaagactctgcctccaaaaaaaaaaaaatggaacatggaaacatggaatgggagaaaatatttgcaaatcatatatctgataaggggttcatatccagaatacataaagaactgttacaactcaacagcaataaaaacaactcaattaaaaatgggcaaaggacttgaataaacatttctccagagaaaactgtgaatggctaataatc

SEQ ID NO: 339194 - DNA, 736 bp, Homo sapiens
ataatgtcaaataaaaaaaaacaagatatgtctatgagaaactttttctatgaactttttatatgaacaaggctgaaaggaaatactctaaattagtggttgggttaaagtggtggactgtggtatgattttattccattacttttgtatttttaaaaaaattgctttaagctcaaatgtgcaatgagaaccaccatatcagctctgacaatttcttttgtctcttcttgcatggacttttaaacaaatcagtatattttaaacaagcatgtatgataaaagaacaggagagataattcttataatcttcctgagtagcacacaaggaggtgagaagaagaggcagaggttggggagtgtaattgcttcacagatccccatcctgtccctggtgaggcaggccaggtcatacacatactggtgggagggtcacagagtctttttcagtgcacaggagggagaatccagctccctcatactggctaaagactagttctttgccaccagctcccagtcctttttttttctgcatagcacctcattttgagttggagagcaacccttttcttactttttccaggggtggagaatgagattcaggacagactggccaaaagtatatcaactctctggactcagtgcctggatgagggatggcccaagacctaagcctgcccaatcagagtaactctccaggactcacgaacagatatttgctgtttgctgggcttgcact

SEQ ID NO: 339195 - DNA, 166 bp, Homo sapiens
gtggacaataagaagagatggggaaaatcattcagcagaggagaagtccctgcaagggcacagctggaagaggcagtcaggcaactgggcttcggggaactagaacctgaagtaccagacaggttgtgtgcgggcatttgaggggcagggtatagaaatagtaacc

SEQ ID NO: 339196 - DNA, 660 bp, Homo sapiens
tttgcctgaagtttactctaggtgcagaaataaagacaacttagtcaagtgaaggaaagggtaacagacttagaaatggctatctacactgatggaataagtatactaattagagcaggtaacaagtccccacgatgtataacatattcttctctaaaagctcacaacaatttatgtgccaccttccatcccctttcccagcagatggtaattgatgcaatttgagaatagaacacttcattgaaacaagtcactggaggtcctctggggatgcagcttaaaagcccaggatcaggccaggtgtggtggctcacgcctgtaatcccagcactgtgggagactgagacgggcagatcacctgaagtcaggagttcgagaccagcctggccaatatagagaaaccccgtctgtactaaaaatacaaaaattaggtctgggcggtggctcacgcccgtaatcctagcactttgggaggccaaggtgggtggatcacgaggtcaggagttcgagaccagcctggccaacatggtgaaaccccgtctctactaaaaatacaaaaattgggtgtggtggtacatgcctgtaatcccagctgcttaggaggctgaggcaggagaatcacttgaacccaaaaggcagaggttgcagtgagccgagatc

SEQ ID NO: 339197 - DNA, 631 bp, Homo sapiens
caatgtcaggatttcagcgcccctgggaaaattaactcagctcctattctccagctctaatggaaatcctgggcagaaaccagcaaacttaagaagggtatgaaatgtaggtcccttaccagtcagccccaccctttttttttttttttggtaactgagataatttattgtatttttgatctgagttatcctagtctcagccatctcccaaaccaaaagattccatatggcatctttatgtttgtttatttccttataaagtgtgtttattttttgctgattagaaaagttgtgtacacgatagtccttacgatgaacctgaaaataacataaaaaggcaagaaaagtcactctaaatctctgtaccaaaaacctgtcactaccaagattggtatatttacttccaaaccttttgaattgtgcagatttcatatttgcttctgtatttaaaaatatataattttgataagattgtatatacatgtttatactcaggtttgacagactccctgtaaacagatctacccatctggtggatataccatagtttacagaactgcgcatgttatcagtttgtttcccatacttttttttactgttataaaataacaccgtaataagtttctctgtg

SEQ ID NO: 339198 - DNA, 318 bp, Homo sapiens
tgtcgtggccctatctagaattctcacacctcaggctgcggttggggagcagggaggcagcagccctgactgggaacctagaagactggactggatgacctgccaggggtctccccaaggcccggccaacttcccaggtgaccttgagcacagcctctttctggacctaggcttttccacctgtggagcagaggggcctgctggcctcaggcatccactgtggctctgagtctaaggtgagctcagccagggagcctgggggtcagggctcccacactcttggggcagataacctgaggcatccctgaccccaccccc

SEQ ID NO: 339199 - DNA, 95 bp, Homo sapiens
aaaactattagaagaaaacttttgagacctgctaaaagtcctccatgaaaaaccaaaattggcccggcgcagtggctcacacctgtaacccagaa

SEQ ID NO: 339200 - DNA, 329 bp, Homo sapiens
gtgagccgagatttcgccactgcactccaggctgggcaatagagggagactttgcctcagaaaaaaaaaaaaaaaaagaatcactaacctggttcagccttttcatttggcagatgagaaaactgaggactcagaaattaaataacttgcctaagatggtagagctctcttcaaacagaaccagaaattatggtgctacaaaaatacctgcttatcttagagccaaaacatttcaattttaaaaaatggcctcgtatggcagatacataagtcaggtatgccactcctgggatcatatcggatgggaggcaggattagattacagctcc

SEQ ID NO: 339201 - DNA, 458 bp, Homo sapiens
gtgagccgagatttcgccactgcactccaggctgggcaatagagggagactttgcctcagaaaaaaaaaaaaaaaaagaatcactaacctggttcagccttttcatttggcagatgagaaaactgaggactcagaaattaaataacttgcctaagatggtagagctctcttcaaacagaaccagaaattatggtgctacaaaaatacctgcttatcttagagccaaaacatttcaattttaaaaaatggcctcgtatggcagatacataagtcagctccagatcgactgcaagaacaaaccagcaatcctgagaggatccacagactctctgaaggaagcagactgctcctgcaggacccaggagacccccaaatactatcctgtgcatgtccacggagcgtttctgatccagctccccgtttttaataaggaactcttcaacaagaaataaactccc

SEQ ID NO: 339202 - DNA, 867 bp, Homo sapiens
cagctcggtaccccttacaggctttggagcaggccatgcctggcagtgatcagcacagacctgggatgggtaatgaacaggtggggtgggagagccccgcacctaccatctagtgtgtaagagctgcattcatacatctgactatacctatagcatattgtctcccccgattactactctagcccttgccaccttaatctaaggccagaaggaaaatccacctatggtagaccatggacgctcctcacagccaggactgaaggtggactgtaacagctggcttgttctaggacatttttaaccccagcactgctcaatgggataagccttgtcaccttacaacaatgtgtcttctcatttactgtttgtccaggtgctacatgtcagttaccaggcaccatgtgaaacaagacagaggcactgccctgaggaagctcacagcacagtgggcaggagaagcaaaccaacaattcccaaacagtgtgaccagtgctgagaggtgggaaggagtgtgatggggaggcagagagagcttctggggggagctctaggaaggggtaaccactactgtggctccaaagcctgtcaggggcataaactcagtgtggcaggtccctgcttcactgtcctttgacaggagcctctgagtcccatgctaggcacaagggacactcaatgaaccatacagcaccagtgtatggtagatgcatgtaacaatagcttcttaggaaacgagggttgccatgtggaggttactgggggaaggtgctatataatctgcatgcattttacaagtggatgaggtgcccccatccagccccccaccactagactgctgactgccctcaagttccccagataaaccct

SEQ ID NO: 339203 - DNA, 1466 bp, Homo sapiens
atacgatcgagctcggtaccaggtctgagtaggcctgtgagataattttaggaagatctgatggcacagcatggaagaaaatcaggtttccctacagaatcgctcccaaaagaaaacttattttggttaaatttctggatttaggtagagctgatatcaaaccctcatttggtctgttttatcaagcttggactgcagcagatgtggaactagagattcgtcacagattccagtaacatttaggaaaatgtttggctctgctattccagttcagtagaacaacttcgaaactggatttttctgtagggtgtcatcatcaccctgagatgccaatgtcatctgtgttgttatagtcttgggtctgctttgtgatccaatgagcccaaaagagtaaaatgccctcaaaggattgagaaaaaaaaaaggaaaaaacaaaacaaaggaaaacaaaaccttcccaattgagactttagcagcgttgtttagtgttctaaaaaaaaagaaaggcaatgaaactaatgagacctgtaaagagaatatgagagagtagggagagcagggtagatggaagctattaaacatttactatgtgtcagatgttttcatggtgtaatatcatttgtcttgtaaaagtcctctgtggtgggttttatcattttttattattttatttcatgaaggactgaactgaggctcagaggttaataatgccccacaggtcatgtagtaaattgtagaggcaggatccaaactgatatctttttgcctccaatgctcgtgttcttttctagtaactcatgccaccttcccatagacaaggttattttgttcccaagcttacttaacttcctctgcatgtcgtaaaatcctaaattcctaaattctccctgaccccaagtgaaagatccatttggatcaacatttttgttacagtgttgtttctactctgtgtgctctcttaagtcctggagcaatatgagattaattgttctaggtataataaactcatgcagtcaaatactatcacttcagctcacatatgtgaggcaacttgaccttgagttcgaattgaccaaggccactcaaacctatttgaactaaatgggtctggccaggtacccttcatactgacattagttttagatagtctaagggtaacacatgcttgaacaaacgtgattttattttaaattggaaataaaataacatctagtcagatgactgctgtttcaggctggaatgatgtctgacatcaatttctagcagctggaatccattccccaagtggcaaagcgtaccttggcctctataaccctgaagctcagccagtttcttaaggtcttctaatagaaaacagcaagatatttcttaagggtggttcagaaagcataatttggagttgattctaatcctagcagtgacctatgttaggcaaatgccttggatagtgctcagtcccctatgac

SEQ ID NO: 339204 - DNA, 504 bp, Homo sapiens
ggcttactgcaacctctgcctcccaggttcaagcgatgctcctgcctcagcctcccaagtagctgggactacaggtgcccaccatcacgcccggctagttttttgtatttttagtcgagacagaggttttgtctattggaactcatgatctcaagtggtcccacccacctcggcctcccaaagtgctaggattataggtgggagccactgtgcctggcctcaccctgatttctacagtatttcacaacttgggggcagcattagccaccagagaacatttgggaatgtctggagacattcggttgtcagaactggaggtggagggtgctactggcatctagtgggcagagaccagggatgcagctaaacatcctacagtgcctgggcctgcctccacaacacaaagaactgtctggtccaaaatgtcagtagtcctgaggctgagaaattgtagcttagaggcaccgtttcgcctggctgtgtgcagctgagccactcagtaca

SEQ ID NO: 339205 - DNA, 254 bp, Homo sapiens
aatatactgtatatgatcagtacacagcaggaaacctttctaatttacataattcattcccacacaaagctcaaaattatattccttgaacaaaatgcacatttatcagttgtcaacatctgttaccatttgtcactataacctaagtatgcatatagttaataattcagttgctttgtccttttacacaacagatgttgattgaatgctttcagtatgttaagagctgttgtagatgctggcgatatagaagt

SEQ ID NO: 339206 - DNA, 281 bp, Homo sapiens
aaaatatagttattttctgttttctttactcttggttcaaaaagcataatttagaaattgatcgtgctgataagaatacaatggcaaaagataaaaaagcttttattatagcattataataatgtgtgttatgtacgaaaaagagcaagactaggtttttttgttctttctgattttgccaggttaccttacaaatggtagtaattatcctcttttcttaactttaggcttttatgatcttgcaaagatatgacaaaaatgggaaagtaactgctaattgc

SEQ ID NO: 339207 - DNA, 426 bp, Homo sapiens
caacaagagtgagactccatctcaacaaaacaaacaaacaaaatgtcaccgttagagagatacttctgtgggataacactagcttctccaataattcactattaaaatatcagaacagcatactccgtggcctgatattatcatatctcagtttatcagctttaatttatcagtctagtaggaagcagaggggagtgggtagcagatggtgagttctgatggagggcagagaaaggaggaaaggtatgatagcctaaatgtactagaaggaaatatgtattaataattttataatcttagcacagagccaggcgcagtggctcacatctgtaatctcagcactttgagaggccgaggtgggcagattgcttgaggccaggagtcccagatcagcctgggcaacatggcaaaactctgtctctacta

SEQ ID NO: 339208 - DNA, 223 bp, Homo sapiens
gtagacggcctagtatctaagtatctgacctgtgaccaggtatctctcccacaggaaatgttgatactggcagatattcttctggctcttgtctaacgtgtgttctctttatttctaccaagatagcgactctgtaggagagctctggccaggaggagagttaggttagagtgtgtcaagtgagacacagaggaggcaactcaacaaaacacatgaaacaaca

SEQ ID NO: 339209 - DNA, 525 bp, Homo sapiens
tctttatccagtctctcattgatggatatttgggttggttccaagtcgttgctattgtaaatagtgcaatctcttttctttataaattacccagcctcaggtatttcttaatagcaatgcaagaatgacctaatacagagacataagagaaagggtcccttggactgtctacctttgtaccatgttcaagtattacttatgtttttaaatatttgaaaagcaaaaataaataaaaagcaaataaagtaagacatctgaggaagaaacctggtttagctgatcttaagaatggttcagaaaacttaagaaagatgttaacttaagaaagatgtttggagataactaccgactcttgttaaccacttttcatggacaatttcaaggggatttgtctacccatcaccaagccctgaattatcaggtagaccgcaagtttccagagggaagaaggcatgggtttttgtacctctcctgtgacctagccaagcctctggaagagaatatgtacttgagaaatattaggtc

SEQ ID NO: 339210 - DNA, 363 bp, Homo sapiens
gaggatcacttgaggtcaggagtttcagaccagcctgaccaacatggagaaaccccgtctctactaaaattacaaaattagctgggcttggtggcacatgctactcgggaggctgaggcaggagaattacttgaacgcaggagatggaggttgtggtgagccgagattgtgccattgcactccagccttggcaacaagagcgaaactccgtctcaaaacaaaacaaaacaaaaacaaaaaacaaaactatatacaagcaattagcaggaattataaagatctaggaagtacaaacctgttccaggaatcgctctaacaattatctgtctctatccagactaagctctttgttgatggtaagag

SEQ ID NO: 339211 - DNA, 657 bp, Homo sapiens
cccccctcacacatgcacttttgggcctttttttatagctggaaaaaacaaaataccaccctacaaacctgtatttaaaaagaaacagaaatgaccacgtgaaatttgcctctgtccaaacatttcatcccgtgtgtatgtgtatgtgtgtgagtgtgtgaagccgccagttcatccccttagaggacctgagtttgggagagtggtgagtggaagggaggagcagcaagaagcagcctgttttcactcagcttaattctccttcccagataaggcaagccagtcatggaatcttgctgcaggccctccctctactcttcctgtcctaaaaataggggccgttttcttacacacccccagagagaggagggactgtcacactgctctacagttcacagaggtctttcagctcatttaatcccaggaaagaggcatcaaagctagaatgtgaatataacttttgtggaccaatactaagaataacaagaagcccagtggtgaggaaagtgcgttctcccagcactgcctcctgttttcctcgtgggcttgtgctcgggatcaaacctttctggcctgttatgattctgaacatttgacttgaaccacaagtgaatctttctcctggtgactcaaataaaagtataatttttacctgcg

SEQ ID NO: 339212 - DNA, 562 bp, Homo sapiens
gggccccaagccgaggccctttcggctcctggcctgactccaatccctcttcctcccctcctgcaggtgcgctacaaggaggagtttgagaagaacaagggcaaaggtttcagcgtagtggcagacacgcccgagctccagagaatcaagaagacccaggaccagatcagtaacgtgagctcttgccctgccctgcggcatccctgctgccctctgtttggtccccttcctgccagcctggcagacgcaagcctggcagatgtgaatgaggccagtgcctccactacccctgccctccagggtgggcctggggaagagcttggggttcccagatgcctcttctctgtgtacccccagaccaccagcacgcatagcattttcttcttgaagggactgtattctgtgggggcctgtgtgctaaatcagcccccactctctctgactgttgttcttttttctggatatcgtgggtatcggtgaagactgcatgtctcatcttagcacaaaggtcaaaactgggggcggggagcacctgcctccctggtctgcgcctgggtgctga

SEQ ID NO: 339213 - DNA, 1055 bp, Homo sapiens
  misc_feature (44)..(44): n is a, c, g, or t
acaacaaaaaggcgcagccttttgtacactatgcccacggttantcaagcaggctggtactgcgtccgggttaccgggatatcgatgacactgaacatgaagaactacaagggctacgagaagaagccctactgcaacgcacactaccccaagcagtccttcaccatggtggcggacaccccggaaaaccttcgcctcaagcaacagagtgagctccagagtcaggtgcgctacaaggaggagtttgagaagaacaagggcaaaggtttcagcgtagtggcagacacgcccgagctccagagaatcaagaagacccaggaccagatcagtaacataaaataccatgaggagtttgagaagagccgcatgggccctagcgggggcgagggcatggagccagagcgtcgggattcgcaggacggcagcagctaccggcggcccctggagcagcagcagcctcaccacatcccgaccagtgccccggtttaccagcagccccagcagcagccggtggcccagtcctatggtggctacaaggagcctgcagccccagtctccatacagcgcagcgccccaggtggtggcgggaaagccggaaccgcgcggtggtattgactacaagcgccgaccgaccgaaggacgaaggtcatacctttccaagggacgggtgaacaccaatcggtacaaccgtggcagcagcattcgaacgacagggctggaatggtaccggcaaccggatgggaaccggcaacacgcgagaacaaacggggcaaatccctgacacgaggacagaacatatagcgatggaaaggcacacacctgtgaaaccccgcaacagaggcgaccccgcaaagcaggggaactttccaacgagcgcaacacattttccccacacaggggagccattcggcacaattcccggggaccccttgtagtgcaatgtgaacccccgggttacaaattccatttacacagagtgcaccaccatagtgataaatttataaaaaaaacccttgtgtgaaaacaacggactcctggcagaatcgcgtataccc

SEQ ID NO: 339214 - DNA, 3741 bp, Homo sapiens
aattaggctaggtacgaggctggtgttgaatcggcaccgaggccagctccagccgccgtcgctgctgcctgtgtagttgcagccgcggccgcctcccgccagctcgcctcggggaacaggacgcgcgtgagctcaggcgtccccgccccagcttttctcggaaccatgaaccccaactgcgcccggtgcggcaagatcgtgtatcccacggagaaggtgaactgtctggataagttctggcataaagcatgcttccattgcgagacctgcaagatgacactgaacatgaagaactacaagggctacgagaagaagccctactgcaacgcacactaccccaagcagtccttcaccatggtggcggacaccccggaaaaccttcgcctcaagcaacagagtgagctccagagtcaggtgcgctacaaggaggagtttgagaagaacaagggcaaaggtttcagcgtagtggcagacacgcccgagctccagagaatcaagaagacccaggaccagatcagtaacataaaataccatgaggagtttgagaagagccgcatgggccctagcgggggcgagggcatggagccagagcgtcgggattcgcaggacggcagcagctaccggcggcccctggagcagcagcagcctcaccacatcccgaccagtgccccggtttaccagcagccccagcagcagccggtggcccagtcctatggtggctacaaggagcctgcagccccagtctccatacagcgcagccgcccccatctgtcttcagcacattccacggcatcgcatccgtcctgggcgtgacccgtccattcttcagtgtctctgttttttaaaacctgcgacagcttgtgattcctacccctcttccagcttcttttgccaactgaagccttcttctgccacttctgcgggctccctcctctggcaggcttcccccttgatcgacttcttggttttctctctggatggaacgggcatgggcctctctgggggaggcagggctggaatgggagacctgttggcctgtgggcctcacctgcccctctgttctctcccctcacatcctcctgcccagctcctcacatacccacacattccagggctggggtgagcctgactgccaggaccccaggtcaggggctccctacattccccagagtgggatccacttcttggttcctgggatggcgatggggactctgccgctgtgtagggaccagtgggatgggctctacctctctttctcaaagagggggctctgcccacctggggtctctctccctacctccctcctcaggggcaacaacaggagaatggggttcctgctgtggggcgaattcatcccctccccgcgcgttccttcgcacactgtgattttgccctcctgcccacgcagacctgcagcgggcaaagagctcccgaggaagcacagcttgggtcaggttcttgcctttcttaattttagggacagctaccggaaggaggggaacaaggagttctcttccgcagcccctttccccacgcccacccccagtctccagggacccttgcctgcctcctaggctggaagccatggtcccgaagtgtagggcaagggtgcctcaggaccttttggtcttcagcctccctcagcccccaggatctgggttaggtggccgctcctccctgctcctcatgggaagatgtctcagagccttccatgacctcccctccccagcccaatgccaagtggacttggagctgcacaaagtcagcagggaccactaaatctccaagacctggtgtgcggaggcaggagcatgtatgtctgcaggtgtctgacacgcaagtgtgtgagtgtgagtgtgagagatggggcgggggtgtgtctgtaggtgtctctgggcctgtgtgtgggtggggttatgtgagggtatgaagagctgtcttcccctgagagtttcctcagaacccacagtgagaggggagggctcctggggcagagaagttccttaggttttctttggaatgaaattcctccttccccccatctctgagtggaggaagcccaccaatctgccctttgcagtgtgcagggtggaaggtaagaggttggtgtggagttggggctgccatagggtctgcagcctgctggggctaagcggtggaggaaggctctgtcactccaggcatatgtttccccatctctgtctggggctacagaatagggtggcagaagtgtcaccctgtgggtgtctccctcgggggctcttcccctagacctccccctcacttacataaagctcccttgaagcaagaaagagggtcccagggctgcaaaactggaagcacagcctcggggatggggagggaaagacggtgctatatccagttcctgctctctgctcatgggtggctgtgacaaccctggcctcacttgattcatctctggttttcttgccaccctctgggagtccccatcccattttcatcctgagcccaaccaggccctgccattggcctcttgtcccttggcacacttgtacccacaggtgaggggcaggacctgaaggtattggcctgttcaacaatcagtcatcatgggtgtttttgtcaactgcttgttaattgatttggggatgtttgccccgaatgagaggttgaggaaaagactgtgggtggggaggccctgcctgacccatcccttttcctttctggccccagcctaggtggaggcaagtggaatatcttatattgggcgatttgggggctcggggaggcagagaatctcttgggagtcttgggtggcgctggtgcattctgtttcctcttgatctcaaagcacaatgtggatttggggaccaaaggtcagggacacatccccttagaggacctgagtttgggagagtggtgagtggaagggaggagcagcaagaagcagcctgttttcactcagcttaattctccttcccagataaggcaagccagtcatggaatcttgctgcaggccctccctctactcttcctgtcctaaaaataggggccgttttcttacacacccccagagagaggagggactgtcacactggtgctgagtgaccgggggctgctgggcgtctgttctttaccaaaaccatccatccctagaagagcacagagccctgaggggctgggctgggctgggctgagcccctggtcttctctacagttcacagaggtctttcagctcatttaatcccaggaaagaggcatcaaagctagaatgtgaatataacttttgtggaccaatactaagaataacaagaagcccagtggtgaggaaagtgcgttctcccagcactgcctcctgttttctccctctcatgtccctccagggaaaatgactttattgcttaatttctgcctttcccccctcacacatgcacttttgggcctttttttatagctggaaaaaacaaaataccaccctacaaacctgtatttaaaaagaaacagaaatgaccacgtgaaatttgcctctgtccaaacatttcatccgtgtgtatgtgtatgtgtgtgagtgtgtgaagccgccagttcatctttttatatggggttgttgtctcattttggtctgttttggtcccctccctcgtgggcttgtgctcgggatcaaacctttctggcctgttatgattctgaacatttgacttgaaccacaagtgaatctttctcctggtgactcaaataaaagtataatttttacctgcg

SEQ ID NO: 339215 - DNA, 3833 bp, Homo sapiens
aattaggctaggtacgaggctggtgttgaatcggcaccgaggccagctccagccgccgtcgctgctgcctgtgtagttgcagccgcggccgcctcccgccagctcgcctcggggaacaggacgcgcgtgagctcaggcgtccccgccccagcttttctcggaaccatgaaccccaactgcgcccggtgcggcaagatcgtgtatcccacggagaaggtgaactgtctggataagttctggcataaagcatgcttccattgcgagacctgcaagatgacactgaacatgaagaactacaagggctacgagaagaagccctactgcaacgcacactaccccaagcagtccttcaccatggtggcggacaccccggaaaaccttcgcctcaagcaacagagtgagctccagagtcagataaaataccatgaggagtttgagaagagccgcatgggccctagcgggggcgagggcatggagccagagcgtcgggattcgcaggacggcagcagctaccggcggcccctggagcagcagcagcctcaccacatcccgaccagtgccccggtttaccagcagccccagcagcagccggtggcccagtcctatggtggctacaaggagcctgcagccccagtctccatacagcgcagcgccccaggtggtggcgggaagcggtaccgcgcggtgtatgactacagcgccgccgacgaggacgaggtctccttccaggacggggacaccatcgtcaacgtgcagcagatcgacgacggctggatgtacgggacggtggagcgcaccggcgacacggggatgctgccggccaactacgtggaggccatctgaacccgcagcgcccccatctgtcttcagcacattccacggcatcgcatccgtcctgggcgtgacccgtccattcttcagtgtctctgttttttaaaacctgcgacagcttgtgattcctacccctcttccagcttcttttgccaactgaagccttcttctgccacttctgcgggctccctcctctggcaggcttcccccttgatcgacttcttggttttctctctggatggaacgggcatgggcctctctgggggaggcagggctggaatgggagacctgttggcctgtgggcctcacctgcccctctgttctctcccctcacatcctcctgcccagctcctcacatacccacacattccagggctggggtgagcctgactgccaggaccccaggtcaggggctccctacattccccagagtgggatccacttcttggttcctgggatggcgatggggactctgccgctgtgtagggaccagtgggatgggctctacctctctttctcaaagagggggctctgcccacctggggtctctctccctacctccctcctcaggggcaacaacaggagaatggggttcctgctgtggggcgaattcatcccctccccgcgcgttccttcgcacactgtgattttgccctcctgcccacgcagacctgcagcgggcaaagagctcccgaggaagcacagcttgggtcaggttcttgcctttcttaattttagggacagctaccggaaggaggggaacaaggagttctcttccgcagcccctttccccacgcccacccccagtctccagggacccttgcctgcctcctaggctggaagccatggtcccgaagtgtagggcaagggtgcctcaggaccttttggtcttcagcctccctcagcccccaggatctgggttaggtggccgctcctccctgctcctcatgggaagatgtctcagagccttccatgacctcccctccccagcccaatgccaagtggacttggagctgcacaaagtcagcagggaccactaaatctccaagacctggtgtgcggaggcaggagcatgtatgtctgcaggtgtctgacacgcaagtgtgtgagtgtgagtgtgagagatggggcgggggtgtgtctgtaggtgtctctgggcctgtgtgtgggtggggttatgtgagggtatgaagagctgtcttcccctgagagtttcctcagaacccacagtgagaggggagggctcctggggcagagaagttccttaggttttctttggaatgaaattcctccttccccccatctctgagtggaggaagcccaccaatctgccctttgcagtgtgcagggtggaaggtaagaggttggtgtggagttggggctgccatagggtctgcagcctgctggggctaagcggtggaggaaggctctgtcactccaggcatatgtttccccatctctgtctggggctacagaatagggtggcagaagtgtcaccctgtgggtgtctccctcgggggctcttcccctagacctccccctcacttacataaagctcccttgaagcaagaaagagggtcccagggctgcaaaactggaagcacagcctcggggatggggagggaaagacggtgctatatccagttcctgctctctgctcatgggtggctgtgacaaccctggcctcacttgattcatctctggttttcttgccaccctctgggagtccccatcccattttcatcctgagcccaaccaggccctgccattggcctcttgtcccttggcacacttgtacccacaggtgaggggcaggacctgaaggtattggcctgttcaacaatcagtcatcatgggtgtttttgtcaactgcttgttaattgatttggggatgtttgccccgaatgagaggttgaggaaaagactgtgggtggggaggccctgcctgacccatcccttttcctttctggccccagcctaggtggaggcaagtggaatatcttatattgggcgatttgggggctcggggaggcagagaatctcttgggagtcttgggtggcgctggtgcattctgtttcctcttgatctcaaagcacaatgtggatttggggaccaaaggtcagggacacatccccttagaggacctgagtttgggagagtggtgagtggaagggaggagcagcaagaagcagcctgttttcactcagcttaattctccttcccagataaggcaagccagtcatggaatcttgctgcaggccctccctctactcttcctgtcctaaaaataggggccgttttcttacacacccccagagagaggagggactgtcacactggtgctgagtgaccgggggctgctgggcgtctgttctttaccaaaaccatccatccctagaagagcacagagccctgaggggctgggctgggctgggctgagcccctggtcttctctacagttcacagaggtctttcagctcatttaatcccaggaaagaggcatcaaagctagaatgtgaatataacttttgtggaccaatactaagaataacaagaagcccagtggtgaggaaagtgcgttctcccagcactgcctcctgttttctccctctcatgtccctccagggaaaatgactttattgcttaatttctgcctttcccccctcacacatgcacttttgggcctttttttatagctggaaaaaacaaaataccaccctacaaacctgtatttaaaaagaaacagaaatgaccacgtgaaatttgcctctgtccaaacatttcatccgtgtgtatgtgtatgtgtgtgagtgtgtgaagccgccagttcatctttttatatggggttgttgtctcattttggtctgttttggtcccctccctcgtgggcttgtgctcgggatcaaacctttctggcctgttatgattctgaacatttgacttgaaccacaagtgaatctttctcctggtgactcaaataaaagtataatttttacctgcg

SEQ ID NO: 339216 - DNA, 3676 bp, Homo sapiens
taaccctaaccctaaccgctaaccctcaccctaaccgcgtaaccctcaccctaaccgcgtacgcacactaccccaagcagtccttcaccatggtggcggacaccccggaaaaccttcgcctcaagcaacagagtgagctccagagtcaggtgcgctacaaggaggagtttgagaagaacaagggcaaaggtttcagcgtagtggcagacacgcccgagctccagagaatcaagaagacccaggaccagatcagtaacataaaataccatgaggagtttgagaagagccgcatgggccctagcgggggcgagggcatggagccagagcgtcgggattcgcaggacggcagcagctaccggcggcccctggagcagcagcagcctcaccacatcccgaccagtgccccggtttaccagcagccccagcagcagccggtggcccagtcctatggtggctacaaggagcctgcagccccagtctccatacagcgcagcgccccaggtggtggcgggaagcggtaccgcgcggtgtatgactacagcgccgccgacgaggacgaggtctccttccaggacggggacaccatcgtcaacgtgcagcagatcgacgacggctggatgtacgggacggtggagcgcaccggcgacacggggatgctgccggccaactacgtggaggccatctgaacccgcagcgcccccatctgtcttcagcacattccacggcatcgcatccgtcctgggcgtgacccgtccattcttcagtgtctctgttttttaaaacctgcgacagcttgtgattcctacccctcttccagcttcttttgccaactgaagccttcttctgccacttctgcgggctccctcctctggcaggcttcccccttgatcgacttcttggttttctctctggatggaacgggcatgggcctctctgggggaggcagggctggaatgggagacctgttggcctgtgggcctcacctgcccctctgttctctcccctcacatcctcctgcccagctcctcacatacccacacattccagggctggggtgagcctgactgccaggaccccaggtcaggggctccctacattccccagagtgggatccacttcttggttcctgggatggcgatggggactctgccgctgtgtagggaccagtgggatgggctctacctctctttctcaaagagggggctctgcccacctggggtctctctccctacctccctcctcaggggcaacaacaggagaatggggttcctgctgtggggcgaattcatcccctccccgcgcgttccttcgcacactgtgattttgccctcctgcccacgcagacctgcagcgggcaaagagctcccgaggaagcacagcttgggtcaggttcttgcctttcttaattttagggacagctaccggaaggaggggaacaaggagttctcttccgcagcccctttccccacgcccacccccagtctccagggacccttgcctgcctcctaggctggaagccatggtcccgaagtgtagggcaagggtgcctcaggaccttttggtcttcagcctccctcagcccccaggatctgggttaggtggccgctcctccctgctcctcatgggaagatgtctcagagccttccatgacctcccctccccagcccaatgccaagtggacttggagctgcacaaagtcagcagggaccactaaatctccaagacctggtgtgcggaggcaggagcatgtatgtctgcaggtgtctgacacgcaagtgtgtgagtgtgagtgtgagagatggggcgggggtgtgtctgtaggtgtctctgggcctgtgtgtgggtggggttatgtgagggtatgaagagctgtcttcccctgagagtttcctcagaacccacagtgagaggggagggctcctggggcagagaagttccttaggttttctttggaatgaaattcctccttccccccatctctgagtggaggaagcccaccaatctgccctttgcagtgtgcagggtggaaggtaagaggttggtgtggagttggggctgccatagggtctgcagcctgctggggctaagcggtggaggaaggctctgtcactccaggcatatgtttccccatctctgtctggggctacagaatagggtggcagaagtgtcaccctgtgggtgtctccctcgggggctcttcccctagacctccccctcacttacataaagctcccttgaagcaagaaagagggtcccagggctgcaaaactggaagcacagcctcggggatggggagggaaagacggtgctatatccagttcctgctctctgctcatgggtggctgtgacaaccctggcctcacttgattcatctctggttttcttgccaccctctgggagtccccatcccattttcatcctgagcccaaccaggccctgccattggcctcttgtcccttggcacacttgtacccacaggtgaggggcaggacctgaaggtattggcctgttcaacaatcagtcatcatgggtgtttttgtcaactgcttgttaattgatttggggatgtttgccccgaatgagaggttgaggaaaagactgtgggtggggaggccctgcctgacccatcccttttcctttctggccccagcctaggtggaggcaagtggaatatcttatattgggcgatttgggggctcggggaggcagagaatctcttgggagtcttgggtggcgctggtgcattctgtttcctcttgatctcaaagcacaatgtggatttggggaccaaaggtcagggacacatccccttagaggacctgagtttgggagagtggtgagtggaagggaggagcagcaagaagcagcctgttttcactcagcttaattctccttcccagataaggcaagccagtcatggaatcttgctgcaggccctccctctactcttcctgtcctaaaaataggggccgttttcttacacacccccagagagaggagggactgtcacactggtgctgagtgaccgggggctgctgggcgtctgttctttaccaaaaccatccatccctagaagagcacagagccctgaggggctgggctgggctgggctgagcccctggtcttctctacagttcacagaggtctttcagctcatttaatcccaggaaagaggcatcaaagctagaatgtgaatataacttttgtggaccaatactaagaataacaagaagcccagtggtgaggaaagtgcgttctcccagcactgcctcctgttttctccctctcatgtccctccagggaaaatgactttattgcttaatttctgcctttcccccctcacacatgcacttttgggcctttttttatagctggaaaaaacaaaataccaccctacaaacctgtatttaaaaagaaacagaaatgaccacgtgaaatttgcctctgtccaaacatttcatccgtgtgtatgtgtatgtgtgtgagtgtgtgaagccgccagttcatctttttatatggggttgttgtctcattttggtctgttttggtcccctccctcgtgggcttgtgctcgggatcaaacctttctggcctgttatgattctgaacatttgacttgaaccacaagtgaatctttctcctggtgactcaaataaaagtataatttttacctgcg

SEQ ID NO: 339217 - DNA, 3882 bp, Homo sapiens
aattaggctaggtacgaggctggtgttgaatcggcaccgaggccagctccagccgccgtcgctgctgcctgtgtagttgcagccgcggccgcctcccgccagctcgcctcggggaacaggacgcgcgtgagctcaggcgtccccgccccagcttttctcggaaccatgaaccccaactgcgcccggtgcggcaagatcgtgtatcccacggagaaggtgaactgtctggataagttctggcataaagcatgcttccattgcgagacctgcaagatgacactgaacatgaagaactacaagggctacgagaagaagccctactgcaacgcacactaccccaagcagtccttcaccatggtggcggacaccccggaaaaccttcgcctcaagcaacagagtgagctccagagtcaggtgcgctacaaggaggagtttgagaagaacaagggcaaaggtttcagcgtagtggcagacacgcccgagctccagagaatcaagaagacccaggaccagatcagtaacataaaataccatgaggagtttgagaagagccgcatgggccctagcgggggcgagggcatggagccagagcgtcgggattcgcaggacggcagcagctaccggcggcccctggagcagcagcagcctcaccacatcccgaccagtgccccggtttaccagcagccccagcagcagccggtggcccagtcctatggtggctacaaggagcctgcagccccagtctccatacagcgcagcgccccaggtggtggcgggaagcggtaccgcgcggtgtatgactacagcgccgccgacgaggacgaggtctccttccaggacggggacaccatcgtcaacgtgcagcagatcgacgacggctggatgtacgggacggtggagcgcaccggcgacacggggatgctgccggccaactacgtggaggccatctgaacccgcagcgcccccatctgtcttcagcacattccacggcatcgcatccgtcctgggcgtgacccgtccattcttcagtgtctctgttttttaaaacctgcgacagcttgtgattcctacccctcttccagcttcttttgccaactgaagccttcttctgccacttctgcgggctccctcctctggcaggcttcccccttgatcgacttcttggttttctctctggatggaacgggcatgggcctctctgggggaggcagggctggaatgggagacctgttggcctgtgggcctcacctgcccctctgttctctcccctcacatcctcctgcccagctcctcacatacccacacattccagggctggggtgagcctgactgccaggaccccaggtcaggggctccctacattccccagagtgggatccacttcttggttcctgggatggcgatggggactctgccgctgtgtagggaccagtgggatgggctctacctctctttctcaaagagggggctctgcccacctggggtctctctccctacctccctcctcaggggcaacaacaggagaatggggttcctgctgtggggcgaattcatcccctccccgcgcgttccttcgcacactgtgattttgccctcctgcccacgcagacctgcagcgggcaaagagctcccgaggaagcacagcttgggtcaggttcttgcctttcttaattttagggacagctaccggaaggaggggaacaaggagttctcttccgcagcccctttccccacgcccacccccagtctccagggacccttgcctgcctcctaggctggaagccatggtcccgaagtgtagggcaagggtgcctcaggaccttttggtcttcagcctccctcagcccccaggatctgggttaggtggccgctcctccctgctcctcatgggaagatgtctcagagccttccatgacctcccctccccagcccaatgccaagtggacttggagctgcacaaagtcagcagggaccactaaatctccaagacctggtgtgcggaggcaggagcatgtatgtctgcaggtgtctgacacgcaagtgtgtgagtgtgagtgtgagagatggggcgggggtgtgtctgtaggtgtctctgggcctgtgtgtgggtggggttatgtgagggtatgaagagctgtcttcccctgagagtttcctcagaacccacagtgagaggggagggctcctggggcagagaagttccttaggttttctttggaatgaaattcctccttccccccatctctgagtggaggaagcccaccaattagggtctgcagcctgctggggctaagcggtggaggaaggctctgtcactccaggcatatgtttccccatctctgtctggggctacagaatagggtggcagaagtgtcaccctgtgggtgtctccctcgggggctcttcccctagacctccccctcacttacataaagctcccttgaagcaagaaagagggtcccagggctgcaaaactggaagcacagcctcggggatggggagggaaagacggtgctatatccagttcctgctctctgctcatgggtggctgtgacaaccctggcctcacttgattcatctctggttttcttgccaccctctgggagtccccatcccattttcatcctgagcccaaccaggccctgccattggcctcttgtcccttggcacacttgtacccacaggtgaggggcaggacctgaaggtattggcctgttcaacaatcagtcatcatgggtgtttttgtcaactgcttgttaattgatttggggatgtttgccccgaatgagaggttgaggaaaagactgtgggtggggaggccctgcctgacccatcccttttcctttctggccccagcctaggtggaggcaagtggaatatcttatattgggcgatttgggggctcggggaggcagagaatctcttgggagtcttgggtggcgctggtgcattctgtttcctcttgatctcaaagcacaatgtggatttggggaccaaaggtcagggacacatccccttagaggacctgagtttgggagagtggtgagtggaagggaggagcagcaagaagcagcctgttttcactcagcttaattctccttcccagataaggcaagccagtcatggaatcttgctgcaggccctccctctactcttcctgtcctaaaaataggggccgttttcttacacacccccagagagaggagggactgtcacactggtgctgagtgaccgggggctgctgggcgtctgttctttaccaaaaccatccatccctagaagagcacagagccctgaggggctgggctgggctgggctgagcccctggtcttctctacagttcacagaggtctttcagctcatttaatcccaggaaagaggcatcaaagctagaatgtgaatataacttttgtggaccaatactaagaataacaagaagcccagtggtgaggaaagtgcgttctcccagcactgcctcctgttttctccctctcatgtccctccagggaaaatgactttattgcttaatttctgcctttcccccctcacacatgcacttttgggcctttttttatagctggaaaaaacaaaataccaccctacaaacctgtatttaaaaagaaacagaaatgaccacgtgaaatttgcctctgtccaaacatttcatccgtgtgtatgtgtatgtgtgtgagtgtgtgaagccgccagttcatctttttatatggggttgttgtctcattttggtctgttttggtcccctccctcgtgggcttgtgctcgggatcaaacctttctggcctgttatgattctgaacatttgacttgaaccacaagtgaatctttctcctggtgactcaaataaaagtataatttttacctgcg

SEQ ID NO: 339218 - DNA, 2385 bp, Homo sapiens
gcaaagagctcccgaggaagcacagcttgggtcaggttcttgcccgctgcaggtctgcagcgggcaaagagctcccgaggaagcacagcttgggtcaggttcttgcctttcttaattttagggacagctaccggaaggaggggaacaaggagttctcttccgcagcccctttccccacgcccacccccagtctccagggacccttgcctgcctcctaggctggaagccatggtcccgaagtgtagggcaagggtgcctcaggaccttttggtcttcagcctccctcagcccccaggatctgggttaggtggccgctcctccctgctcctcatgggaagatgtctcagagccttccatgacctcccctccccagcccaatgccaagtggacttggagctgcacaaagtcagcagggaccactaaatctccaagacctggtgtgcggaggcaggagcatgtatgtctgcaggtgtctgacacgcaagtgtgtgagtgtgagtgtgagagatggggcgggggtgtgtctgtaggtgtctctgggcctgtgtgtgggtggggttatgtgagggtatgaagagctgtcttcccctgagagtttcctcagaacccacagtgagaggggagggctcctggggcagagaagttccttaggttttctttggaatgaaattcctccttccccccatctctgagtggaggaagcccaccaatctgccctttgcagtgtgcagggtggaaggtaagaggttggtgtggagttggggctgccatagggtctgcagcctgctggggctaagcggtggaggaaggctctgtcactccaggcatatgtttccccatctctgtctggggctacagaatagggtggcagaagtgtcaccctgtgggtgtctccctcgggggctcttcccctagacctccccctcacttacataaagctcccttgaagcaagaaagagggtcccagggctgcaaaactggaagcacagcctcggggatggggagggaaagacggtgctatatccagttcctgctctctgctcatgggtggctgtgacaaccctggcctcacttgattcatctctggttttcttgccaccctctgggagtccccatcccattttcatcctgagcccaaccaggccctgccattggcctcttgtcccttggcacacttgtacccacaggtgaggggcaggacctgaaggtattggcctgttcaacaatcagtcatcatgggtgtttttgtcaactgcttgttaattgatttggggatgtttgccccgaatgagaggttgaggaaaagactgtgggtggggaggccctgcctgacccatcccttttcctttctggccccagcctaggtggaggcaagtggaatatcttatattgggcgatttgggggctcggggaggcagagaatctcttgggagtcttgggtggcgctggtgcattctgtttcctcttgatctcaaagcacaatgtggatttggggaccaaaggtcagggacacatccccttagaggacctgagtttgggagagtggtgagtggaagggaggagcagcaagaagcagcctgttttcactcagcttaattctccttcccagataaggcaagccagtcatggaatcttgctgcaggccctccctctactcttcctgtcctaaaaataggggccgttttcttacacacccccagagagaggagggactgtcacactggtgctgagtgaccgggggctgctgggcgtctgttctttaccaaaaccatccatccctagaagagcacagagccctgaggggctgggctgggctgggctgagcccctggtcttctctacagttcacagaggtctttcagctcatttaatcccaggaaagaggcatcaaagctagaatgtgaatataacttttgtggaccaatactaagaataacaagaagcccagtggtgaggaaagtgcgttctcccagcactgcctcctgttttctccctctcatgtccctccagggaaaatgactttattgcttaatttctgcctttcccccctcacacatgcacttttgggcctttttttatagctggaaaaaacaaaataccaccctacaaacctgtatttaaaaagaaacagaaatgaccacgtgaaatttgcctctgtccaaacatttcatccgtgtgtatgtgtatgtgtgtgagtgtgtgaagccgccagttcatctttttatatggggttgttgtctcattttggtctgttttggtcccctccctcgtgggcttgtgctcgggatcaaacctttctggcctgttatgattctgaacatttgacttgaaccacaagtgaatctttctcctggtgactcaaataaaagtataatttttacctgcg

SEQ ID NO: 339219 - DNA, 1887 bp, Homo sapiens
aattaggctaggtacgaggctggtgttgaatcggcaccgaggccagctccagccgccgtcgctgctgcctgtgtagttgcagccgcggccgcctcccgccagctcgcctcggggaacaggacgcgcgtgagctcaggcgtccccgccccagcttttctcggaaccatgaaccccaactgcgcccggtgcggcaagatcgtgtatcccacggagaaggtgaactgtctggataagttctggcataaagcatgcttccattgcgagacctgcaatagggtctgcagcctgctggggctaagcggtggaggaaggctctgtcactccaggcatatgtttccccatctctgtctggggctacagaatagggtggcagaagtgtcaccctgtgggtgtctccctcgggggctcttcccctagacctccccctcacttacataaagctcccttgaagcaagaaagagggtcccagggctgcaaaactggaagcacagcctcggggatggggagggaaagacggtgctatatccagttcctgctctctgctcatgggtggctgtgacaaccctggcctcacttgattcatctctggttttcttgccaccctctgggagtccccatcccattttcatcctgagcccaaccaggccctgccattggcctcttgtcccttggcacacttgtacccacaggtgaggggcaggacctgaaggtattggcctgttcaacaatcagtcatcatgggtgtttttgtcaactgcttgttaattgatttggggatgtttgccccgaatgagaggttgaggaaaagactgtgggtggggaggccctgcctgacccatcccttttcctttctggccccagcctaggtggaggcaagtggaatatcttatattgggcgatttgggggctcggggaggcagagaatctcttgggagtcttgggtggcgctggtgcattctgtttcctcttgatctcaaagcacaatgtggatttggggaccaaaggtcagggacacatccccttagaggacctgagtttgggagagtggtgagtggaagggaggagcagcaagaagcagcctgttttcactcagcttaattctccttcccagataaggcaagccagtcatggaatcttgctgcaggccctccctctactcttcctgtcctaaaaataggggccgttttcttacacacccccagagagaggagggactgtcacactggtgctgagtgaccgggggctgctgggcgtctgttctttaccaaaaccatccatccctagaagagcacagagccctgaggggctgggctgggctgggctgagcccctggtcttctctacagttcacagaggtctttcagctcatttaatcccaggaaagaggcatcaaagctagaatgtgaatataacttttgtggaccaatactaagaataacaagaagcccagtggtgaggaaagtgcgttctcccagcactgcctcctgttttctccctctcatgtccctccagggaaaatgactttattgcttaatttctgcctttcccccctcacacatgcacttttgggcctttttttatagctggaaaaaacaaaataccaccctacaaacctgtatttaaaaagaaacagaaatgaccacgtgaaatttgcctctgtccaaacatttcatccgtgtgtatgtgtatgtgtgtgagtgtgtgaagccgccagttcatctttttatatggggttgttgtctcattttggtctgttttggtcccctccctcgtgggcttgtgctcgggatcaaacctttctggcctgttatgattctgaacatttgacttgaaccacaagtgaatctttctcctggtgactcaaataaaagtataatttttacctgcg

SEQ ID NO: 339220 - DNA, 4132 bp, Homo sapiens
aattaggctaggtacgaggctggtgttgaatcggcaccgaggccagctccagccgccgtcgctgctgcctgtgtagttgcagccgcggccgcctcccgccagctcgcctcggggaacaggacgcgcgtgagctcaggcgtccccgccccagcttttctcggaaccatgaaccccaactgcgcccggtgcggcaagatcgtgtatcccacggagaaggtgaactgtctggataagttctggcataaagcatgcttccattgcgagacctgcaagatgacactgaacatgaagaactacaagggctacgagaagaagccctactgcaacgcacactaccccaagcagtccttcaccatggtggcggacaccccggaaaaccttcgcctcaagcaacagagtgagctccagagtcaggtgcgctacaaggaggagtttgagaagaacaagggcaaaggtttcagcgtagtggcagacacgcccgagctccagagaatcaagaagacccaggaccagatcagtaacataaaataccatgaggagtttgagaagagccgcatgggccctagcgggggcgagggcatggagccagagcgtcgggattcgcaggacggcagcagctaccggcggcccctggagcagcagcagcctcaccacatcccgaccagtgccccggtttaccagcagccccagcagcagccggtggcccagtcctatggtggctacaaggagcctgcagccccagtctccatacagcgcagcgccccaggtggtggcgggaagcggtaccgcgcggtgtatgactacagcgccgccgacgaggacgaggtctccttccaggacggggacaccatcgtcaacgtgcagcagatcgacgacggctggatgtacgggacggtggagcgcaccggcgacacggggatgctgccggccaactacgtggaggccatctgaacccgcagcgcccccatctgtcttcagcacattccacggcatcgcatccgtcctgggcgtgacccgtccattcttcagtgtctctgttttttaaaacctgcgacagcttgtgattcctacccctcttccagcttcttttgccaactgaagccttcttctgccacttctgcgggctccctcctctggcaggcttcccccttgatcgacttcttggttttctctctggatggaacgggcatgggcctctctgggggaggcagggctggaatgggagacctgttggcctgtgggcctcacctgcccctctgttctctcccctcacatcctcctgcccagctcctcacatacccacacattccagggctggggtgagcctgactgccaggaccccaggtcaggggctccctacattccccagagtgggatccacttcttggttcctgggatggcgatggggactctgccgctgtgtagggaccagtgggatgggctctacctctctttctcaaagagggggctctgcccacctggggtctctctccctacctccctcctcaggggcaacaacaggagaatggggttcctgctgtggggcgaattcatcccctccccgcgcgttccttcgcacactgtgattttgccctcctgcccacgcagacctgcagcgggcaaagagctcccgaggaagcacagcttgggtcaggttcttgcctttcttaattttagggacagctaccggaaggaggggaacaaggagttctcttccgcagcccctttccccacgcccacccccagtctccagggacccttgcctgcctcctaggctggaagccatggtcccgaagtgtagggcaagggtgcctcaggaccttttggtcttcagcctccctcagcccccaggatctgggttaggtggccgctcctccctgctcctcatgggaagatgtctcagagccttccatgacctcccctccccagcccaatgccaagtggacttggagctgcacaaagtcagcagggaccactaaatctccaagacctggtgtgcggaggcaggagcatgtatgtctgcaggtgtctgacacgcaagtgtgtgagtgtgagtgtgagagatggggcgggggtgtgtctgtaggtgtctctgggcctgtgtgtgggtggggttatgtgagggtatgaagagctgtcttcccctgagagtttcctcagaacccacagtgagaggggagggctcctggggcagagaagttccttaggttttctttggaatgaaattcctccttccccccatctctgagtggaggaagcccaccaatctgccctttgcagtgtgcagggtggaaggtaagaggttggtgtggagttggggctgccatagggtctgcagcctgctggggctaagcggtggaggaaggctctgtcactccaggcatatgtttccccatctctgtctggggctacagaatagggtggcagaagtgtcaccctgtgggtgtctccctcgggggctcttcccctagacctccccctcacttacataaagctcccttgaagcaagaaagagggtcccagggctgcaaaactggaagcacagcctcggggatggggagggaaagacggtgctatatccagttcctgctctctgctcatgggtggctgtgacaaccctggcctcacttgattcatctctggttttcttgccaccctctgggagtccccatcccattttcatcctgagcccaaccaggccctgccattggcctcttgtcccttggcacacttgtacccacaggtgaggggcaggacctgaaggtattggcctgttcaacaatcagtcatcatgggtgtttttgtcaactgcttgttaattgatttggggatgtttgccccgaatgagaggttgaggaaaagactgtgggtggggaggccctgcctgacccatcccttttcctttctggccccagcctaggtggaggcaagtggaatatcttatattgggcgatttgggggctcggggaggcagagaatctcttgggagtcttgggtggcgctggtgcattctgtttcctcttgatctcaaagcacaatgtggatttggggaccaaaggtcagggacacatccccttagaggacctgagtttgggagagtggtgagtggaagggaggagcagcaagaagcagcctgttttcactcagcttaattctccttcccagataaggcaagccagtcatggaatcttgctgcaggccctccctctactcttcctgtcctaaaaataggggccgttttcttacacacccccagagagaggagggactgtcacactggtgctgagtgaccgggggctgctgggcgtctgttctttaccaaaaccatccatccctagaagagcacagagccctgaggggctgggctgggctgggctgagcccctggtcttctctacagttcacagaggtctttcagctcatttaatcccaggaaagaggcatcaaagctagaatgtgaatataacttttgtggaccaatactaagaataacaagaagcccagtggtgaggaaagtgcgttctcccagcactgcctcctgttttctccctctcatgtccctccagggaaaatgactttattgcttaatttctgcctttcccccctcacacatgcacttttgggcctttttttatagctggaaaaaacaaaataccaccctacaaacctgtatttaaaaagaaacagaaatgaccacgtgaaatttgcctctgtccaaacatttcatccgtgtgtatgtgtatgtgtgtgagtgtgtgaagccgccagttcatctttttatatggggttgttgtctcattttggtctgttttggtcccctccctcgtgggcttgtgctcgggatcaaacctttctggcctgttatgattctgaacatttgacttgaaccacaagtgaatctttctcctggtgactcaaataaaagtataatttttacctgcgaaccaacacaaccaaaccaaaaaaaagccgccacccataaacaacccccaaaggaccaaaataaaagcaaccaagatccttggtcacaagggaccccaataagaacccgacaacaaaaaaaacacaagcccgcaataaacaccctaaaaccgccacaccgcacccagaaacaacaaaaaaccacaacaagg

SEQ ID NO: 339221 - DNA, 4339 bp, Homo sapiens
  misc_feature (3962)..(3962): n is a, c, g, or t
  misc_feature (3968)..(3968): n is a, c, g, or t
  misc_feature (3970)..(3970): n is a, c, g, or t
  misc_feature (4024)..(4024): n is a, c, g, or t
  misc_feature (4029)..(4029): n is a, c, g, or t
aattaggctaggtacgaggctggtgttgaatcggcaccgaggccagctccagccgccgtcgctgctgcctgtgtagttgcagccgcggccgcctcccgccagctcgcctcggggaacaggacgcgcgtgagctcaggcgtccccgccccagcttttctcggaaccatgaaccccaactgcgcccggtgcggcaagatcgtgtatcccacggagaaggtgaactgtctggataagttctggcataaagcatgcttccattgcgagacctgcaagatgacactgaacatgaagaactacaagggctacgagaagaagccctactgcaacgcacactaccccaagcagtccttcaccatggtggcggacaccccggaaaaccttcgcctcaagcaacagagtgagctccagagtcaggtgcgctacaaggaggagtttgagaagaacaagggcaaaggtttcagcgtagtggcagacacgcccgagctccagagaatcaagaagacccaggaccagatcagtaacataaaataccatgaggagtttgagaagagccgcatgggccctagcgggggcgagggcatggagccagagcgtcgggattcgcaggacggcagcagctaccggcggcccctggagcagcagcagcctcaccacatcccgaccagtgccccggtttaccagcagccccagcagcagccggtggcccagtcctatggtggctacaaggagcctgcagccccagtctccatacagcgcagcgccccaggtggtggcgggaagcggtaccgcgcggtgtatgactacagcgccgccgacgaggacgaggtctccttccaggacggggacaccatcgtcaacgtgcagcagatcgacgacggctggatgtacgggacggtggagcgcaccggcgacacggggatgctgccggccaactacgtggaggccatctgaacccgcagcgcccccatctgtcttcagcacattccacggcatcgcatccgtcctgggcgtgacccgtccattcttcagtgtctctgttttttaaaacctgcgacagcttgtgattcctacccctcttccagcttcttttgccaactgaagccttcttctgccacttctgcgggctccctcctctggcaggcttcccccttgatcgacttcttggttttctctctggatggaacgggcatgggcctctctgggggaggcagggctggaatgggagacctgttggcctgtgggcctcacctgcccctctgttctctcccctcacatcctcctgcccagctcctcacatacccacacattccagggctggggtgagcctgactgccaggaccccaggtcaggggctccctacattccccagagtgggatccacttcttggttcctgggatggcgatggggactctgccgctgtgtagggaccagtgggatgggctctacctctctttctcaaagagggggctctgcccacctggggtctctctccctacctccctcctcaggggcaacaacaggagaatggggttcctgctgtggggcgaattcatcccctccccgcgcgttccttcgcacactgtgattttgccctcctgcccacgcagacctgcagcgggcaaagagctcccgaggaagcacagcttgggtcaggttcttgcctttcttaattttagggacagctaccggaaggaggggaacaaggagttctcttccgcagcccctttccccacgcccacccccagtctccagggacccttgcctgcctcctaggctggaagccatggtcccgaagtgtagggcaagggtgcctcaggaccttttggtcttcagcctccctcagcccccaggatctgggttaggtggccgctcctccctgctcctcatgggaagatgtctcagagccttccatgacctcccctccccagcccaatgccaagtggacttggagctgcacaaagtcagcagggaccactaaatctccaagacctggtgtgcggaggcaggagcatgtatgtctgcaggtgtctgacacgcaagtgtgtgagtgtgagtgtgagagatggggcgggggtgtgtctgtaggtgtctctgggcctgtgtgtgggtggggttatgtgagggtatgaagagctgtcttcccctgagagtttcctcagaacccacagtgagaggggagggctcctggggcagagaagttccttaggttttctttggaatgaaattcctccttccccccatctctgagtggaggaagcccaccaatctgccctttgcagtgtgcagggtggaaggtaagaggttggtgtggagttggggctgccatagggtctgcagcctgctggggctaagcggtggaggaaggctctgtcactccaggcatatgtttccccatctctgtctggggctacagaatagggtggcagaagtgtcaccctgtgggtgtctccctcgggggctcttcccctagacctccccctcacttacataaagctcccttgaagcaagaaagagggtcccagggctgcaaaactggaagcacagcctcggggatggggagggaaagacggtgctatatccagttcctgctctctgctcatgggtggctgtgacaaccctggcctcacttgattcatctctggttttcttgccaccctctgggagtccccatcccattttcatcctgagcccaaccaggccctgccattggcctcttgtcccttggcacacttgtacccacaggtgaggggcaggacctgaaggtattggcctgttcaacaatcagtcatcatgggtgtttttgtcaactgcttgttaattgatttggggatgtttgccccgaatgagaggttgaggaaaagactgtgggtggggaggccctgcctgacccatcccttttcctttctggccccagcctaggtggaggcaagtggaatatcttatattgggcgatttgggggctcggggaggcagagaatctcttgggagtcttgggtggcgctggtgcattctgtttcctcttgatctcaaagcacaatgtggatttggggaccaaaggtcagggacacatccccttagaggacctgagtttgggagagtggtgagtggaagggaggagcagcaagaagcagcctgttttcactcagcttaattctccttcccagataaggcaagccagtcatggaatcttgctgcaggccctccctctactcttcctgtcctaaaaataggggccgttttcttacacacccccagagagaggagggactgtcacactggtgctgagtgaccgggggctgctgggcgtctgttctttaccaaaaccatccatccctagaagagcacagagccctgaggggctgggctgggctgggctgagcccctggtcttctctacagttcacagaggtctttcagctcatttaatcccaggaaagaggcatcaaagctagaatgtgaatataacttttgtggaccaatactaagaataacaagaagcccagtggtgaggaaagtgcgttctcccagcactgcctcctgttttctccctctcatgtccctccagggaaaatgactttattgcttaatttctgcctttcccccctcacacatgcacttttgggcctttttttatagctggaaaaaacaaaataccaccctacaaacctgtatttaaaaagaaacagaaatgaccacgtgaaatttgcctctgtccaaacatttcatccgtgtgtatgtgtatgtgtgtgagtgtgtgaagccgccagttcatctttttatatggggttgttgtctcattttggtctgttttggtcccctccctcgtgggcttgtgctcgggatcaaacctttctggcctgttatgattctgaacatttgacttgaaccacaagtgaatctttctcctggtgactcaaataaaagtataatttttacctgcgaaaaaaaaaaaaaaaaaaaanaaaaananaaaaaaaaaaacacaacaaaccaaaacacaaccaaaaaaaaaagaaacacacgnaaacnacacacacacaaaacgcgggcgagctgcccaacaacagaccccaccggacgagtggacccagacctgatgcccgacccaactacgtcgcaccagagggtgcccaatagatgcgagcgcaatacaacgcgagccgctcgagctacataaccgcggtgcgaggacaaaccgcacccgcggacctcagccgccaaccaacccgttggcggcgcaacatgcaccaacacaccgcacgattagcgacaggactcatcacaacggagatagaggaaccagacacaatacgtgcgcaacgaccagacgataacaatc

SEQ ID NO: 339222 - DNA, 1314 bp, Homo sapiens
aaccccatccatcaaacaaacaatacgctagtacagccggtgtaaatcggcagaggctgagccaaaaccaggccctgccattggcctcttgtcccttggcacacttgtacccacaggtgaggggcaggacctgaaggtattggcctgttcaacaatcagtcatcatgggtgtttttgtcaactgcttgttaattgatttggggatgtttgccccgaatgagaggttgaggaaaagactgtgggtggggaggccctgcctgacccatcccttttcctttctggccccagcctaggtggaggcaagtggaatatcttatattgggcgatttgggggctcggggaggcagagaatctcttgggagtcttgggtggcgctggtgcattctgtttcctcttgatctcaaagcacaatgtggatttggggaccaaaggtcagggacacatccccttagaggacctgagtttgggagagtggtgagtggaagggaggagcagcaagaagcagcctgttttcactcagcttaattctccttcccagataaggcaagccagtcatggaatcttgctgcaggccctccctctactcttcctgtcctaaaaataggggccgttttcttacacacccccagagagaggagggactgtcacactggtgctgagtgaccgggggctgctgggcgtctgttctttaccaaaaccatccatccctagaagagcacagagccctgaggggctgggctgggctgggctgagcccctggtcttctctacagttcacagaggtctttcagctcatttaatcccaggaaagaggcatcaaagctagaatgtgaatataacttttgtggaccaatactaagaataacaagaagcccagtggtgaggaaagtgcgttctcccagcactgcctcctgttttctccctctcatgtccctccagggaaaatgactttattgcttaatttctgcctttcccccctcacacatgcacttttgggcctttttttatagctggaaaaaacaaaataccaccctacaaacctgtatttaaaaagaaacagaaatgaccacgtgaaatttgcctctgtccaaacatttcatccgtgtgtatgtgtatgtgtgtgagtgtgtgaagccgccagttcatctttttatatggggttgttgtctcattttggtctgttttggtcccctccctcgtgggcttgtgctcgggatcaaacctttctggcctgttatgattctgaacatttgacttgaaccacaagtgaatctttctcctggtgactcaaataaaagtataatttttacctgcg

SEQ ID NO: 339223 - DNA, 3827 bp, Homo sapiens
aattaggctaggtacgaggctggtgttgaatcggcaccgaggccagctccagccgccgtcgctgctgcctgtgtagttgcagccgcggccgcctcccgccagctcgcctcggggaacaggacgcgcgtgagctcaggcgtccccgccccagcttttctcggaaccatgaaccccaactgcgcccggtgcggcaagatcgtgtatcccacggagaaggtgaactgtctggataagttctggcataaagcatgcttccattgcgagacctgcaagatgacactgaacatgaagaactacaagggctacgagaagaagccctactgcaacgcacactaccccaagcagtccttcaccatggtggcggacaccccggaaaaccttcgcctcaagcaacagagtgagctccagagtcaggtgcgctacaaggaggagtttgagaagaacaagggcaaaggtttcagcgtagtggcagacacgcccgagctccagagaatcaagaagacccaggaccagatcagtaacataaaataccatgaggagtttgagaagagccgcatgggccctagcgggggcgagggcatggagccagagcgtcgggattcgcaggacggcagcagctaccggcggcccctggagcagcagcagcctcaccacatcccgaccagtgccccggtttaccagcagccccagcagcagccggtggcccagtcctatggtggctacaaggagcctgcagccccagtctccatacagcgcagcgccccaggtggtggcgggaagcggtaccgcgcggtgtatgactacagcgccgccgacgaggacgaggtctccttccaggacggggacaccatcgtcaacgtgcagcagatcgacgacggctggatgtacgggacggtggagcgcaccggcgacacggggatgctgccggccaactacgtggaggccatctgaacccgcagcgcccccatctgtcttcagcacattccacggcatcgcatccgtcctgggcgtgacccgtccattcttcagtgtctctgttttttaaaacctgcgacagcttgtgattcctacccctcttccagcttcttttgccaactgaagccttcttctgccacttctgcgggctccctcctctggcaggcttcccccttgatcgacttcttggttttctctctggatggaacgggcatgggcctctctgggggaggcagggctggaatgggagacctgttggcctgtgggcctcacctgcccctctgttctctcccctcacatcctcctgcccagctcctcacatacccacacattccagggctggggtgagcctgactgccaggaccccaggtcaggggctccctacattccccagagtgggatccacttcttggttcctgggatggcgatggggactctgccgctgtgtagggaccagtgggatgggctctacctctctttctcaaagagggggctctgcccacctggggtctctctccctacctccctcctcaggggcaacaacaggagaatggggttcctgctgtggggcgaattcatcccctccccgcgcgttccttcgcacactgtgattttgccctcctgcccacgcagacctgcagcgggcaaagagctcccgaggaagcacagcttgggtcaggttcttgcctttcttaattttagggacagctaccggaaggaggggaacaaggagttctcttccgcagcccctttccccacgcccacccccagtctccagggacccttgcctgcctcctaggctggaagccatggtcccgaagtgtagggcaagggtgcctcaggaccttttggtcttcagcctccctcagcccccaggatctgggttaggtggccgctcctccctgctcctcatgggaagatgtctcagagccttccatgacctcccctccccagcccaatgccaagtggacttggagctgcacaaagtcagcagggaccactaaatctccaagacctggtgtgcggaggcaggagcatgtatgtctgcaggtgtctgacacgcaagtgtgtgagtgtgagtgtgagagatggggcgggggtgtgtctgtaggtgtctctgggcctgtgtgtgggtggggttatgtgagggtatgaagagctgtcttcccctgagagtttcctcagaacccacagtgagaggggagggctcctggggcagagaagttccttaggttttctttggaatgaaattcctccttccccccatctctgagtggaggaagcccaccaatctgccctttgcagtgtgcagggtggaaggtaagaggttggtgtggagttggggctgccatagggtctgcagcctgctggggctaagcggtggaggaaggctctgtcactccaggcatatgtttccccatctctgtctggggctacagaatagggtggcagaagtgtcaccctgtgggtgtctccctcgggggctcttcccctagacctccccctcacttacataaagctcccttgaagcaagaaagagggtcccagggctgcaaaactggaagcacagcctcggggatggggagggaaagacggtgctatatccagttcctgctctctgctcatgggtggctgtgacaaccctggcctcacttgattcatctctggttttcttgccaccctctgggagtccccatcccattttcatcctgagcccaaccaggccctgccattggcctcttgtcccttggcacacttgtacccacaggtgaggggcaggacctgaaggtattggcctgttcaacaatcagtcatcatgggtgtttttgtcaactgcttgttaattgatttggggatgtttgccccgaatgagaggttgaggaaaagactgtgggtggggaggccctgcctgacccatcccttttcctttctggccccagcctaggtggaggcaagtggaatatcttatattgggcgatttgggggctcggggaggcagagaatctcttgggagtcttgggtggcgctggtgcattctgtttcctcttgatctcaaagcacaatgtggatttggggaccaaaggtcagggacacatccccttagaggacctgagtttgggagagtggtgagtggaagggaggagcagcaagaagcagcctgttttcactcagcttaattctccttcccagataaggcaagccagtcatggaatcttgctgcaggccctccctctactcttcctgtcctaaaaataggggccgttttcttacacacccccagagagaggagggactgtcacactggtgctgagtgaccgggggctgctgggcgtctgttctttaccaaaaccatccatccctagaagagcacagagccctgaggggctgggctgggctgggctgagcccctggtcttctctacagttcacagaggtctttcagctcatttaatcccaggaaagaggcatcaaagctagaatgtgaatataacttttgtggaccaatactaagaataacaagaagcccagtggtgaggaaagtgcgttctcccagcactgcctcctgttttctccctctcatgtccctccagggaaaatgactttattgcttaatttctgcctttccccctcaaatgcattgggcttttataggtggaaaaaaatacacctaaagtgttttaaagaacgaatgccggtgaattgccggcaccattcggggttgttggtggtggggagcgcaccataggggggcatggggtggcccccgggggtgggacactggcggtgaattacacgtattcggggatttcgggcaaaacaaaagggggtgggtctgatagttttttccacggt

SEQ ID NO: 339224 - DNA, 2718 bp, Homo sapiens
aattaggctaggtacgaggctggtgttgaatcggcaccgaggccagctccagccgccgtcgctgctgcctgtgtagttgcagccgcggccgcctcccgccagctcgcctcggggaacaggacgcgcgtgagctcaggcgtccccgccccagcttttctcggaaccatgaaccccaactgcgcccggtgcggcaagatcgtgtatcccacggagaaggtgaactgtctggataagttctggcataaagcatgcttccattgcgagacctgcaagatgacactgaacatgaagaactacaagggctacgagaagaagccctactgcaacgcacactaccccaagcagtccttcaccatggtggcggacaccccggaaaaccttcgcctcaagcaacagagtgagctccagagtcaggtgcgctacaaggaggagtttgagaagaacaagggcaaaggtttcagcgtagtggcagacacgcccgagctccagagaatcaagaagacccaggaccagatcagtaacataaaataccatgaggagtttgagaagagccgcatgggccctagcgggggcgagggcatggagccagagcgtcgggattcgcaggacggcagcagctaccggcggcccctggagcagcagcagcctcaccacatcccgaccagtgccccggtttaccagcagccccagcagcagccggtggcccagtcctatggtggctacaaggagcctgcagccccagtctccatacagcgcagcgccccaggtggtggcgggaagcggtaccgcgcggtgtatgactacagcgccgccgacgaggacgaggtctccttccaggacggggacaccatcgtcaacgtgcagcagatcgacgacggctggatgtacgggacggtggagcgcaccggcgacacggggatgctgccggccaactacgtggaggccatctgaacccgcagcgcccccatctgtcttcagcacattccacggcatcgcatccgtcctgggcgtgacccgtccattcttcagtgtctctgttttttaaaacctgcgacagcttgtgattcctacccctcttccagcttcttttgccaactgaagccttcttctgccacttctgcgggctccctcctctggcaggcttcccccttgatcgacttcttggttttctctctggatggaacgggcatgggcctctctgggggaggcagggctggaatgggagacctgttggcctgtgggcctcacctgcccctctgttctctcccctcacatcctcctgcccagctcctcacatacccacacattccagggctggggtgagcctgactgccaggaccccaggtcaggggctccctacattccccagagtgggatccacttcttggttcctgggatggcgatggggactctgccgctgtgtagggaccagtgggatgggctctacctctctttctcaaagagggggctctgcccacctggggtctctctccctacctccctcctcaggggcaacaacaggagaatggggttcctgctgtggggcgaattcatcccctccccgcgcgttccttcgcacactgtgattttgccctcctgcccacgcagacctgcagcgggcaaagagctcccgaggaagcacagcttgggtcaggttcttgcctttcttaattttagggacagctaccggaaggaggggaacaaggagttctcttccgcagcccctttccccacgcccacccccagtctccagggacccttgcctgcctcctaggctggaagccatggtcccgaagtgtagggcaagggtgcctcaggaccttttggtcttcagcctccctcagcccccaggatctgggttaggtggccgctcctccctgctcctcatgggaagatgtctcagagccttccatgacctcccctccccagcccaatgccaagtggacttggagctgcacaaagtcagcagggaccactaaatctccaagacctggtgtgcggaggcaggagcatgtatgtctgcaggtgtctgacacgcaagtgtgtgagtgtgagtgtgagagatggggcgggggtgtgtctgtaggtgtctctgggcctgtgtgtgggtggggttatgtgagggtatgaagagctgtcttcccctgagagtttcctcagaacccacactctacagttcacagaggtctttcagctcatttaatcccaggaaagaggcatcaaagctagaatgtgaatataacttttgtggaccaatactaagaataacaagaagcccagtggtgaggaaagtgcgttctcccagcactgcctcctgttttctccctctcatgtccctccagggaaaatgactttattgcttaatttctgcctttcccccctcacacatgcacttttgggcctttttttatagctggaaaaaacaaaataccaccctacaaacctgtatttaaaaagaaacagaaatgaccacgtgaaatttgcctctgtccaaacatttcatccgtgtgtatgtgtatgtgtgtgagtgtgtgaagccgccagttcatctttttatatggggttgttgtctcattttggtctgttttggtcccctccctcgtgggcttgtgctcgggatcaaacctttctggcctgttatgattctgaacatttgacttgaaccacaagtgaatctttctcctggtgactcaaataaaagtataatttttacctgcg

SEQ ID NO: 339225 - DNA, 3541 bp, Homo sapiens
aattaggctaggtacgaggctggtgttgaatcggcaccgaggccagctccagccgccgtcgctgctgcctgtgtagttgcagccgcggccgcctcccgccagctcgcctcggggaacaggacgcgcgtgagctcaggcgtccccgccccagcttttctcggaaccatgaaccccaactgcgcccggtgcggcaagatcgtgtatcccacggagaaggtgaactgtctggataagttctggcataaagcatgcttccattgcgagacctgcaagatgacactgaacatgaagaactacaagggctacgagaagaagccctactgcaacgcacactaccccaagcagtccttcaccatggtggcggacaccccggaaaaccttcgcctcaagcaacagagtgagctccagagtcaggtgcgctacaaggaggagtttgagaagaacaagggcaaaggtttcagcgtagtggcagacacgcccgagctccagagaatcaagaagacccaggaccagatcagtaacataaaataccatgaggagtttgagaagagccgcatgggccctagcgggggcgagggcatggagccagagcgtcgggattcgcaggacggcagcagctaccggcggcccctggagcagcagcagcctcaccacatcccgaccagtgccccggtttaccagcagccccagcagcagccggtggcccagtcctatggtggctacaaggagcctgcagccccagtctccatacagcgcagcgccccaggtggtggcgggaagcggtaccgcgcggtgtatgactacagcgccgccgacgaggacgaggtctccttccaggacggggacaccatcgtcaacgtgcagcagatcgacgacggctggatgtacgggacggtggagcgcaccggcgacacggggatgctgccggccaactacgtggaggccatctgaacccgcagcgcccccatctgtcttcagcacattccacggcatcgcatccgtcctgggcgtgacccgtccattcttcagtgtctctgttttttaaaacctgcgacagcttgtgattcctacccctcttccagcttcttttgccaactgaagccttcttctgccacttctgcgggctccctcctctggcaggcttcccccttgatcgacttcttggttttctctctggatggaacgggcatgggcctctctgggggaggcagggctggaatgggagacctgttggcctgtgggcctcacctgcccctctgttctctcccctcacatcctcctgcccagctcctcacatacccacacattccagggctggggtgagcctgactgccaggaccccaggtcaggggctccctacattccccagagtgggatccacttcttggttcctgggatggcgatggggactctgccgctgtgtagggaccagtgggatgggctctacctctctttctcaaagagggggctctgcccacctggggtctctctccctacctccctcctcaggggcaacaacaggagaatggggttcctgctgtggggcgaattcatcccctccccgcgcgttccttcgcacactgtgattttgccctcctgcccacgcagacctgcagcgggcaaagagctcccgaggaagcacagcttgggtcaggttcttgcctttcttaattttagggacagctaccggaaggaggggaacaaggagttctcttccgcagcccctttccccacgcccacccccagtctccagggacccttgcctgcctcctaggctggaagccatggtcccgaagtgtagggcaagggtgcctcaggaccttttggtcttcagcctccctcagcccccaggatctgggttaggtggccgctcctccctgctcctcatgggaagatgtctcagagccttccatgacctcccctccccagcccaatgccaagtggacttggagctgcacaaagtcagcagggaccactaaatctccaagacctggtgtgcggaggcaggagcatgtatgtctgcaggtgtctgacacgcaagtgtgtgagtgtgagtgtgagagatggggcgggggtgtgtctgtaggtgtctctgggcctgtgtgtgggtggggttatgtgagggtatgaagagctgtcttcccctgagagtttcctcagaacccacagtgagaggggagggctcctggggcagagaagttccttaggttttctttggaatgaaattcctccttccccccatctctgagtggaggaagcccaccaatctgccctttgcagtgtgcagggtggaaggtaagaggttggtgtggagttggggctgccatagggtctgcagcctgctggggctaagcggtggaggaaggctctgtcactccaggcatatgtttccccatctctgtctggggctacagaatagggtggcagaagtgtcaccctgtgggtgtctccctcgggggctcttcccctagacctccccctcacttacataaagctcccttgaagcaagaaagagggtcccagggctgcaaaactggaagcacagcctcggggatggggagggaaagacggtgctatatccagttcctgctctctgctcatgggtggctgtgacaaccctggcctcacttgattcatctctggttttcttgccaccctctgggagtccccatcccattttcatcctgagcccaaccaggccctgccattggcctcttgtcccttggcacacttgtacccacaggtgaggggcaggacctgaaggtattggcctgttcaacaatcagtcatcatgggtgtttttgtcaactgcttgttaattgatttggggatgtttgccccgaatgagaggttgaggaaaagactgtgggtggggaggccctgcctgacccatcccttttcctttctggccccagcctaggtggaggcaagtggaatatcttatattgggcgatttgggggctcggggaggcagagaatctcttgggagtcttgggtggcgctggtgcattctgtttcctcttgatctcaaagcacaatgtggatttggggaccaaaggtcagggacacatccccttagaggacctgagtttgggagagtggtgagtggaagggaggagcagcaagaagcagcctgttttcactcagcttaattctccttcccagataaggcaagccagtcatggaatcttgctgcaggccctccctctactcttcctgtcctaaaaataggggccgttttcttacacacccccagagagaggagggactgtcacactggtgctgagtgaccgggggctgctgggcgtctgttctttaccaaaaccatccatccctagaagagcacagagccctgaggggctgggctgggctgggctgagcccctggtcttctctacagttcacagaggtctttcagctcatttaatcccaggaaagaggcatcaaagctttctggcctgttatgattctgaacatttgacttgaaccacaagtgaatctttctcctggtgactcaaataaaagtataatttttacctgcg

SEQ ID NO: 339226 - DNA, 1045 bp, Homo sapiens
cccccctcacacatgcacttttgggcctttttttatagctggaaaaaacaaaataccaccctacaaacctgtatttaaaaagaaacagaaatgaccacgtgaaatttgcctctgtccaaacatttcatcccgtgtgtatgtgtatgtgtgtgagtgtgtgaagccgccagttcatccccttagaggacctgagtttgggagagtggtgagtggaagggaggagcagcaagaagcagcctgttttcactcagcttaattctccttcccagataaggcaagccagtcatggaatcttgctgcaggccctccctctactcttcctgtcctaaaaataggggccgttttcttacacacccccagagagaggagggactgtcacactggtgctgagtgaccgggggctgctgggcgtctgttctttaccaaaaccatccatccctagaagagcacagagccctgaggggctgggctgggctgggctgagcccctggtcttctctacagttcacagaggtctttcagctcatttaatcccaggaaagaggcatcaaagctagaatgtgaatataacttttgtggaccaatactaagaataacaagaagcccagtggtgaggaaagtgcgttctcccagcactgcctcctgttttctccctctcatgtccctccagggaaaatgactttattgcttaatttctgcctttcccccctcacacatgcacttttgggcctttttttatagctggaaaaaacaaaataccaccctacaaacctgtatttaaaaagaaacagaaatgaccacgtgaaatttgcctctgtccaaacatttcatccgtgtgtatgtgtatgtgtgtgagtgtgtgaagccgccagttcatctttttatatggggttgttgtctcattttggtctgttttggtcccctccctcgtgggcttgtgctcgggatcaaacctttctggcctgttatgattctgaacatttgacttgaaccacaagtgaatctttctcctggtgactcaaataaaagtataatttttacctgcg

SEQ ID NO: 339227 - DNA, 3553 bp, Homo sapiens
aattaggctaggtacgaggctggtgttgaatcggcaccgaggccagctccagccgccgtcgctgctgcctgtgtagttgcagccgcggccgcctcccgccagctcgcctcggggaacaggacgcgcgtgagctcaggcgtccccgccccagcttttctcggaaccatgaaccccaactgcgcccggtgcggcaagatcgtgtatcccacggagaaggtgaactgtctggataagttctggcataaagcatgcttccattgcgagacctgcaagatgacactgaacatgaagaactacaagggctacgagaagaagccctactgcaacgcacactaccccaagcagtccttcaccatggtggcggacaccccggaaaaccttcgcctcaagcaacagagtgagctccagagtcaggtgcgctacaaggaggagtttgagaagaacaagggcaaaggtttcagcgtagtggcagacacgcccgagctccagagaatcaagaagacccaggaccagatcagtaacataaaataccatgaggagtttgagaagagccgcatgggccctagcgggggcgagggcatggagccagagcgtcgggattcgcaggacggcagcagctaccggcggcccctggagcagcagcagcctcaccacatcccgaccagtgccccggtttaccagcagccccagcagcagccggtggcccagtcctatggtggctacaaggagcctgcagccccagtctccatacagcgcagcgccccaggtggtggcgggaagcggtaccgcgcggtgtatgactacagcgccgccgacgaggacgaggtctccttccaggacggggacaccatcgtcaacgtgcagcagatcgacgacggctggatgtacgggacggtggagcgcaccggcgacacggggatgctgccggccaactacgtggaggccatctgaacccgcagcgcccccatctgtcttcagcacattccacggcatcgcatccgtcctgggcgtgacccgtccattcttcagtgtctctgttttttaaaacctgcgacagcttgtgattcctacccctcttccagcttcttttgccaactgaagccttcttctgccacttctgcgggctccctcctctggcaggcttcccccttgatcgacttcttggttttctctctggatggaacgggcatgggcctctctgggggaggcagggctggaatgggagacctgttggcctgtgggcctcacctgcccctctgttctctcccctcacatcctcctgcccagctcctcacatacccacacattccagggctggggtgagcctgactgccaggaccccaggtcaggggctccctacattccccagagtgggatccacttcttggttcctgggatggcgatggggactctgccgctgtgtagggaccagtgggatgggctctacctctctttctcaaagagggggctctgcccacctggggtctctctccctacctccctcctcaggggcaacaacaggagaatggggttcctgctgtggggcgaattcatcccctccccgcgcgttccttcgcacactgtgattttgccctcctgcccacgcagacctgcagcgggcaaagagctcccgaggaagcacagcttgggtcaggttcttgcctttcttaattttagggacagctaccggaaggaggggaacaaggagttctcttccgcagcccctttccccacgcccacccccagtctccagggacccttgcctgcctcctaggctggaagccatggtcccgaagtgtagggcaagggtgcctcaggaccttttggtcttcagcctccctcagcccccaggatctgggttaggtggccgctcctccctgctcctcatgggaagatgtctcagagccttccatgacctcccctccccagcccaatgccaagtggacttggagctgcacaaagtcagcagggaccactaaatctccaagacctggtgtgcggaggcaggagcatgtatgtctgcaggtgtctgacacgcaagtgtgtgagtgtgagtgtgagagatggggcgggggtgtgtctgtaggtgtctctgggcctgtgtgtgggtggggttatgtgagggtatgaagagctgtcttcccctgagagtttcctcagaacccacagtgagaggggagggctcctggggcagagaagttccttaggttttctttggaatgaaattcctccttccccccatctctgagtggaggaagcccaccaatctgccctttgcagtgtgcagggtggaaggtaagaggttggtgtggagttggggctgccatagggtctgcagcctgctggggctaagcggtggaggaaggctctgtcactccaggcatatgtttccccatctctgtctggggctacagaatagggtggcagaagtgtcaccctgtgggtgtctccctcgggggctcttcccctagacctccccctcacttacataaagctcccttgaagcaagaaagagggtcccagggctgcaaaactggaagcacagcctcggggatggggagggaaagacggtgctatatccagttcctgctctctgctcatgggtggctgtgacaaccctggcctcacttgattcatctctggttttcttgccaccctctgggagtccccatcccattttcatcctgagcccaaccaggccctgccattggcctcttgtcccttggcacacttgtacccacaggtgaggggcaggacctgaaggtattggcctgttcaacaatcagtcatcatgggtgtttttgtcaactgcttgttaattgatttggggatgtttgccccgaatgagaggttgaggaaaagactgtgggtggggaggccctgcctgacccatcccttttcctttctggccccagcctaggtggaggcaagtggaatatcttatattgggcgatttgggggctcggggaggcagagaatctcttgggagtcttgggtggcgctggtgcattctgtttcctcttgatctcaaagcacaatgtggatttggggaccaaaggtcagggacacatccccttagaggacctgagtttgggagagtggtgagtggaagggaggagcagcaagaagcagcctgttttcactcagcttaattctccttcccagataaggcaagccagtcatggaatcttgctgcaggccctccctctactcttcctgtcctaaaaataggggccgttttcttacacacccccagagagaggagggactgtcacactgctctacagttcacagaggtctttcagctcatttaatcccaggaaagaggcatcaaagctagaatgtgaatataacttttgtggaccaatactaagaataacaagaagcccagtggtgaggaaagtgcgttctcccagcactgcctcctgttttcctcgtgggcttgtgctcgggatcaaacctttctggcctgttatgattctgaacatttgacttgaaccacaagtgaatctttctcctggtgactcaaataaaagtataatttttacctgcg

SEQ ID NO: 339228 - DNA, 2649 bp, Homo sapiens
aattaggctaggtacgaggctggtgttgaatcggcaccgaggccagctccagccgccgtcgctgctgcctgtgtagttgcagccgcggccgcctcccgccagctcgcctcggggaacaggacgcgcgtgagctcaggcgtccccgccccagcttttctcggaaccatgaaccccaactgcgcccggtgcggcaagatcgtgtatcccacggagaaggtgaactgtctggataagttctggcataaagcatgcttccattgcgagacctgcaagatgacactgaacatgaagaactacaagggctacgagaagaagccctactgcaacgcacactaccccaagcagtccttcaccatggtggcggacaccccggaaaaccttcgcctcaagcaacagagtgagctccagagtcaggtgcgctacaaggaggagtttgagaagaacaagggcaaaggtttcagcgtagtggcagacacgcccgagctccagagaatcaagaagacccaggaccagatcagtaacataaaataccatgaggagtttgagaagagccgcatgggccctagcgggggcgagggcatggagccagagcgtcgggattcgcaggacggcagcagctaccggcggcccctggagcagcagcagcctcaccacatcccgaccagtgccccggtttaccagcagccccagcagcagccggtggcccagtcctatggtggctacaaggagcctgcagccccagtctccatacagcgcagcgccccaggtggtggcgggaagcggtaccgcgcggtgtatgactacagcgccgccgacgaggacgaggtctccttccaggacggggacaccatcgtcaacgtgcagcagatcgacgacggctggatgtacgggacggtggagcgcaccggcgacacggggatgctgccggccaactacgtggaggccatctgaacccgcagcgcccccatctgtcttcagcacattccacggcatcgcatccgtcctgggcgtgacccgtccattcttcagtgtctctgttttttaaaacctgcgacagcttgtgattcctacccctcttccagcttcttttgccaactgaagccttcttctgccacttctgcgggctccctcctctggcaggcttcccccttgatcgacttcttggttttctctctggatggaacgggcatgggcctctctgggggaggcagggctggaatgggagacctgttggcctgtgggcctcacctgcccctctgttctctcccctcacatcctcctgcccagctcctcacatacccacacattccagggctggggtgagcctgactgccaggaccccaggtcaggggctccctacattccccagagtgggatccacttcttggttcctgggatggcgatggggactctgccgctgtgtagggaccagtgggatgggctctacctctctttctcaaagagggggctctgcccacctggggtctctctccctacctccctcctcaggggcaacaacaggagaatggggttcctgctgtggggcgaattcatcccctccccgcgcgttccttcgcacactgtgattttgccctcctgcccacgcagacctgcagcgggcaaagagctcccgaggaagcacagcttgggtcaggttcttgcctttcttaattttagggacagctaccggaaggaggggaacaaggagttctcttccgcagcccctttccccacgcccacccccagtctccagggacccttgcctgcctcctaggctggaagccatggtcccgaagtgtagggcaagggtgcctcaggaccttttggtcttcagcctccctcagcccccaggatctgggttaggtggccgctcctccctgctcctcatgggaagatgtctcagagccttccatgacctcccctccccagcccaatgccaagtggacttggagctgcacaaagtcagcagggaccactaaatctccaagacctggtgtgcggaggcaggagcatgtatgtctgcaggtgtctgacacgcaagtgtgtgagtgtgagtgtgagagatggggcgggggtgtgtctgtaggtgtctctgggcctgtgtgtgggtggggttatgtgagggtatgaagagctgtcttcccctgagagtttcctcagaacccacagtgagaggggagggctcctggggcagagaagttccttaggttttctttggaatgaaattcctccttccccccatctctgagtggaggaagcccaccaatctgccctttgcagtgtgcagggtggaaggtaagaggttggtgtggagttggggctgccatagggtctgcagcctgctggggctaagcggtggaggaaggctctgtcactccaggcatatgtttccccatctctgtctggggctacagaatagggtggcagaagtgtcaccctgtgggtgtctccctcgggggctcttcccctagacctccccctcacttacataaagctcccttgaagcaagaaagagggtcccagggctgcaaaactggaagcacagcctcggggatggggagggaaagacggtgctatatccagttcctgctctctgctcatgggtggctgtgacaaccctggcctcactgtggggaagggggtaccgag

SEQ ID NO: 339229 - DNA, 2602 bp, Homo sapiens
aattaggctaggtacgaggctggtgttgaatcggcaccgaggccagctccagccgccgtcgctgctgcctgtgtagttgcagccgcggccgcctcccgccagctcgcctcggggaacaggacgcgcgtgagctcaggcgtccccgccccagcttttctcggaaccatgaaccccaactgcgcccggtgcggcaagatcgtgtatcccacggagaaggtgaactgtctggataagttctggcataaagcatgcttccattgcgagacctgcaagatgacactgaacatgaagaactacaagggctacgagaagaagccctactgcaacgcacactaccccaagcagtccttcaccatggtggcggacaccccggaaaaccttcgcctcaagcaacagagtgagctccagagtcaggtgcgctacaaggaggagtttgagaagaacaagggcaaaggtttcagcgtagtggcagacacgcccgagctccagagaatcaagaagacccaggaccagatcagtaacataaaataccatgaggagtttgagaagagccgcatgggccctagcgggggcgagggcatggagccagagcgtcgggattcgcaggacggcagcagctaccggcggcccctggagcagcagcagcctcaccacatcccgaccagtgccccggtttaccagcagccccagcagcagccggtggcccagtcctatggtggctacaaggagcctgcagccccagtctccatacagcgcagcgccccaggtggtggcgggaagcggtaccgcgcggtgtatgactacagcgccgccgacgaggacgaggtctccttccaggacggggacaccatcgtcaacgtgcagcagatcgacgacggctggatgtacgggacggtggagcgcaccggcgacacggggatgctgccggccaactacgtggaggccatctgaacccgcagcgcccccatctgtcttcagcacattccacggcatcgcatccgtcctgggcgtgacccgtccattcttcagtgtctctgttttttaaaacctgcgacagcttgtgattcctacccctcttccagcttcttttgccaactgaagccttcttctgccacttctgcgggctccctcctctggcaggcttcccccttgatcgacttcttggttttctctctggatggaacgggcatgggcctctctgggggaggcagggctggaatgggagacctgttggcctgtgggcctcacctgcccctctgttctctcccctcacatcctcctgcccagctcctcacatacccacacattccagggctggggtgagcctgactgccaggaccccaggtcaggggctccctacattccccagagtgggatccacttcttggttcctgggatggcgatggggactctgccgctgtgtagggaccagtgggatgggctctacctctctttctcaaagagggggctctgcccacctggggtctctctccctacctccctcctcaggggcaacaacaggagaatggggttcctgctgtggggcgaattcatcccctccccgcgcgttccttcgcacactgtgattttgccctcctgcccacgcagacctgcagcgggcaaagagctcccgaggaagcacagcttgggtcaggttcttgcctttcttaattttagggacagctaccggaaggaggggaacaaggagttctcttccgcagcccctttccccacgcccacccccagtctccagggacccttgcctgcctcctaggctggaagccatggtcccgaagtgtagggcaagggtgcctcaggaccttttggtcttcagcctccctcagcccccaggatctgggttaggtggccgctcctccctgctcctcatgggaagatgtctcagagccttccatgacctcccctccccagcccaatgccaagtggacttggagctgcacaaagtcagcagggaccactaaatctccaagacctggtgtgcggaggcaggagcatgtatgtctgcaggtgtctgacacgcaagtgtgtgagtgtgagtgtgagagatggggcgggggtgtgtctgtaggtgtctctgggcctgtgtgtgggtggggttatgtgagggtatgaagagctgtcttcccctgagagtttcctcagaacccacagtgagaggggagggctcctggggcagagaagttccttaggttttctttggaatgaaattcctccttccccccatctctgagtggaggaagcccaccaatctgccctttgcagtgtgcagggtggaaggtaagaggttggtgtggagttggggctgccatagggtctgcagcctgctggggctaagcggtggaggaaggctctgtcactccaggcatatgtttccccatctctgtctggggctacagaatagggtggcagaagtgtcaccctgtgggtgtctccctcatctgtcatgagtggccatacttctcgcggtagactgttcaccctgcagctgtacataataggctcccttgattgcatgacacagagggtatcacgggttgccgtgagcatggtagtgctccctctggcggatgggagaggaacacgg

SEQ ID NO: 339230 - DNA, 2664 bp, Homo sapiens
aattaggctaggtacgaggctggtgttgaatcggcaccgaggccagctccagccgccgtcgctgctgcctgtgtagttgcagccgcggccgcctcccgccagctcgcctcggggaacaggacgcgcgtgagctcaggcgtccccgccccagcttttctcggaaccatgaaccccaactgcgcccggtgcggcaagatcgtgtatcccacggagaaggtgaactgtctggataagttctggcataaagcatgcttccattgcgagacctgcaagatgacactgaacatgaagaactacaagggctacgagaagaagccctactgcaacgcacactaccccaagcagtccttcaccatggtggcggacaccccggaaaaccttcgcctcaagcaacagagtgagctccagagtcaggtgcgctacaaggaggagtttgagaagaacaagggcaaaggtttcagcgtagtggcagacacgcccgagctccagagaatcaagaagacccaggaccagatcagtaacataaaataccatgaggagtttgagaagagccgcatgggccctagcgggggcgagggcatggagccagagcgtcgggattcgcaggacggcagcagctaccggcggcccctggagcagcagcagcctcaccacatcccgaccagtgccccggtttaccagcagccccagcagcagccggtggcccagtcctatggtggctacaaggagcctgcagccccagtctccatacagcgcagcgccccaggtggtggcgggaagcggtaccgcgcggtgtatgactacagcgccgccgacgaggacgaggtctccttccaggacggggacaccatcgtcaacgtgcagcagatcgacgacggctggatgtacgggacggtggagcgcaccggcgacacggggatgctgccggccaactacgtggaggccatctgaacccgcagcgcccccatctgtcttcagcacattccacggcatcgcatccgtcctgggcgtgacccgtccattcttcagtgtctctgttttttaaaacctgcgacagcttgtgattcctacccctcttccagcttcttttgccaactgaagccttcttctgccacttctgcgggctccctcctctggcaggcttcccccttgatcgacttcttggttttctctctggatggaacgggcatgggcctctctgggggaggcagggctggaatgggagacctgttggcctgtgggcctcacctgcccctctgttctctcccctcacatcctcctgcccagctcctcacatacccacacattccagggctggggtgagcctgactgccaggaccccaggtcaggggctccctacattccccagagtgggatccacttcttggttcctgggatggcgatggggactctgccgctgtgtagggaccagtgggatgggctctacctctctttctcaaagagggggctctgcccacctggggtctctctccctacctccctcctcaggggcaacaacaggagaatggggttcctgctgtggggcgaattcatcccctccccgcgcgttccttcgcacactgtgattttgccctcctgcccacgcagacctgcagcgggcaaagagctcccgaggaagcacagcttgggtcaggttcttgcctttcttaattttagggacagctaccggaaggaggggaacaaggagttctcttccgcagcccctttccccacgcccacccccagtctccagggacccttgcctgcctcctaggctggaagccatggtcccgaagtgtagggcaagggtgcctcaggaccttttggtcttcagcctccctcagcccccaggatctgggttaggtggccgctcctccctgctcctcatgggaagatgtctcagagccttccatgacctcccctccccagcccaatgccaagtggacttggagctgcacaaagtcagcagggaccactaaatctccaagacctggtgtgcggaggcaggagcatgtatgtctgcaggtgtctgacacgcaagtgtgtgagtgtgagtgtgagagatggggcgggggtgtgtctgtaggtgtctctgggcctgtgtgtgggtggggttatgtgagggtatgaagagctgtcttcccctgagagtttcctcagaacccacactctacagttcacagaggtctttcagctcatttaatcccaggaaagaggcatcaaagctagaatgtgaatataacttttgtggaccaatactaagaataacaagaagcccagtggtgaggaaagtgcgttctcccagcactgcctcctgttttctccctctcatgtccctccagggaaaatgactttattgcttaatttctgcctttcccccctcacacatgcacttttgggcctttttttatagctggaaaaaacaaaataccaccctacaaacctgtatttatgtgtatgtgtatgtgtgtgagtgtgtgaagccgccagttcatctttttatatggggttgttgtctcattttggtctgttttggtcccctccctcgtgggcttgtgctcgggatcaaacctttctggcctgttatgattctgaacatttgacttgaaccacaagtgaatctttctcctggtgactcaaataaaagtataatttttacctgcg

SEQ ID NO: 339231 - DNA, 1357 bp, Homo sapiens
aattaggctaggtacgaggctggtgttgaatcggcaccgaggccagctccagccgccgtcgctgctgcctgtgtagttgcagccgcggccgcctcccgccagctcgcctcggggaacaggacgcgcgtgagctcaggcgtccccgccccagcttttctcggaaccatgaaccccaactgcgcccggtgcggcaagatcgtgtatcccacggagaaggtgaactgtctggataagttctggcataaagcatgcttccattgcgagacctgcaagatgacactgaacatgaagaactacaagggctacgagaagaagccctactgcaacgcacactaccccaagcagtccttcaccatggtggcggacaccccggaaaaccttcgcctcaagcaacagagtgagctccagagtcaggtgcgctacaaggaggagtttgagaagaacaagggcaaaggtttcagcgtagtggcagacacgcccgagctccagagaatcaagaagacccaggaccagatcagtaacataaaataccatgaggagtttgagaagagccgcatgggccctagcgggggcgagggcatggagccagagcgtcgggattcgcaggacggcagcagctaccggcggcccctggagcagcagcagcctcaccacatcccgaccagtgccccggtttaccagcagccccagcagcagccggtggcccagtcctatggtggctacaaggagcctgcagccccagtctccatacagcgcagcgccccaggtggtggcgggaagcggtaccgcgcggtgtatgactacagcgccgccgacgaggacgaggtctccttccaggacggggacaccatcgtcaacgtgcagcagatcgacgacggctggatgtacgggacggtggagcgcaccggcgacacggggatgctgccggccaactacgtggaggccatctgaacccgcagcgcccccatctgtcttcagcacattccacggcatcgcatccgtcctgggcgtgacccgtccattcttcagtgtctctgttttttaaaacctgcgacagcttgtgattcctacccctcttccagcttcttttgccaactgaagccttcttctgccacttctgcgggctccctcctctggcaggcttcccccttgatcgacttcttggttttctctctggatggaacgggcatgggctctcaggaggaagctatggcccttgtggcaagtctgagctcggtacctgcgggagctccttaccctctggagggccaggaggcccaggggagcccgggacaccgactcgtgggtcacccttgaaacctttgggtcctggagctcctttctgtccatcttcccc

SEQ ID NO: 339232 - DNA, 1492 bp, Homo sapiens
aattaggctaggtacgaggctggtgttgaatcggcaccgaggccagctccagccgccgtcgctgctgcctgtgtagttgcagccgcggccgcctcccgccagctcgcctcggggaacaggacgcgcgtgagctcaggcgtccccgccccagcttttctcggaaccatgaaccccaactgcgcccggtgcggcaagatcgtgtatcccacggagaaggtgaactgtctggataagttctggcataaagcatgcttccattgcgagacctgcaagatgacactgaacatgaagaactacaagggctacgagaagaagccctactgcaacgcacactaccccaagcagtccttcaccatggtggcggacaccccggaaaaccttcgcctcaagcaacagagtgagctccagagtcaggtgcgctacaaggaggagtttgagaagaacaagggcaaaggtttcagcgtagtggcagacacgcccgagctccagagaatcaagaagacccaggaccagatcagtaacataaaataccatgaggagtttgagaagagccgcatgggccctagcgggggcgagggcatggagccagagcgtcgggattcgcaggacggcagcagctaccggcggcccctgatgatgacctgggtcgggaggtgcacggccttttccttcctccgtcttcccttcccttcccttcccttcccatctgttctcccttccttcgcccccttcctttcctctccctccctatcttccatttttctcttcttccttcacatcatttgtccaagacctccctggcctgagataaacataagttgcaaaagtggcttcctgcagcccattttccaggttgggaaactgaggcatgggcctaaggtcccacagccacaccgaggaaagcagcccccactgaatgtcaccatgcaccaaagtgcatggtcctcgtgacacaaagaggggagatgacagtggctggagttgtcagagctgctttgaggaagctccaggcctgataggcttgacagggccaaggggaactattgtggaatgtcttggccttgaatgacaggctgctgattttggatctggagaaagctcacactgactcttcctgctcccccagtctgtttttctcctgctactccatccatgtatccctgagtttgggccacagtccctccacttggtttgcatgtcccaccttctttgtttggcaagctcctattcatccttcaaagccctagcttcaatacctgctacttcatgcagccattgcttatccttcaaggagagcctacttccctcaaggaccctgctgcttccagtctcaccttctgactcactcgggatccactgaactgggaggtctgtgtctcctcccagcagagtcatcactacctttggggccgcaggatcacccagcttggaactagatacagaaatgctgttttgagagtgtactgaataaaagattacatgtttgaaaccc

SEQ ID NO: 339233 - DNA, 623 bp, Homo sapiens
  misc_feature (293)..(293): n is a, c, g, or t
  misc_feature (299)..(299): n is a, c, g, or t
  misc_feature (301)..(301): n is a, c, g, or t
aattaggctaggtacgaggctggtgttgaatcggcaccgaggccagctccagccgccgtcgctgctgcctgtgtagttgcagccgcggccgcctcccgccagctcgcctcggggaacaggacgcgcgtgagctcaggcgtccccgccccagcttttctcggaaccatgaaccccaactgcgcccggtgcggcaagatcgtgtatcccacggagaaggtgaactgtctggataagttctggcataaagcatgcttccattgcgagacctgcaaaaaaaaaaaaaaaaaaaaaanaaaaanangaggagcacgaagaagaagaccaacgagacgcaaaaaggcacgcgaggagaagggaaaggcacagcgagacagggcaaggaaggacgcggaagcagccgaaagagaagggggcggagggaagccccaagggacaagcaagagagagaggacagcagaaaagagcaagaggacaagcaggcaaaaagcaaaggagaagcgagagcagaagaaaagaaaaactgaagcgaaagagcgaggagagaaggggagagaggacaagaaaagaggacgaagcaaagaacaagacaggagaaagagaagggaggaagaagaagacccagc

SEQ ID NO: 339234 - DNA, 440 bp, Homo sapiens
aattaggctaggtacgaggctggtgttgaatcggcaccgaggccagctccagccgccgtcgctgctgcctgtgtagttgcagccgcggccgcctcccgccagctcgcctcggggaacaggacgcgcgtgagctcaggcgtccccgccccagcttttctcggaaccatgaaccccaactgcgcccggtgcggcaagatcgtgtatcccacggagaaggtgaactgtctggataagttctggcataaagcatgcttccattgcgagacctgcaagatgacactgaacatgaagaactacaagggctacgagaagaagccctactgcaacgcacactaccccaagcagtccttcaccatggtggcggacaccccggaaaaccttcgcctcaagcaacagagtgagctccagagtcaggtgaggggctgggcggtgctggggcc

SEQ ID NO: 339235 - DNA, 540 bp, Homo sapiens
aattaggctaggtacgaggctggtgttgaatcggcaccgaggccagctccagccgccgtcgctgctgcctgtgtagttgcagccgcggccgcctcccgccagctcgcctcggggaacaggacgcgcgtgagctcaggcgtccccgccccagcttttctcggaaccatgaaccccaactgcgcccggtgcggcaagatcgtgtatcccacggagaaggtgaactgtctggataaggtgagcccgggaccgggagacgcgtctttgcaatcccccgcagtgctccgaatccagggaggagagaagggccgggtctttgccgccttatccccgcgatcccaggagaatggagggagggcgagcgggcggtgtcatggggtgtggggacacatcccagtctgaaaaccaggagatctggggcgaggcgggaagtccacgcgtagcgggcagccgctgctggagaggggtgggctctgtgtcccggggttgggaggacgggagaggagcagggaagtcaggcgccggggtgtgttgggggaaggt

SEQ ID NO: 339236 - DNA, 382 bp, Homo sapiens
tgggcatgcagtgatgactggctgtcggcctacagtggggaccccatttatgacagcctggcagacgcaagcctggcagatgtgaatgaggccagtgcctccactacccctgccctccagggtgggcctggggaagagcttggggttcccagatgcctcttctctgtgtacccccagaccaccagcacgcatagcattttcttcttgaagggactgtattctgtgggggcctgtgtgctaaatcagcccccactctctctgactgttgttcttttttctggatatcgtgggtatcggtgaagactgcatgtctcatcttagcacaaaggtcaaaactgggggcggggagcacctgcctccctggtctgcgcctgggtgctga

SEQ ID NO: 339237 - DNA, 3941 bp, Homo sapiens
aattaggctaggtacgaggctggtgttgaatcggcaccgaggccagctccagccgccgtcgctgctgcctgtgtagttgcagccgcggccgcctcccgccagctcgcctcggggaacaggacgcgcgtgagctcaggcgtccccgccccagcttttctcggaaccatgaaccccaactgcgcccggtgcggcaagatcgtgtatcccacggagaaggtgaactgtctggataagttctggcataaagcatgcttccattgcgagacctgcaagatgacactgaacatgaagaactacaagggctacgagaagaagccctactgcaacgcacactaccccaagcagtccttcaccatggtggcggacaccccggaaaaccttcgcctcaagcaacagagtgagctccagagtcaggtgcgctacaaggaggagtttgagaagaacaagggcaaaggtttcagcgtagtggcagacacgcccgagctccagagaatcaagaagacccaggaccagatcagtaacataaaataccatgaggagtttgagaagagccgcatgggccctagcgggggcgagggcatggagccagagcgtcgggattcgcaggacggcagcagctaccggcggcccctggagcagcagcagcctcaccacatcccgaccagtgccccggtttaccagcagccccagcagcagccggtggcccagtcctatggtggctacaaggagcctgcagccccagtctccatacagcgcagcgccccaggtggtggcgggaagcggtaccgcgcggtgtatgactacagcgccgccgacgaggacgaggtctccttccaggacggggacaccatcgtcaacgtgcagcagatcgacgacggctggatgtacgggacggtggagcgcaccggcgacacggggatgctgccggccaactacgtggaggccatctgaacccgcagcgcccccatctgtcttcagcacattccacggcatcgcatccgtcctgggcgtgacccgtccattcttcagtgtctctgttttttaaaacctgcgacagcttgtgattcctacccctcttccagcttcttttgccaactgaagccttcttctgccacttctgcgggctccctcctctggcaggcttcccccttgatcgacttcttggttttctctctggatggaacgggcatgggcctctctgggggaggcagggctggaatgggagacctgttggcctgtgggcctcacctgcccctctgttctctcccctcacatcctcctgcccagctcctcacatacccacacattccagggctggggtgagcctgactgccaggaccccaggtcaggggctccctacattccccagagtgggatccacttcttggttcctgggatggcgatggggactctgccgctgtgtagggaccagtgggatgggctctacctctctttctcaaagagggggctctgcccacctggggtctctctccctacctccctcctcaggggcaacaacaggagaatggggttcctgctgtggggcgaattcatcccctccccgcgcgttccttcgcacactgtgattttgccctcctgcccacgcagacctgcagcgggcaaagagctcccgaggaagcacagcttgggtcaggttcttgcctttcttaattttagggacagctaccggaaggaggggaacaaggagttctcttccgcagcccctttccccacgcccacccccagtctccagggacccttgcctgcctcctaggctggaagccatggtcccgaagtgtagggcaagggtgcctcaggaccttttggtcttcagcctccctcagcccccaggatctgggttaggtggccgctcctccctgctcctcatgggaagatgtctcagagccttccatgacctcccctccccagcccaatgccaagtggacttggagctgcacaaagtcagcagggaccactaaatctccaagacctggtgtgcggaggcaggagcatgtatgtctgcaggtgtctgacacgcaagtgtgtgagtgtgagtgtgagagatggggcgggggtgtgtctgtaggtgtctctgggcctgtgtgtgggtggggttatgtgagggtatgaagagctgtcttcccctgagagtttcctcagaacccacagtgagaggggagggctcctggggcagagaagttccttaggttttctttggaatgaaattcctccttccccccatctctgagtggaggaagcccaccaatctgccctttgcagtgtgcagggtggaaggtaagaggttggtgtggagttggggctgccatagggtctgcagcctgctggggctaagcggtggaggaaggctctgtcactccaggcatatgtttccccatctctgtctggggctacagaatagggtggcagaagtgtcaccctgtgggtgtctccctcgggggctcttcccctagacctccccctcacttacataaagctcccttgaagcaagaaagagggtcccagggctgcaaaactggaagcacagcctcggggatggggagggaaagacggtgctatatccagttcctgctctctgctcatgggtggctgtgacaaccctggcctcacttgattcatctctggttttcttgccaccctctgggagtccccatcccattttcatcctgagcccaaccaggccctgccattggcctcttgtcccttggcacacttgtacccacaggtgaggggcaggacctgaaggtattggcctgttcaacaatcagtcatcatgggtgtttttgtcaactgcttgttaattgatttggggatgtttgccccgaatgagaggttgaggaaaagactgtgggtggggaggccctgcctgacccatcccttttcctttctggccccagcctaggtggaggcaagtggaatatcttatattgggcgatttgggggctcggggaggcagagaatctcttgggagtcttgggtggcgctggtgcattctgtttcctcttgatctcaaagcacaatgtggatttggggaccaaaggtcagggacacatccccttagaggacctgagtttgggagagtggtgagtggaagggaggagcagcaagaagcagcctgttttcactcagcttaattctccttcccagataaggcaagccagtcatggaatcttgctgcaggccctccctctactcttcctgtcctaaaaataggggccgttttcttacacacccccagagagaggagggactgtcacactggtgctgagtgaccgggggctgctgggcgtctgttctttaccaaaaccatccatccctagaagagcacagagccctgaggggctgggctgggctgggctgagcccctggtcttctctacagttcacagaggtctttcagctcatttaatcccaggaaagaggcatcaaagctagaatgtgaatataacttttgtggaccaatactaagaataacaagaagcccagtggtgaggaaagtgcgttctcccagcactgcctcctgttttctccctctcatgtccctccagggaaaatgactttattgcttaatttctgcctttcccccctcacacatgcacttttgggcctttttttatagctggaaaaaacaaaataccaccctacaaacctgtatttaaaaagaaacagaaatgaccacgtgaaatttgcctctgtccaaacatttcatccgtgtgtatgtgtatgtgtgtgagtgtgtgaagccgccagttcatctttttatatggggttgttgtctcattttggtctgttttggtcccctccctcgtgggcttgtgctcgggatcaaacctttctggcctgttatgattctgaacatttgacttgaaccacaagtgaatctttctcctggtgactcaaataaaagtataatttttacctgcg

SEQ ID NO: 339238 - DNA, 3863 bp, Homo sapiens
aattaggctaggtacgaggctggtgttgaatcggcaccgaggccagctccagccgccgtcgctgctgcctgtgtagttgcagccgcggccgcctcccgccagctcgcctcggggaacaggacgcgcgtgagctcaggcgtccccgccccagcttttctcggaaccatgaaccccaactgcgcccggtgcggcaagatcgtgtatcccacggagaaggtgaactgtctggataagttctggcataaagcatgcttccattgcgagacctgcaagatgacactgaacatgaagaactacaagggctacgagaagaagccctactgcaacgcacactaccccaagcagtccttcaccatggtggcggacaccccggaaaaccttcgcctcaagcaacagagtgagctccagagtcaggtgcgctacaaggaggagtttgagaagaacaagggcaaaggtttcagcgtagtggcagacacgcccgagctccagagaatcaagaagacccaggaccagatcagtaacataaaataccatgaggagtttgagaagagccgcatgggccctagcgggggcgagggcatggagccagagcgtcgggattcgcaggacggcagcagctaccggcggcccctggagcagcagcagcctcaccacatcccgaccagtgccccggtttaccagcagccccagcagcagccggtggcccagtcctatggtggctacaaggagcctgcagccccagtctccatacagcgcagcgccccaggtggtggcgggaacgtgcagcagatcgacgacggctggatgtacgggacggtggagcgcaccggcgacacggggatgctgccggccaactacgtggaggccatctgaacccgcagcgcccccatctgtcttcagcacattccacggcatcgcatccgtcctgggcgtgacccgtccattcttcagtgtctctgttttttaaaacctgcgacagcttgtgattcctacccctcttccagcttcttttgccaactgaagccttcttctgccacttctgcgggctccctcctctggcaggcttcccccttgatcgacttcttggttttctctctggatggaacgggcatgggcctctctgggggaggcagggctggaatgggagacctgttggcctgtgggcctcacctgcccctctgttctctcccctcacatcctcctgcccagctcctcacatacccacacattccagggctggggtgagcctgactgccaggaccccaggtcaggggctccctacattccccagagtgggatccacttcttggttcctgggatggcgatggggactctgccgctgtgtagggaccagtgggatgggctctacctctctttctcaaagagggggctctgcccacctggggtctctctccctacctccctcctcaggggcaacaacaggagaatggggttcctgctgtggggcgaattcatcccctccccgcgcgttccttcgcacactgtgattttgccctcctgcccacgcagacctgcagcgggcaaagagctcccgaggaagcacagcttgggtcaggttcttgcctttcttaattttagggacagctaccggaaggaggggaacaaggagttctcttccgcagcccctttccccacgcccacccccagtctccagggacccttgcctgcctcctaggctggaagccatggtcccgaagtgtagggcaagggtgcctcaggaccttttggtcttcagcctccctcagcccccaggatctgggttaggtggccgctcctccctgctcctcatgggaagatgtctcagagccttccatgacctcccctccccagcccaatgccaagtggacttggagctgcacaaagtcagcagggaccactaaatctccaagacctggtgtgcggaggcaggagcatgtatgtctgcaggtgtctgacacgcaagtgtgtgagtgtgagtgtgagagatggggcgggggtgtgtctgtaggtgtctctgggcctgtgtgtgggtggggttatgtgagggtatgaagagctgtcttcccctgagagtttcctcagaacccacagtgagaggggagggctcctggggcagagaagttccttaggttttctttggaatgaaattcctccttccccccatctctgagtggaggaagcccaccaatctgccctttgcagtgtgcagggtggaaggtaagaggttggtgtggagttggggctgccatagggtctgcagcctgctggggctaagcggtggaggaaggctctgtcactccaggcatatgtttccccatctctgtctggggctacagaatagggtggcagaagtgtcaccctgtgggtgtctccctcgggggctcttcccctagacctccccctcacttacataaagctcccttgaagcaagaaagagggtcccagggctgcaaaactggaagcacagcctcggggatggggagggaaagacggtgctatatccagttcctgctctctgctcatgggtggctgtgacaaccctggcctcacttgattcatctctggttttcttgccaccctctgggagtccccatcccattttcatcctgagcccaaccaggccctgccattggcctcttgtcccttggcacacttgtacccacaggtgaggggcaggacctgaaggtattggcctgttcaacaatcagtcatcatgggtgtttttgtcaactgcttgttaattgatttggggatgtttgccccgaatgagaggttgaggaaaagactgtgggtggggaggccctgcctgacccatcccttttcctttctggccccagcctaggtggaggcaagtggaatatcttatattgggcgatttgggggctcggggaggcagagaatctcttgggagtcttgggtggcgctggtgcattctgtttcctcttgatctcaaagcacaatgtggatttggggaccaaaggtcagggacacatccccttagaggacctgagtttgggagagtggtgagtggaagggaggagcagcaagaagcagcctgttttcactcagcttaattctccttcccagataaggcaagccagtcatggaatcttgctgcaggccctccctctactcttcctgtcctaaaaataggggccgttttcttacacacccccagagagaggagggactgtcacactggtgctgagtgaccgggggctgctgggcgtctgttctttaccaaaaccatccatccctagaagagcacagagccctgaggggctgggctgggctgggctgagcccctggtcttctctacagttcacagaggtctttcagctcatttaatcccaggaaagaggcatcaaagctagaatgtgaatataacttttgtggaccaatactaagaataacaagaagcccagtggtgaggaaagtgcgttctcccagcactgcctcctgttttctccctctcatgtccctccagggaaaatgactttattgcttaatttctgcctttcccccctcacacatgcacttttgggcctttttttatagctggaaaaaacaaaataccaccctacaaacctgtatttaaaaagaaacagaaatgaccacgtgaaatttgcctctgtccaaacatttcatccgtgtgtatgtgtatgtgtgtgagtgtgtgaagccgccagttcatctttttatatggggttgttgtctcattttggtctgttttggtcccctccctcgtgggcttgtgctcgggatcaaacctttctggcctgttatgattctgaacatttgacttgaaccacaagtgaatctttctcctggtgactcaaataaaagtataatttttacctgcg

SEQ ID NO: 339239 - DNA, 3653 bp, Homo sapiens
aattaggctaggtacgaggctggtgttgaatcggcaccgaggccagctccagccgccgtcgctgctgcctgtgtagttgcagccgcggccgcctcccgccagctcgcctcggggaacaggacgcgcgtgagctcaggcgtccccgccccagcttttctcggaaccatgaaccccaactgcgcccggtgcggcaagatcgtgtatcccacggagaaggtgaactgtctggataagttctggcataaagcatgcttccattgcgagacctgcaagatgacactgaacatgaagaactacaagggctacgagaagaagccctactgcaacgcacactaccccaagcagtccttcaccatggtggcggacaccccggaaaaccttcgcctcaagcaacagagtgagctccagagtcaggtgcgctacaaggaggagtttgagaagaacaagggcaaaggtttcagcgtagtggcagacacgcccgagctccagagaatcaagaagacccaggaccagatcagtaacataaaataccatgaggagtttgagaagagccgcatgggccctagcgggggcgagggcatggagccagagcgtcgggattcgcaggacggcagcagctaccggcggcccctggagcagcagcagcctcaccacatcccgaccagtgccccggtttaccagcagccccagcagcagccggtggcccagtcctatggtggctacaaggagcctgcagccccatgtctctgttttttaaaacctgcgacagcttgtgattcctacccctcttccagcttcttttgccaactgaagccttcttctgccacttctgcgggctccctcctctggcaggcttcccccttgatcgacttcttggttttctctctggatggaacgggcatgggcctctctgggggaggcagggctggaatgggagacctgttggcctgtgggcctcacctgcccctctgttctctcccctcacatcctcctgcccagctcctcacatacccacacattccagggctggggtgagcctgactgccaggaccccaggtcaggggctccctacattccccagagtgggatccacttcttggttcctgggatggcgatggggactctgccgctgtgtagggaccagtgggatgggctctacctctctttctcaaagagggggctctgcccacctggggtctctctccctacctccctcctcaggggcaacaacaggagaatggggttcctgctgtggggcgaattcatcccctccccgcgcgttccttcgcacactgtgattttgccctcctgcccacgcagacctgcagcgggcaaagagctcccgaggaagcacagcttgggtcaggttcttgcctttcttaattttagggacagctaccggaaggaggggaacaaggagttctcttccgcagcccctttccccacgcccacccccagtctccagggacccttgcctgcctcctaggctggaagccatggtcccgaagtgtagggcaagggtgcctcaggaccttttggtcttcagcctccctcagcccccaggatctgggttaggtggccgctcctccctgctcctcatgggaagatgtctcagagccttccatgacctcccctccccagcccaatgccaagtggacttggagctgcacaaagtcagcagggaccactaaatctccaagacctggtgtgcggaggcaggagcatgtatgtctgcaggtgtctgacacgcaagtgtgtgagtgtgagtgtgagagatggggcgggggtgtgtctgtaggtgtctctgggcctgtgtgtgggtggggttatgtgagggtatgaagagctgtcttcccctgagagtttcctcagaacccacagtgagaggggagggctcctggggcagagaagttccttaggttttctttggaatgaaattcctccttccccccatctctgagtggaggaagcccaccaatctgccctttgcagtgtgcagggtggaaggtaagaggttggtgtggagttggggctgccatagggtctgcagcctgctggggctaagcggtggaggaaggctctgtcactccaggcatatgtttccccatctctgtctggggctacagaatagggtggcagaagtgtcaccctgtgggtgtctccctcgggggctcttcccctagacctccccctcacttacataaagctcccttgaagcaagaaagagggtcccagggctgcaaaactggaagcacagcctcggggatggggagggaaagacggtgctatatccagttcctgctctctgctcatgggtggctgtgacaaccctggcctcacttgattcatctctggttttcttgccaccctctgggagtccccatcccattttcatcctgagcccaaccaggccctgccattggcctcttgtcccttggcacacttgtacccacaggtgaggggcaggacctgaaggtattggcctgttcaacaatcagtcatcatgggtgtttttgtcaactgcttgttaattgatttggggatgtttgccccgaatgagaggttgaggaaaagactgtgggtggggaggccctgcctgacccatcccttttcctttctggccccagcctaggtggaggcaagtggaatatcttatattgggcgatttgggggctcggggaggcagagaatctcttgggagtcttgggtggcgctggtgcattctgtttcctcttgatctcaaagcacaatgtggatttggggaccaaaggtcagggacacatccccttagaggacctgagtttgggagagtggtgagtggaagggaggagcagcaagaagcagcctgttttcactcagcttaattctccttcccagataaggcaagccagtcatggaatcttgctgcaggccctccctctactcttcctgtcctaaaaataggggccgttttcttacacacccccagagagaggagggactgtcacactggtgctgagtgaccgggggctgctgggcgtctgttctttaccaaaaccatccatccctagaagagcacagagccctgaggggctgggctgggctgggctgagcccctggtcttctctacagttcacagaggtctttcagctcatttaatcccaggaaagaggcatcaaagctagaatgtgaatataacttttgtggaccaatactaagaataacaagaagcccagtggtgaggaaagtgcgttctcccagcactgcctcctgttttctccctctcatgtccctccagggaaaatgactttattgcttaatttctgcctttcccccctcacacatgcacttttgggcctttttttatagctggaaaaaacaaaataccaccctacaaacctgtatttaaaaagaaacagaaatgaccacgtgaaatttgcctctgtccaaacatttcatccgtgtgtatgtgtatgtgtgtgagtgtgtgaagccgccagttcatctttttatatggggttgttgtctcattttggtctgttttggtcccctccctcgtgggcttgtgctcgggatcaaacctttctggcctgttatgattctgaacatttgacttgaaccacaagtgaatctttctcctggtgactcaaataaaagtataatttttacctgcg

SEQ ID NO: 339240 - DNA, 3740 bp, Homo sapiens
aacgatacagagaagattagcatggcccctgcgcaaggatgacacgcaaattcgtgaagcgttccatatttgatgacactgaacatgaagaactacaagggctacgagaagaagccctactgcaacgcacactaccccaagcagtccttcaccatggtggcggacaccccggaaaaccttcgcctcaagcaacagagtgagctccagagtcaggtgcgctacaaggaggagtttgagaagaacaagggcaaaggtttcagcgtagtggcagacacgcccgagctccagagaatcaagaagacccaggaccagatcagtaacataaaataccatgaggagtttgagaagagccgcatgggccctagcgggggcgagggcatggagccagagcgtcgggattcgcaggacggcagcagctaccggcggcccctggagcagcagcagcctcaccacatcccgaccagtgccccggtttaccagcagccccagcagcagccggtggcccagtcctatggtggctacaaggagcctgcagccccagtctccatacagcgcagcgccccaggtggtggcgggaagcggtaccgcgcggtgtatgactacagcgccgccgacgaggacgaggtctccttccaggacggggacaccatcgtcaacgtgcagcagatcgacgacggctggatgtacgggacggtggagcgcaccggcgacacggggatgctgccggccaactacgtggaggccatctgaacccgcagcgcccccatctgtcttcagcacattccacggcatcgcatccgtcctgggcgtgacccgtccattcttcagtgtctctgttttttaaaacctgcgacagcttgtgattcctacccctcttccagcttcttttgccaactgaagccttcttctgccacttctgcgggctccctcctctggcaggcttcccccttgatcgacttcttggttttctctctggatggaacgggcatgggcctctctgggggaggcagggctggaatgggagacctgttggcctgtgggcctcacctgcccctctgttctctcccctcacatcctcctgcccagctcctcacatacccacacattccagggctggggtgagcctgactgccaggaccccaggtcaggggctccctacattccccagagtgggatccacttcttggttcctgggatggcgatggggactctgccgctgtgtagggaccagtgggatgggctctacctctctttctcaaagagggggctctgcccacctggggtctctctccctacctccctcctcaggggcaacaacaggagaatggggttcctgctgtggggcgaattcatcccctccccgcgcgttccttcgcacactgtgattttgccctcctgcccacgcagacctgcagcgggcaaagagctcccgaggaagcacagcttgggtcaggttcttgcctttcttaattttagggacagctaccggaaggaggggaacaaggagttctcttccgcagcccctttccccacgcccacccccagtctccagggacccttgcctgcctcctaggctggaagccatggtcccgaagtgtagggcaagggtgcctcaggaccttttggtcttcagcctccctcagcccccaggatctgggttaggtggccgctcctccctgctcctcatgggaagatgtctcagagccttccatgacctcccctccccagcccaatgccaagtggacttggagctgcacaaagtcagcagggaccactaaatctccaagacctggtgtgcggaggcaggagcatgtatgtctgcaggtgtctgacacgcaagtgtgtgagtgtgagtgtgagagatggggcgggggtgtgtctgtaggtgtctctgggcctgtgtgtgggtggggttatgtgagggtatgaagagctgtcttcccctgagagtttcctcagaacccacagtgagaggggagggctcctggggcagagaagttccttaggttttctttggaatgaaattcctccttccccccatctctgagtggaggaagcccaccaatctgccctttgcagtgtgcagggtggaaggtaagaggttggtgtggagttggggctgccatagggtctgcagcctgctggggctaagcggtggaggaaggctctgtcactccaggcatatgtttccccatctctgtctggggctacagaatagggtggcagaagtgtcaccctgtgggtgtctccctcgggggctcttcccctagacctccccctcacttacataaagctcccttgaagcaagaaagagggtcccagggctgcaaaactggaagcacagcctcggggatggggagggaaagacggtgctatatccagttcctgctctctgctcatgggtggctgtgacaaccctggcctcacttgattcatctctggttttcttgccaccctctgggagtccccatcccattttcatcctgagcccaaccaggccctgccattggcctcttgtcccttggcacacttgtacccacaggtgaggggcaggacctgaaggtattggcctgttcaacaatcagtcatcatgggtgtttttgtcaactgcttgttaattgatttggggatgtttgccccgaatgagaggttgaggaaaagactgtgggtggggaggccctgcctgacccatcccttttcctttctggccccagcctaggtggaggcaagtggaatatcttatattgggcgatttgggggctcggggaggcagagaatctcttgggagtcttgggtggcgctggtgcattctgtttcctcttgatctcaaagcacaatgtggatttggggaccaaaggtcagggacacatccccttagaggacctgagtttgggagagtggtgagtggaagggaggagcagcaagaagcagcctgttttcactcagcttaattctccttcccagataaggcaagccagtcatggaatcttgctgcaggccctccctctactcttcctgtcctaaaaataggggccgttttcttacacacccccagagagaggagggactgtcacactggtgctgagtgaccgggggctgctgggcgtctgttctttaccaaaaccatccatccctagaagagcacagagccctgaggggctgggctgggctgggctgagcccctggtcttctctacagttcacagaggtctttcagctcatttaatcccaggaaagaggcatcaaagctagaatgtgaatataacttttgtggaccaatactaagaataacaagaagcccagtggtgaggaaagtgcgttctcccagcactgcctcctgttttctccctctcatgtccctccagggaaaatgactttattgcttaatttctgcctttcccccctcacacatgcacttttgggcctttttttatagctggaaaaaacaaaataccaccctacaaacctgtatttaaaaagaaacagaaatgaccacgtgaaatttgcctctgtccaaacatttcatccgtgtgtatgtgtatgtgtgtgagtgtgtgaagccgccagttcatctttttatatggggttgttgtctcattttggtctgttttggtcccctccctcgtgggcttgtgctcgggatcaaacctttctggcctgttatgattctgaacatttgacttgaaccacaagtgaatctttctcctggtgactcaaataaaagtataatttttacctgcg

SEQ ID NO: 339241 - DNA, 2747 bp, Homo sapiens
aattaggctaggtacgaggctggtgttgaatcggcaccgaggccagctccagccgccgtcgctgctgcctgtgtagttgcagccgcggccgcctcccgccagctcgcctcggggaacaggacgcgcgtgacctgactgccaggaccccaggtcaggggctccctacattccccagagtgggatccacttcttggttcctgggatggcgatggggactctgccgctgtgtagggaccagtgggatgggctctacctctctttctcaaagagggggctctgcccacctggggtctctctccctacctccctcctcaggggcaacaacaggagaatggggttcctgctgtggggcgaattcatcccctccccgcgcgttccttcgcacactgtgattttgccctcctgcccacgcagacctgcagcgggcaaagagctcccgaggaagcacagcttgggtcaggttcttgcctttcttaattttagggacagctaccggaaggaggggaacaaggagttctcttccgcagcccctttccccacgcccacccccagtctccagggacccttgcctgcctcctaggctggaagccatggtcccgaagtgtagggcaagggtgcctcaggaccttttggtcttcagcctccctcagcccccaggatctgggttaggtggccgctcctccctgctcctcatgggaagatgtctcagagccttccatgacctcccctccccagcccaatgccaagtggacttggagctgcacaaagtcagcagggaccactaaatctccaagacctggtgtgcggaggcaggagcatgtatgtctgcaggtgtctgacacgcaagtgtgtgagtgtgagtgtgagagatggggcgggggtgtgtctgtaggtgtctctgggcctgtgtgtgggtggggttatgtgagggtatgaagagctgtcttcccctgagagtttcctcagaacccacagtgagaggggagggctcctggggcagagaagttccttaggttttctttggaatgaaattcctccttccccccatctctgagtggaggaagcccaccaatctgccctttgcagtgtgcagggtggaaggtaagaggttggtgtggagttggggctgccatagggtctgcagcctgctggggctaagcggtggaggaaggctctgtcactccaggcatatgtttccccatctctgtctggggctacagaatagggtggcagaagtgtcaccctgtgggtgtctccctcgggggctcttcccctagacctccccctcacttacataaagctcccttgaagcaagaaagagggtcccagggctgcaaaactggaagcacagcctcggggatggggagggaaagacggtgctatatccagttcctgctctctgctcatgggtggctgtgacaaccctggcctcacttgattcatctctggttttcttgccaccctctgggagtccccatcccattttcatcctgagcccaaccaggccctgccattggcctcttgtcccttggcacacttgtacccacaggtgaggggcaggacctgaaggtattggcctgttcaacaatcagtcatcatgggtgtttttgtcaactgcttgttaattgatttggggatgtttgccccgaatgagaggttgaggaaaagactgtgggtggggaggccctgcctgacccatcccttttcctttctggccccagcctaggtggaggcaagtggaatatcttatattgggcgatttgggggctcggggaggcagagaatctcttgggagtcttgggtggcgctggtgcattctgtttcctcttgatctcaaagcacaatgtggatttggggaccaaaggtcagggacacatccccttagaggacctgagtttgggagagtggtgagtggaagggaggagcagcaagaagcagcctgttttcactcagcttaattctccttcccagataaggcaagccagtcatggaatcttgctgcaggccctccctctactcttcctgtcctaaaaataggggccgttttcttacacacccccagagagaggagggactgtcacactggtgctgagtgaccgggggctgctgggcgtctgttctttaccaaaaccatccatccctagaagagcacagagccctgaggggctgggctgggctgggctgagcccctggtcttctctacagttcacagaggtctttcagctcatttaatcccaggaaagaggcatcaaagctagaatgtgaatataacttttgtggaccaatactaagaataacaagaagcccagtggtgaggaaagtgcgttctcccagcactgcctcctgttttctccctctcatgtccctccagggaaaatgactttattgcttaatttctgcctttcccccctcacacatgcacttttgggcctttttttatagctggaaaaaacaaaataccaccctacaaacctgtatttaaaaagaaacagaaatgaccacgtgaaatttgcctctgtccaaacatttcatccgtgtgtatgtgtatgtgtgtgagtgtgtgaagccgccagttcatctttttatatggggttgttgtctcattttggtctgttttggtcccctccctcgtgggcttgtgctcgggatcaaacctttctggcctgttatgattctgaacatttgacttgaaccacaagtgaatctttctcctggtgactcaaataaaagtataatttttacctgcg

SEQ ID NO: 339242 - DNA, 3880 bp, Homo sapiens
aattaggctaggtacgaggctggtgttgaatcggcaccgaggccagctccagccgccgtcgctgctgcctgtgtagttgcagccgcggccgcctcccgccagctcgcctcggggaacaggacgcgcgtgagctcaggcgtccccgccccagcttttctcggaaccatgaaccccaactgcgcccggtgcggcaagatcgtgtatcccacggagaaggtgaactgtctggataagttctggcataaagcatgcttccattgcgagacctgcaagatgacactgaacatgaagaactacaagggctacgagaagaagccctactgcaacgcacactaccccaagcagtccttcaccatggtggcggacaccccggaaaaccttcgcctcaagcaacagagtgagctccagagtcaggtgcgctacaaggaggagtttgagaagaacaagggcaaaggtttcagcgtagtggcagacacgcccgagctccagagaatcaagaagacccaggaccagatcagtaacataaaataccatgaggagtttgagaagagccgcatgggccctagcgggggcgagggcatggagccagagcgtcgggattcgcaggacggcagcagctaccggcggcccctggagcagcagcagcctcaccacatcccgaccagtgccccggtttaccagcagccccagcagcagccggtggcccagtcctatggtggctacaaggagcctgcagccccagtctccatacagcgcagcgccccaggtggtggcgggaagcggtaccgcgcggtgtatgactacagcgccgccgacgaggacgaggtctccttccaggacggggacaccatcgtcaacgtgcagcagatcgacgacggctggatgtacgggacggtggagcgcaccggcgacacggggatgctgccggccaactacgtggaggccatctgaacccgcagcgcccccatctgtcttcagcacattccacggcatcgcatccgtcctgggcgtgacccgtccattcttcagtgtctctgttttttaaaacctgcgacagcttgtgattcctacccctcttccagcttcttttgccaactgaagccttcttctgccacttctgcgggctccctcctctggcaggcttcccccttgatcgacttcttggttttctctctggatggaacgggcatgggcctctctgggggaggcagggctggaatgggagacctgttggcctgtgggcctcacctgcccctctgttctctcccctcacatcctcctgcccagctcctcacatacccacacattccagggctggggtgagcctgactgccaggaccccaggtcaggggctccctacattccccagagtgggatccacttcttggttcctgggatggcgatggggactctgccgctgtgtagggaccagtgggatgggctctacctctctttctcaaagagggggctctgcccacctggggtctctctccctacctccctcctcaggggcaacaacaggagaatggggttcctgctgtggggcgaattcatcccctccccgcgcgttccttcgcacactgtgattttgccctcctgcccacgcagacctgcagcgggcaaagagctcccgaggaagcacagcttgggtcaggttcttgcctttcttaattttagggacagctaccggaaggaggggaacaaggagttctcttccgcagcccctttccccacgcccacccccagtctccagggacccttgcctgcctcctaggctggaagccatggtcccgaagtgtagggcaagggtgcctcaggaccttttggtcttcagcctccctcagcccccaggatctgggttaggtggccgctcctccctgctcctcatgggaagatgtctcagagccttccatgacctcccctccccagcccaatgccaagtggacttggagctgcacaaagtcagcagggaccactaaatctccaagacctggtgtgcggaggcaggagcatgtatgtctgcaggtgtctctgggcctgtgtgtgggtggggttatgtgagggtatgaagagctgtcttcccctgagagtttcctcagaacccacagtgagaggggagggctcctggggcagagaagttccttaggttttctttggaatgaaattcctccttccccccatctctgagtggaggaagcccaccaatctgccctttgcagtgtgcagggtggaaggtaagaggttggtgtggagttggggctgccatagggtctgcagcctgctggggctaagcggtggaggaaggctctgtcactccaggcatatgtttccccatctctgtctggggctacagaatagggtggcagaagtgtcaccctgtgggtgtctccctcgggggctcttcccctagacctccccctcacttacataaagctcccttgaagcaagaaagagggtcccagggctgcaaaactggaagcacagcctcggggatggggagggaaagacggtgctatatccagttcctgctctctgctcatgggtggctgtgacaaccctggcctcacttgattcatctctggttttcttgccaccctctgggagtccccatcccattttcatcctgagcccaaccaggccctgccattggcctcttgtcccttggcacacttgtacccacaggtgaggggcaggacctgaaggtattggcctgttcaacaatcagtcatcatgggtgtttttgtcaactgcttgttaattgatttggggatgtttgccccgaatgagaggttgaggaaaagactgtgggtggggaggccctgcctgacccatcccttttcctttctggccccagcctaggtggaggcaagtggaatatcttatattgggcgatttgggggctcggggaggcagagaatctcttgggagtcttgggtggcgctggtgcattctgtttcctcttgatctcaaagcacaatgtggatttggggaccaaaggtcagggacacatccccttagaggacctgagtttgggagagtggtgagtggaagggaggagcagcaagaagcagcctgttttcactcagcttaattctccttcccagataaggcaagccagtcatggaatcttgctgcaggccctccctctactcttcctgtcctaaaaataggggccgttttcttacacacccccagagagaggagggactgtcacactggtgctgagtgaccgggggctgctgggcgtctgttctttaccaaaaccatccatccctagaagagcacagagccctgaggggctgggctgggctgggctgagcccctggtcttctctacagttcacagaggtctttcagctcatttaatcccaggaaagaggcatcaaagctagaatgtgaatataacttttgtggaccaatactaagaataacaagaagcccagtggtgaggaaagtgcgttctcccagcactgcctcctgttttctccctctcatgtccctccagggaaaatgactttattgcttaatttctgcctttcccccctcacacatgcacttttgggcctttttttatagctggaaaaaacaaaataccaccctacaaacctgtatttaaaaagaaacagaaatgaccacgtgaaatttgcctctgtccaaacatttcatccgtgtgtatgtgtatgtgtgtgagtgtgtgaagccgccagttcatctttttatatggggttgttgtctcattttggtctgttttggtcccctccctcgtgggcttgtgctcgggatcaaacctttctggcctgttatgattctgaacatttgacttgaaccacaagtgaatctttctcctggtgactcaaataaaagtataatttttacctgcg

SEQ ID NO: 339243 - DNA, 3887 bp, Homo sapiens
aattaggctaggtacgaggctggtgttgaatcggcaccgaggccagctccagccgccgtcgctgctgcctgtgtagttgcagccgcggccgcctcccgccagctcgcctcggggaacaggacgcgcgtgagctcaggcgtccccgccccagcttttctcggaaccatgaaccccaactgcgcccggtgcggcaagatcgtgtatcccacggagaaggtgaactgtctggataagttctggcataaagcatgcttccattgcgagacctgcaagatgacactgaacatgaagaactacaagggctacgagaagaagccctactgcaacgcacactaccccaagcagtccttcaccatggtggcggacaccccggaaaaccttcgcctcaagcaacagagtgagctccagagtcaggtgcgctacaaggaggagtttgagaagaacaagggcaaaggtttcagcgtagtggcagacacgcccgagctccagagaatcaagaagacccaggaccagatcagtaacataaaataccatgaggagtttgagaagagccgcatgggccctagcgggggcgagggcatggagccagagcgtcgggattcgcaggacggcagcagctaccggcggcccctggagcagcagcagcctcaccacatcccgaccagtgccccggtttaccagcagccccagcagcagccggtggcccagtcctatggtggctacaaggagcctgcagccccagtctccatacagcgcagcgccccaggtggtggcgggaagcggtaccgcgcggtgtatgactacagcgccgccgacgaggacgaggtctccttccaggacggggacaccatcgtcaacgtgcagcagatcgacgacggctggatgtacgggacggtggagcgcaccggcgacacggggatgctgccggccaactacgtggaggccatctgaacccgcagcgcccccatctgtcttcagcacattccacggcatcgcatccgtcctgggcgtgacccgtccattcttcagtgtctctgttttttaaaacctgcgacagcttgtgattcctacccctcttccagcttcttttgccaactgaagccttcttctgccacttctgcgggctccctcctctggcaggcttcccccttgatcgacttcttggttttctctctggatggaacgggcatgggcctctctgggggaggcagggctggaatgggagacctgttggcctgtgggcctcacctgcccctctgttctctcccctcacatcctcctgcccagctcctcacatacccacacattccagggctggggtgagcctgactgccaggaccccaggtcaggggctccctacattccccagagtgggatccacttcttggttcctgggatggcgatggggactctgccgctgtgtagggaccagtgggatgggctctacctctctttctcaaagagggggctctgcccacctggggtctctctccctacctccctcctcaggggcaacaacaggagaatggggttcctgctgtggggcgaattcatcccctccccgcgcgttccttcgcacactgtgattttgccctcctgcccacgcagacctgcagcgggcaaagagctcccgaggaagcacagcttgggtcaggttcttgcctttcttaattttagggacagctaccggaaggaggggaacaaggagttctcttccgcagcccctttccccacgcccacccccagtctccagggacccttgcctgcctcctaggctggaagccatggtcccgaagtgtagggcaagggtgcctcaggaccttttggtcttcagcctccctcagcccccaggatctgggttaggtggccgctcctccctgctcctcatgggaagatgtctcagagccttccatgacctcccctccccagcccaatgccaagtggacttggagctgcacaaagtcagcagggaccactaaatctccaagacctggtgtgcggaggcaggagcatgtatgtctgcaggtgtctgacacgcaagtgtgtgagtgtgagtgtgagagatggggcgggggtgtgtctgtaggtgtctctgggcctgtgtgtgggtggggttatgtgagggtatgaagagctgtcttcccctgagagtttcctcagaacccacagtgagaggggagggctcctggggcagagaagttccttaggttttctttggaatgaaattcctccttccccccatctctgagtggaggaagcccaccaatctgccctttgcagtgtgcagggtggaaggtaagaggttggtgtggagttggggctgccatagggtctgcagcctgctggggctaagcggtggaggaaggctctgtcactccaggcatatgtttccccatctctgtctggggctacagaatagggtggcagaagtgtcaccctgtgggtgtctccctcgggggctcttcccctagacctccccctcacttacataaagctcccttgaagcaagaaagagggtcccagggctgcttcctgctctctgctcatgggtggctgtgacaaccctggcctcacttgattcatctctggttttcttgccaccctctgggagtccccatcccattttcatcctgagcccaaccaggccctgccattggcctcttgtcccttggcacacttgtacccacaggtgaggggcaggacctgaaggtattggcctgttcaacaatcagtcatcatgggtgtttttgtcaactgcttgttaattgatttggggatgtttgccccgaatgagaggttgaggaaaagactgtgggtggggaggccctgcctgacccatcccttttcctttctggccccagcctaggtggaggcaagtggaatatcttatattgggcgatttgggggctcggggaggcagagaatctcttgggagtcttgggtggcgctggtgcattctgtttcctcttgatctcaaagcacaatgtggatttggggaccaaaggtcagggacacatccccttagaggacctgagtttgggagagtggtgagtggaagggaggagcagcaagaagcagcctgttttcactcagcttaattctccttcccagataaggcaagccagtcatggaatcttgctgcaggccctccctctactcttcctgtcctaaaaataggggccgttttcttacacacccccagagagaggagggactgtcacactggtgctgagtgaccgggggctgctgggcgtctgttctttaccaaaaccatccatccctagaagagcacagagccctgaggggctgggctgggctgggctgagcccctggtcttctctacagttcacagaggtctttcagctcatttaatcccaggaaagaggcatcaaagctagaatgtgaatataacttttgtggaccaatactaagaataacaagaagcccagtggtgaggaaagtgcgttctcccagcactgcctcctgttttctccctctcatgtccctccagggaaaatgactttattgcttaatttctgcctttcccccctcacacatgcacttttgggcctttttttatagctggaaaaaacaaaataccaccctacaaacctgtatttaaaaagaaacagaaatgaccacgtgaaatttgcctctgtccaaacatttcatccgtgtgtatgtgtatgtgtgtgagtgtgtgaagccgccagttcatctttttatatggggttgttgtctcattttggtctgttttggtcccctccctcgtgggcttgtgctcgggatcaaacctttctggcctgttatgattctgaacatttgacttgaaccacaagtgaatctttctcctggtgactcaaataaaagtataatttttacctgcg

SEQ ID NO: 339244 - DNA, 3829 bp, Homo sapiens
aattaggctaggtacgaggctggtgttgaatcggcaccgaggccagctccagccgccgtcgctgctgcctgtgtagttgcagccgcggccgcctcccgccagctcgcctcggggaacaggacgcgcgtgagctcaggcgtccccgccccagcttttctcggaaccatgaaccccaactgcgcccggtgcggcaagatcgtgtatcccacggagaaggtgaactgtctggataagttctggcataaagcatgcttccattgcgagacctgcaagatgacactgaacatgaagaactacaagggctacgagaagaagccctactgcaacgcacactaccccaagcagtccttcaccatggtggcggacaccccggaaaaccttcgcctcaagcaacagagtgagctccagagtcaggtgcgctacaaggaggagtttgagaagaacaagggcaaaggtttcagcgtagtggcagacacgcccgagctccagagaatcaagaagacccaggaccagatcagtaacataaaataccatgaggagtttgagaagagccgcatgggccctagcgggggcgagggcatggagccagagcgtcgggattcgcaggacggcagcagctaccggcggcccctggagcagcagcagcctcaccacatcccgaccagtgccccggtttaccagcagccccagcagcagccggtggcccagtcctatggtggctacaaggagcctgcagccccagtctccatacagcgcagcgccccaggtggtggcgggaagcggtaccgcgcggtgtatgactacagcgccgccgacgaggacgaggtctccttccaggacggggacaccatcgtcaacgtgcagcagatcgacgacggctggatgtacgggacggtggagcgcaccggcgacacggggatgctgccggccaactacgtggaggccatctgaacccgcagcgcccccatctgtcttcagcacattccacggcatcgcatccgtcctgggcgtgacccgtccattcttcagtgtctctgttttttaaaacctgcgacagcttgtgattcctacccctcttccagcttcttttgccaactgaagccttcttctgccacttctgcgggctccctcctctggcaggcttcccccttgatcgacttcttggttttctctctggatggaacgggcatgggcctctctgggggaggcagggctggaatgggagacctgttggcctgtgggcctcacctgcccctctgttctctcccctcacatcctcctgcccagctcctcacatacccacacattccagggctggggtgagcctgactgccaggaccccaggtcaggggctccctacattccccagagtgggatccacttcttggttcctgggatggcgatggggactctgccgctgtgtagggaccagtgggatgggctctacctctctttctcaaagagggggctctgcccacctggggtctctctccctacctccctcctcaggggcaacaacaggagaatggggttcctgctgtggggcgaattcatcccctccccgcgcgttccttcgcacactgtgattttgccctcctgcccacgcagacctgcagcgggcaaagagctcccgaggaagcacagcttgggtcaggttcttgcctttcttaattttagggacagctaccggaaggaggggaacaaggagttctcttccgcagcccctttccccacgcccacccccagtctccagggacccttgcctgcctcctaggctggaagccatggtcccgaagtgtagggcaagggtgcctcaggaccttttggtcttcagcctccctcagcccccaggatctgggttaggtggccgctcctccctgctcctcatgggaagatgtctcagagccttccatgacctcccctccccagcccaatgccaagtggacttggagctgcacaaagtcagcagggaccactaaatctccaagacctggtgtgcggaggcaggagcatgtatgtctgcaggtgtctgacacgcaagtgtgtgagtgtgagtgtgagagatggggcgggggtgtgtctgtaggtgtctctgggcctgtgtgtgggtggggttatgtgagggtatgaagagctgtcttcccctgagagtttcctcagaacccacagtgagaggggagggctcctggggcagagaagttccttaggttttctttggaatgaaattcctccttccccccatctctgagtggaggaagcccaccaatctgccctttgcagtgtgcagggtggaaggtaagaggttggtgtggagttggggctgccatagggtctgcagcctgctggggctaagcggtggaggaaggctctgtcactccaggcatatgtttccccatctctgtctggggctacagaatagggtggcagaagtgtcaccctgtgggtgtctccctcgggggctcttcccctagacctccccctcacttacataaagctcccttgaagcaagaaagagggtcccagggctgcaaaactggaagcacagcctcggggatggggagggaaagacggtgctatatccagttcctgctctctgctcatgggtggctgtgacaaccctggcctcacttgattcatctctggttttcttgccaccctctgggagtccccatcccattttcatcctgagcccaaccaggccctgccattggcctcttgtcccttggcacacttgtacccacaggtgaggggcaggacctgaaggtattggcctgttcaacaatcagtcatcatgggtgtttttgtcaactgcttgttaattgatttggggatgtttgccccgaatgagaggttgaggaaaagactgtgggtggggaggccctgcctgacccatcccttttcctttctggccccagcctaggtggaggcaagtggaatatcttatattgggcgatttgggggctcggggaggcagagaatctcttgggagtcttgggtggcgctggtgcattctgtttcctcttgatctcaaagcacaatgtggatttggggaccaaaggtcagggacacatccccttagaggacctgagtttgggagagtggtgagtggaagggaggagcagcaagaagcagcctgttttcactcagcttaattctccttcccagataaggcaagccagtcatggaatcttgctgcaggccctccctctactcttcctgtcctaaaaataggggccgttttcttacacacccccagagagaggagggactgtcacactgctctacagttcacagaggtctttcagctcatttaatcccaggaaagaggcatcaaagctagaatgtgaatataacttttgtggaccaatactaagaataacaagaagcccagtggtgaggaaagtgcgttctcccagcactgcctcctgttttctccctctcatgtccctccagggaaaatgactttattgcttaatttctgcctttcccccctcacacatgcacttttgggcctttttttatagctggaaaaaacaaaataccaccctacaaacctgtatttaaaaagaaacagaaatgaccacgtgaaatttgcctctgtccaaacatttcatccgtgtgtatgtgtatgtgtgtgagtgtgtgaagccgccagttcatctttttatatggggttgttgtctcattttggtctgttttggtcccctccctcgtgggcttgtgctcgggatcaaacctttctggcctgttatgattctgaacatttgacttgaaccacaagtgaatctttctcctggtgactcaaataaaagtataatttttacctgcg

SEQ ID NO: 339245 - DNA, 4310 bp, Homo sapiens
  misc_feature (3995)..(3995): n is a, c, g, or t
  misc_feature (4000)..(4000): n is a, c, g, or t
aattaggctaggtacgaggctggtgttgaatcggcaccgaggccagctccagccgccgtcgctgctgcctgtgtagttgcagccgcggccgcctcccgccagctcgcctcggggaacaggacgcgcgtgagctcaggcgtccccgccccagcttttctcggaaccatgaaccccaactgcgcccggtgcggcaagatcgtgtatcccacggagaaggtgaactgtctggataagttctggcataaagcatgcttccattgcgagacctgcaagatgacactgaacatgaagaactacaagggctacgagaagaagccctactgcaacgcacactaccccaagcagtccttcaccatggtggcggacaccccggaaaaccttcgcctcaagcaacagagtgagctccagagtcaggtgcgctacaaggaggagtttgagaagaacaagggcaaaggtttcagcgtagtggcagacacgcccgagctccagagaatcaagaagacccaggaccagatcagtaacataaaataccatgaggagtttgagaagagccgcatgggccctagcgggggcgagggcatggagccagagcgtcgggattcgcaggacggcagcagctaccggcggcccctggagcagcagcagcctcaccacatcccgaccagtgccccggtttaccagcagccccagcagcagccggtggcccagtcctatggtggctacaaggagcctgcagccccagtctccatacagcgcagcgccccaggtggtggcgggaagcggtaccgcgcggtgtatgactacagcgccgccgacgaggacgaggtctccttccaggacggggacaccatcgtcaacgtgcagcagatcgacgacggctggatgtacgggacggtggagcgcaccggcgacacggggatgctgccggccaactacgtggaggccatctgaacccgcagcgcccccatctgtcttcagcacattccacggcatcgcatccgtcctgggcgtgacccgtccattcttcagtgtctctgttttttaaaacctgcgacagcttgtgattcctacccctcttccagcttcttttgccaactgaagccttcttctgccacttctgcgggctccctcctctggcaggcttcccccttgatcgacttcttggttttctctctggatggaacgggcatgggcctctctgggggaggcagggctggaatgggagacctgttggcctgtgggcctcacctgcccctctgttctctcccctcacatcctcctgcccagctcctcacatacccacacattccagggctggggtgagcctgactgccaggaccccaggtcaggggctccctacattccccagagtgggatccacttcttggttcctgggatggcgatggggactctgccgctgtgtagggaccagtgggatgggctctacctctctttctcaaagagggggctctgcccacctggggtctctctccctacctccctcctcaggggcaacaacaggagaatggggttcctgctgtggggcgaattcatcccctccccgcgcgttccttcgcacactgtgattttgccctcctgcccacgcagacctgcagcgggcaaagagctcccgaggaagcacagcttgggtcaggttcttgcctttcttaattttagggacagctaccggaaggaggggaacaaggagttctcttccgcagcccctttccccacgcccacccccagtctccagggacccttgcctgcctcctaggctggaagccatggtcccgaagtgtagggcaagggtgcctcaggaccttttggtcttcagcctccctcagcccccaggatctgggttaggtggccgctcctccctgctcctcatgggaagatgtctcagagccttccatgacctcccctccccagcccaatgccaagtggacttggagctgcacaaagtcagcagggaccactaaatctccaagacctggtgtgcggaggcaggagcatgtatgtctgcaggtgtctgacacgcaagtgtgtgagtgtgagtgtgagagatggggcgggggtgtgtctgtaggtgtctctgggcctgtgtgtgggtggggttatgtgagggtatgaagagctgtcttcccctgagagtttcctcagaacccacagtgagaggggagggctcctggggcagagaagttccttaggttttctttggaatgaaattcctccttccccccatctctgagtggaggaagcccaccaatctgccctttgcagtgtgcagggtggaaggtaagaggttggtgtggagttggggctgccatagggtctgcagcctgctggggctaagcggtggaggaaggctctgtcactccaggcatatgtttccccatctctgtctggggctacagaatagggtggcagaagtgtcaccctgtgggtgtctccctcgggggctcttcccctagacctccccctcacttacataaagctcccttgaagcaagaaagagggtcccagggctgcaaaactggaagcacagcctcggggatggggagggaaagacggtgctatatccagttcctgctctctgctcatgggtggctgtgacaaccctggcctcacttgattcatctctggttttcttgccaccctctgggagtccccatcccattttcatcctgagcccaaccaggccctgccattggcctcttgtcccttggcacacttgtacccacaggtgaggggcaggacctgaaggtattggcctgttcaacaatcagtcatcatgggtgtttttgtcaactgcttgttaattgatttggggatgtttgccccgaatgagaggttgaggaaaagactgtgggtggggaggccctgcctgacccatcccttttcctttctggccccagcctaggtggaggcaagtggaatatcttatattgggcgatttgggggctcggggaggcagagaatctcttgggagtcttgggtggcgctggtgcattctgtttcctcttgatctcaaagcacaatgtggatttggggaccaaaggtcagggacacatccccttagaggacctgagtttgggagagtggtgagtggaagggaggagcagcaagaagcagcctgttttcactcagcttaattctccttcccagataaggcaagccagtcatggaatcttgctgcaggccctccctctactcttcctgtcctaaaaataggggccgttttcttacacacccccagagagaggagggactgtcacactggtgctgagtgaccgggggctgctgggcgtctgttctttaccaaaaccatccatccctagaagagcacagagccctgaggggctgggctgggctgggctgagcccctggtcttctctacagttcacagaggtctttcagctcatttaatcccaggaaagaggcatcaaagctagaatgtgaatataacttttgtggaccaatactaagaataacaagaagcccagtggtgaggaaagtgcgttctcccagcactgcctcctgttttctccctctcatgtccctccagggaaaatgactttattgcttaatttctgcctttcccccctcacacatgcacttttgggcctttttttatagctggaaaaaacaaaataccaccctacaaacctgtatttaaaaagaaacagaaatgaccacgtgaaatttgcctctgtccaaacatttcatccgtgtgtatgtgtatgtgtgtgagtgtgtgaagccgccagttcatctttttatatggggttgttgtctcattttggtctgttttggtcccctccctcgtgggcttgtgctcgggatcaaacctttctggcctgttatgattctgaacatttgacttgaaccacaagtgaatctttctcctggtgactcaaataaaagtataatttttacctgcgaaaaaaaaaaacacaacaaaccaaaacacaaccaaaaaaaaaagaaacacacgnaaacnacacacacacaaaacgcgggcgagctgcccaacaacagaccccaccggacgagtggacccagacctgatgcccgacccaactacgtcgcaccagagggtgcccaatagatgcgagcgcaatacaacgcgagccgctcgagctacataaccgcggtgcgaggacaaaccgcacccgcggacctcagccgccaaccaacccgttggcggcgcaacatgcaccaacacaccgcacgattagcgacaggactcatcacaacggagatagaggaaccagacacaatacgtgcgcaacgaccagacgataacaatc

SEQ ID NO: 339246 - DNA, 3892 bp, Homo sapiens
aattaggctaggtacgaggctggtgttgaatcggcaccgaggccagctccagccgccgtcgctgctgcctgtgtagttgcagccgcggccgcctcccgccagctcgcctcggggaacaggacgcgcgtgagctcaggcgtccccgccccagcttttctcggaaccatgaaccccaactgcgcccggtgcggcaagatcgtgtatcccacggagaaggtgaactgtctggataagttctggcataaagcatgcttccattgcgagacctgcaagatgacactgaacatgaagaactacaagggctacgagaagaagccctactgcaacgcacactaccccaagcagtccttcaccatggtggcggacaccccggaaaaccttcgcctcaagcaacagagtgagctccagagtcaggtgcgctacaaggaggagtttgagaagaacaagggcaaaggtttcagcgtagtggcagacacgcccgagctccagagaatcaagaagacccaggaccagatcagtaacataaaataccatgaggagtttgagaagagccgcatgggccctagcgggggcgagggcatggagccagagcgtcgggattcgcaggacggcagcagctaccggcggcccctggagcagcagcagcctcaccacatcccgaccagtgccccggtttaccagcagccccagcagcagccggtggcccagtcctatggtggctacaaggagcctgcagccccagtctccatacagcgcagcgccccaggtggtggcgggaagcggtaccgcgcggtgtatgactacagcgccgccgacgaggacgaggtctccttccaggacggggacaccatcgtcaacgtgcagcagatcgacgacggctggatgtacgggacggtggagcgcaccggcgacacggggatgctgccggccaactacgtggaggccatctgaacccgcagcgcccccatctgtcttcagcacattccacggcatcgcatccgtcctgggcgtgacccgtccattcttcagtgtctctgttttttaaaacctgcgacagcttgtgattcctacccctcttccagcttcttttgccaactgaagccttcttctgccacttctgcgggctccctcctctggcaggcttcccccttgatcgacttcttggttttctctctggatggaacgggcatgggcctctctgggggaggcagggctggaatgggagacctgttggcctgtgggcctcacctgcccctctgttctctcccctcacatcctcctgcccagctcctcacatacccacacattccagggctggggtgagcctgactgccaggaccccaggtcaggggctccctacattccccagagtgggatccacttcttggttcctgggatggcgatggggactctgccgctgtgtagggaccagtgggatgggctctacctctctttctcaaagagggggctctgcccacctggggtctctctccctacctccctcctcaggggcaacaacaggagaatggggttcctgctgtggggcgaattcatcccctccccgcgcgttccttcgcacactgtgattttgccctcctgcccacgcagacctgcagcgggcaaagagctcccgaggaagcacagcttgggtcaggttcttgcctttcttaattttagggacagctaccggaaggaggggaacaaggagttctcttccgcagcccctttccccacgcccacccccagtctccagggacccttgcctgcctcctaggctggaagccatggtcccgaagtgtagggcaagggtgcctcaggaccttttggtcttcagcctccctcagcccccaggatctgggttaggtggccgctcctccctgctcctcatgggaagatgtctcagagccttccatgacctcccctccccagcccaatgccaagtggacttggagctgcacaaagtcagcagggaccactaaatctccaagacctggtgtgcggaggcaggagcatgtatgtctgcaggtgtctgacacgcaagtgtgtgagtgtgagtgtgagagatggggcgggggtgtgtctgtaggtgtctctgggcctgtgtgtgggtggggttatgtgagggtatgaagagctgtcttcccctgagagtttcctcagaacccacagtgagaggggagggctcctggggcagagaagttccttaggttttctttggaatgaaattcctccttccccccatctctgagtggaggaagcccaccaatctgccctttgcagtgtgcagggtggaaggtaagaggttggtgtggagttggggctgccatagggtctgcagcctgctggggctaagcggtggaggaaggctctgtcactccaggcatatgtttccccatctctgtctggggctacagaatagggtggcagaagtgtcaccctgtgggtgtctccctcgggggctcttcccctagacctccccctcacttacataaagctcccttgaagcaagaaagagggtcccagggctgcaaaactggaagcacagcctcggggatggggagggaaagacggtgctatatccagttcctgctctctgctcatgggtggctgtgacaaccctggcctcacttgattcatctctggttttcttgccaccctctgggagtccccatcccattttcatcctgagcccaaccaggccctgccattggcctcttgtcccttggcacacttgtacccacaggtgaggggcaggacctgaaggtattggcctgttcaacaatcagtcatcatgggtgtttttgtcaactgcttgttaattgatttggggatgtttgccccgaatgagaggttgaggaaaagactgtgggtggggaggccctgcctgacccatcccttttcctttctggccccagcctaggtggaggcaagtggaatatcttatattgggcgatttgggggctcggggaggcagagaatctcttgggagtcttgggtggcgctggtgcattctgtttcctcttgatctcaaagcacaatgtggatttggggaccaaaggtcagggacacatccccttagaggacctgagtttgggagagtggtgagtggaagggaggagcagcaagaagcagcctgttttcactcagcttaattctccttcccagataaggcaagccagtcatggaatcttgctgcaggccctccctctactcttcctgtcctaaaaataggggccgttttcttacacacccccagagagaggagggactgtcacactggtgctgagtgaccgggggctgctgggcgtctgttctttaccaaaaccatccatccctagaagagcacagagccctgaggggctgggctgggctgggctgagcccctggtcttctctacagttcacagaggtctttcagctcatttaatcccaggaaagaggcatcaaagctagaatgtgaatataacttttgtggaccaatactaagaataacaagaagcccagtggtgaggaaagtgcgttctcccagcactgcctcctgttttctccctctcatgtccctccagggaaaatgactttattgcttaatttctgcctttcccccctcacacatgcacttttgggcctttttttatagctggaaaaaacaaaataccaccctacaaacctgtatttaaaaagaaacagaaatgaccacgtgaaatttgcctctgtccaaacatttcatccgtgtgtatgtgtatgtgtgtgagtgtgtgaagccgccagttcatctttttatatggggttgttgtctcattttggtctgttttggtcccctcttcaggtcaaatgttcagaatcataacaggccagaaaggtttgatcccgagcacaagcccacgaggtcgacg

SEQ ID NO: 339247 - DNA, 3589 bp, Homo sapiens
aattaggctaggtacgaggctggtgttgaatcggcaccgaggccagctccagccgccgtcgctgctgcctgtgtagttgcagccgcggccgcctcccgccagctcgcctcggggaacaggacgcgcgtgagctcaggcgtccccgccccagcttttctcggaaccatgaaccccaactgcgcccggtgcggcaagatcgtgtatcccacggagaaggtgaactgtctggataagttctggcataaagcatgcttccattgcgagacctgcaagatgacactgaacatgaagaactacaagggctacgagaagaagccctactgcaacgcacactaccccaagcagtccttcaccatggtggcggacaccccggaaaaccttcgcctcaagcaacagagtgagctccagagtcaggtgcgctacaaggaggagtttgagaagaacaagggcaaaggtttcagcgtagtggcagacacgcccgagctccagagaatcaagaagacccaggaccagatcagtaacataaaataccatgaggagtttgagaagagccgcatgggccctagcgggggcgagggcatggagccagagcgtcgggattcgcaggacggcagcagctaccggcggcccctggagcagcagcagcctcaccacatcccgaccagtgccccggtttaccagcagccccagcagcagccggtggcccagtcctatggtggctacaaggagcctgcagccccagtctccatacagcgcagcgccccaggtggtggcgggaagcggtaccgcgcggtgtatgactacagcgccgccgacgaggacgaggtctccttccaggacggggacaccatcgtcaacgtgcagcagatcgacgacggctggatgtacgggacggtggagcgcaccggcgacacggggatgctgccggccaactacgtggaggccatctgaacccgcagcgcccccatctgtcttcagcacattccacggcatcgcatccgtcctgggcgtgacccgtccattcttcagtgtctctgttttttaaaacctgcgacagcttgtgattcctacccctcttccagcttcttttgccaactgaagccttcttctgccacttctgcgggctccctcctctggcaggcttcccccttgatcgacttcttggttttctctctggatggaacgggcatgggcctctctgggggaggcagggctggaatgggagacctgttggcctgtgggcctcacctgcccctctgttctctcccctcacatcctcctgcccagctcctcacatacccacacattccagggctggggtgagcctgactgccaggaccccaggtcaggggctccctacattccccagagtgggatccacttcttggttcctgggatggcgatggggactctgccgctgtgtagggaccagtgggatgggctctacctctctttctcaaagagggggctctgcccacctggggtctctctccctacctccctcctcaggggcaacaacaggagaatggggttcctgctgtggggcgaattcatcccctccccgcgcgttccttcgcacactgtgattttgccctcctgcccacgcagacctgcagcgggcaaagagctcccgaggaagcacagcttgggtcaggttcttgcctttcttaattttagggacagctaccggaaggaggggaacaaggagttctcttccgcagcccctttccccacgcccacccccagtctccagggacccttgcctgcctcctaggctggaagccatggtcccgaagtgtagggcaagggtgcctcaggaccttttggtcttcagcctccctcagcccccaggatctgggttaggtggccgctcctccctgctcctcatgggaagatgtctcagagccttccatgacctcccctccccagcccaatgccaagtggacttggagctgcacaaagtcagcagggaccactaaatctccaagacctggtgtgcggaggcaggagcatgtatgtctgcaggtgtctgacacgcaagtgtgtgagtgtgagtgtgagagatggggcgggggtgtgtctgtaggtgtctctgggcctgtgtgtgggtggggttatgtgagggtatgaagagctgtcttcccctgagagtttcctcagaacccacagtgagaggggagggctcctggggcagagaagttccttaggttttctttggaatgaaattcctccttccccccatctctgagtggaggaagcccaccaatctgccctttgcagtgtgcagggtggaaggtaagaggttggtgtggagttggggctgccatagggtctgcagcctgctggggctaagcggtggaggaaggctctgtcactccaggcatatgtttccccatctctgtctggggctacagaatagggtggcagaagtgtcaccctgtgggtgtctccctcgggggctcttcccctagacctccccctcacttacataaagctcccttgaagcaagaaagagggtcccagggctgcaaaactggaagcacagcctcggggatggggagggaaagacggtgctatatccagttcctgctctctgctcatgggtggctgtgacaaccctggcctcacttgattcatctctggttttcttgccaccctctgggagtccccatcccattttcatcctgagcccaaccaggccctgccattggcctcttgtcccttggcacacttgtacccacaggtgaggggcaggacctgaaggtattggcctgttcaacaatcagtcatcatgggtgtttttgtcaactgcttgttaattgatttggggatgtttgccccgaatgagaggttgaggaaaagactgtgggtggggaggccctgcctgacccatcccttttcctttctggccccagcctaggtggaggcaagtggaatatcttatattgggcgatttgggggctcggggaggcagagaatctcttgggagtcttgggtggcgctggtgcattctgtttcctcttgatctcaaagcacaatgtggatttggggaccaaaggtcagggacacatccccttagaggacctgagtttgggagagtggtgagtggaagggaggagcagcaagaagcagcctgttttcactcagcttaattctccttcccagataaggcaagccagtcatggaatcttgctgcaggccctccctctactcttcctgtcctaaaaataggggccgttttcttacacacccccagagagaggagggactgtcacactggtgctgagtgaccgggggctgctgggcgtctgttctttaccaaaaccatccatccctagaagagcacagagccctgaggggctgggctgggctgggctgagcccctggtcttctctacagttcacagaggtctttcagctcatttaatcccaggaaagaggcatcaaagctagaatgtgaatataacttttgtggaccaatactaagaataacaagaagcccagtggtgaggagccagcatccccgctcccagacaactcccctcgcacgacatcagatcagactcccccgagccttacccaacctaatg

SEQ ID NO: 339248 - DNA, 4198 bp, Homo sapiens
  misc_feature (3883)..(3883): n is a, c, g, or t
  misc_feature (3888)..(3888): n is a, c, g, or t
aattaggctaggtacgaggctggtgttgaatcggcaccgaggccagctccagccgccgtcgctgctgcctgtgtagttgcagccgcggccgcctcccgccagctcgcctcggggaacaggacgcgcgtgagctcaggcgtccccgccccagcttttctcggaaccatgaaccccaactgcgcccggtgcggcaagatcgtgtatcccacggagaaggtgaactgtctggataagttctggcataaagcatgcttccattgcgagacctgcaagatgacactgaacatgaagaactacaagggctacgagaagaagccctactgcaacgcacactaccccaagcagtccttcaccatggtggcggacaccccggaaaaccttcgcctcaagcaacagagtgagctccagagtcaggtgcgctacaaggaggagtttgagaagaacaagggcaaaggtttcagcgtagtggcagacacgcccgagctccagagaatcaagaagacccaggaccagatcagtaacataaaataccatgaggagtttgagaagagccgcatgggccctagcgggggcgagggcatggagccagagcgtcgggattcgcaggacggcagcagctaccggcggcccctggagcagcagcagcctcaccacatcccgaccagtgccccggtttaccagcagccccagcagcagccggtggcccagtcctatggtggctacaaggagcctgcagccccagtctccatacagcgcagcgccccaggtggtggcgggaagcggtaccgcgcggtgtatgactacagcgccgccgacgaggacgaggtctccttccaggacggggacaccatcgtcaacgtgcagcagatcgacgacggctggatgtacgggacggtggagcgcaccggcgacacggggatgctgccggccaactacgtggaggccatctgaacccgcagcgcccccatctgtcttcagcacattccacggcatcgcatccgtcctgggcgtgacccgtccattcttcagtgtctctgttttttaaaacctgcgacagcttgtgattcctacccctcttccagcttcttttgccaactgaagccttcttctgccacttctgcgggctccctcctctggcaggcttcccccttgatcgacttcttggttttctctctggatggaacgggcatgggcctctctgggggaggcagggctggaatgggagacctgttggcctgtgggcctcacctgcccctctgttctctcccctcacatcctcctgcccagctcctcacatacccacacattccagggctggggtgagcctgactgccaggaccccaggtcaggggctccctacattccccagagtgggatccacttcttggttcctgggatggcgatggggactctgccgctgtgtagggaccagtgggatgggctctacctctctttctcaaagagggggctctgcccacctggggtctctctccctacctccctcctcaggggcaacaacaggagaatggggttcctgctgtggggcgaattcatcccctccccgcgcgttccttcgcacactgtgattttgccctcctgcccacgcagacctgcagcgggcaaagagctcccgaggaagcacagcttgggtcaggttcttgcctttcttaattttagggacagctaccggaaggaggggaacaaggagttctcttccgcagcccctttccccacgcccacccccagtctccagggacccttgcctgcctcctaggctggaagccatggtcccgaagtgtagggcaagggtgcctcaggaccttttggtcttcagcctccctcagcccccaggatctgggttaggtggccgctcctccctgctcctcatgggaagatgtctcagagccttccatgacctcccctccccagcccaatgccaagtggacttggagctgcacaaagtcagcagggaccactaaatctccaagacctggtgtgcggaggcaggagcatgtatgtctgcaggtgtctgacacgcaagtgtgtgagtgtgagtgtgagagatggggcgggggtgtgtctgtaggtgtctctgggcctgtgtgtgggtggggttatgtgagggtatgaagagctgtcttcccctgagagtttcctcagaacccacagtgagaggggagggctcctggggcagagaagttccttaggttttctttggaatgaaattcctccttccccccatctctgagtggaggaagcccaccaatctgccctttgcagtgtgcagggtggaaggtaagaggttggtgtggagttggggctgccatagggtctgcagcctgctggggctaagcggtggaggaaggctctgtcactccaggcatatgtttccccatctctgtctggggctacagaatagggtggcagaagtgtcaccctgtgggtgtctccctcgggggctcttcccctagacctccccctcacttacataaagctcccttgaagcaagaaagagggtcccagggctgcaaaactggaagcacagcctcggggatggggagggaaagacggtgctatatccagttcctgctctctgctcatgggtggctgtgacaaccctggcctcacttgattcatctctggttttcttgccaccctctgggagtccccatcccattttcatcctgagcccaaccaggccctgccattggcctcttgtcccttggcacacttgtacccacaggtgaggggcaggacctgaaggtattggcctgttcaacaatcagtcatcatgggtgtttttgtcaactgcttgttaattgatttggggatgtttgccccgaatgagaggttgaggaaaagactgtgggtggggaggccctgcctgacccatcccttttcctttctggccccagcctaggtggaggcaagtggaatatcttatattgggcgatttgggggctcggggaggcagagaatctcttgggagtcttgggtggcgctggtgcattctgtttcctcttgatctcaaagcacaatgtggatttggggaccaaaggtcagggacacatccccttagaggacctgagtttgggagagtggtgagtggaagggaggagcagcaagaagcagcctgttttcactcagcttaattctccttcccagataaggcaagccagtcatggaatcttgctgcaggccctccctctactcttcctgtcctaaaaataggggccgttttcttacacacccccagagagaggagggactgtcacactgctctacagttcacagaggtctttcagctcatttaatcccaggaaagaggcatcaaagctagaatgtgaatataacttttgtggaccaatactaagaataacaagaagcccagtggtgaggaaagtgcgttctcccagcactgcctcctgttttctccctctcatgtccctccagggaaaatgactttattgcttaatttctgcctttcccccctcacacatgcacttttgggcctttttttatagctggaaaaaacaaaataccaccctacaaacctgtatttaaaaagaaacagaaatgaccacgtgaaatttgcctctgtccaaacatttcatccgtgtgtatgtgtatgtgtgtgagtgtgtgaagccgccagttcatctttttatatggggttgttgtctcattttggtctgttttggtcccctccctcgtgggcttgtgctcgggatcaaacctttctggcctgttatgattctgaacatttgacttgaaccacaagtgaatctttctcctggtgactcaaataaaagtataatttttacctgcgaaaaaaaaaaacacaacaaaccaaaacacaaccaaaaaaaaaagaaacacacgnaaacnacacacacacaaaacgcgggcgagctgcccaacaacagaccccaccggacgagtggacccagacctgatgcccgacccaactacgtcgcaccagagggtgcccaatagatgcgagcgcaatacaacgcgagccgctcgagctacataaccgcggtgcgaggacaaaccgcacccgcggacctcagccgccaaccaacccgttggcggcgcaacatgcaccaacacaccgcacgattagcgacaggactcatcacaacggagatagaggaaccagacacaatacgtgcgcaacgaccagacgataacaatc

SEQ ID NO: 339249 - DNA, 3139 bp, Homo sapiens
aattaggctaggtacgaggctggtgttgaatcggcaccgaggccagctccagccgccgtcgctgctgcctgtgtagttgcagccgcggccgcctcccgccagctcgcctcggggaacaggacgcgcgtgagctcaggcgtccccgccccagcttttctcggaaccatgaaccccaactgcgcccggtgcggcaagatcgtgtatcccacggagaaggtgaactgtctggataagttctggcataaagcatgcttccattgcgagacctgcaagatgacactgaacatgaagaactacaagggctacgagaagaagccctactgcaacgcacactaccccaagcagtccttcaccatggtggcggacaccccggaaaaccttcgcctcaagcaacagagtgagctccagagtcaggtgcgctacaaggaggagtttgagaagaacaagggcaaaggtttcagcgtagtggcagacacgcccgagctccagagaatcaagaagacccaggaccagatcagtaacataaaataccatgaggagtttgagaagagccgcatgggccctagcgggggcgagggcatggagccagagcgtcgggattcgcaggacggcagcagctaccggcggcccctggagcagcagcagcctcaccacatcccgaccagtgccccggtttaccagcagccccagcagcagccggtggcccagtcctatggtggctacaaggagcctgcagccccagtctccatacagcgcagcgccccaggtggtggcgggaagcggtaccgcgcggtgtatgactacagcgccgccgacgaggacgaggtctccttccaggacggggacaccatcgtcaacgtgcagcagatcgacgacggctggatgtacgggacggtggagcgcaccggcgacacggggatgctgccggccaactacgtggaggccatctgaacccgcagcgcccccatctgtcttcagcacattccacggcatcgcatccgtcctgggcgtgacccgtccattcttcagtgtctctgttttttaaaacctgcgacagcttgtgattcctacccctcttccagcttcttttgccaactgaagccttcttctgccacttctgcgggctccctcctctggcaggcttcccccttgatcgacttcttggttttctctctggatggaacgggcatgggcctctctgggggaggcagggctggaatgggagacctgttggcctgtgggcctcacctgcccctctgttctctcccctcacatcctcctgcccagctcctcacatacccacacattccagggctggggtgagcctgactgccaggaccccaggtcaggggctccctacattccccagagtgggatccacttcttggttcctgggatggcgatggggactctgccgctgtgtagggaccagtgggatgggctctacctctctttctcaaagagggggctctgcccacctggggtctctctccctacctccctcctcaggggcaacaacaggagaatggggttcctgctgtggggcgaattcatcccctccccgcgcgttccttcgcacactgtgattttgccctcctgcccacgcagacctgcagcgggcaaagagctcccgaggaagcacagcttgggtcaggttcttgcctttcttaattttagggacagctaccggaaggaggggaacaaggagttctcttccgcagcccctttccccacgcccacccccagtctccagggacccttgcctgcctcctaggctggaagccatggtcccgaagtgtagggcaagggtgcctcaggaccttttggtcttcagcctccctcagcccccaggatctgggttaggtggccgctcctccctgctcctcatgggaagatgtctcagagccttccatgacctcccctccccagcccaatgccaagtggacttggagctgcacaaagtcagcagggaccactaaatctccaagacctggtgtgcggaggcaggagcatgtatgtctgcaggtgtctgacacgcaagtgtgtgagtgtgagtgtgagagatggggcgggggtgtgtctgtaggtgtctctgggcctgtgtgtgggtggggttatgtgagggtatgaagagctgtcttcccctgagagtttcctcagaacccacagtgagaggggagggctcctggggcagagaagttccttaggttttctttggaatgaaattcctccttccccccatctctgagtggaggaagcccaccaatctgccctttgcagtgtgcagggtggaaggtaagaggttggtgtggagttggggctgccatagggtctgcagcctgctggggctaagcggtggaggaaggctctgtcactccaggcatatgtttccccatctctgtctggggctacagaatagggtggcagaagtgtcaccctgtgggtgtctccctcgggggctcttcccctagacctccccctcacttacataaagctcccttgaagcaagaaagagggtcccagggctgcaaaactggaagcacagcctcggggatggggagggaaagacggtgctatatccagttcctgctctctgctcatgggtggctgtgacaaccctggcctcacttgattcatctctggttttcttgccaccctctgggagtccccatcccattttcatcctgagcccaaccaggccctgccattggcctcttgtcccttggcacacttgtacccacaggtgaggggcaggacctgaaggtattggcctgttcaacaatcagtcatcatgggtgtttttgtcaactgcttgttaattgatttggggatgtttgccccgaatgagaggttgaggaaaagactgtgggtggggaggccctgcctgacccatcccttttcctttctggccccagcctaggtggaggcaagtggaatatcttatattgggcgatttgggggctcggggaggcagagaatctcttgggagtcttgggtggcgctggtgcattctgtttccctcgtgggcttgtgctcgggatcaaacctttctggcctgttatgattctgaacatttgacttgaaccacaagtgaatctttctcctggtgactcaaataaaagtataatttttacctgcg

SEQ ID NO: 339250 - DNA, 2673 bp, Homo sapiens
aattaggctaggtacgaggctggtgttgaatcggcaccgaggccagctccagccgccgtcgctgctgcctgtgtagttgcagccgcggccgcctcccgccagctcgcctcggggaacaggacgcgcgtgagctcaggcgtccccgccccagcttttctcggaaccatgaaccccaactgcgcccggtgcggcaagatcgtgtatcccacggagaaggtgaactgtctggataagttctggcataaagcatgcttccattgcgagacctgcaagatgacactgaacatgaagaactacaagggctacgagaagaagccctactgcaacgcacactaccccaagcagtccttcaccatggtggcggacaccccggaaaaccttcgcctcaagcaacagagtgagctccagagtcaggtgcgctacaaggaggagtttgagaagaacaagggcaaaggtttcagcgtagtggcagacacgcccgagctccagagaatcaagaagacccaggaccagatcagtaacataaaataccatgaggagtttgagaagagccgcatgggccctagcgggggcgagggcatggagccagagcgtcgggattcgcaggacggcagcagctaccggcggcccctggagcagcagcagcctcaccacatcccgaccagtgccccggtttaccagcagccccagcagcagccggtggcccagtcctatggtggctacaaggagcctgcagccccagtctccatacagcgcagcgccccaggtggtggcgggaagcggtaccgcgcggtgtatgactacagcgccgccgacgaggacgaggtctccttccaggacggggacaccatcgtcaacgtgcagcagatcgacgacggctggatgtacgggacggtggagcgcaccggcgacacggggatgctgccggccaactacgtggaggccatctgaacccgcagcgcccccatctgtcttcagcacattccacggcatcgcatccgtcctgggcgtgacccgtccattcttcagtgtctctgttttttaaaacctgcgacagcttgtgattcctacccctcttccagcttcttttgccaactgaagccttcttctgccacttctgcgggctccctcctctggcaggcttcccccttgatcgacttcttggttttctctctggatggaacgggcatgggcctctctgggggaggcagggctggaatgggagacctgttggcctgtgggcctcacctgcccctctgttctctcccctcacatcctcctgcccagctcctcacatacccacacattccagggctggggtgagcctgactgccaggaccccaggtcaggggctccctacattccccagagtgggatccacttcttggttcctgggatggcgatggggactctgccgctgtgtagggaccagtgggatgggctctacctctctttctcaaagagggggctctgcccacctggggtctctctccctacctccctcctcaggggcaacaacaggagaatggggttcctgctgtggggcgaattcatcccctccccgcgcgttccttcgcacactgtgattttgccctcctgcccacgcagacctgcagcgggcaaagagctcccgaggaagcacagcttgggtcaggttcttgcctttcttaattttagggacagctaccggaaggaggggaacaaggagttctcttccgcagcccctttccccacgcccacccccagtctccagggacccttgcctgcctcctaggctggaagccatggtcccgaagtgtagggcaagggtgcctcaggaccttttggtcttcagcctccctcagcccccaggatctgggttaggtggccgctcctccctgctcctcatgggaagatgtctcagagccttccatgacctcccctccccagcccaatgccaagtggacttggagctgcacaaagtcagcagggaccactaaatctccaagacctggtgtgcggaggcaggagcatgtatgtctgcaggtgtctgacacgcaagtgtgtgagtgtgagtgtgagagatggggcgggggtgtgtctgtaggtgtctctgggcctgtgtgtgggtggggttatgtgagggtatgaagagctgtcttcccctgagagtttcctcagaacccacagtgagaggggagggctcctggggcagagaagttccttaggttttctttggaatgaaattcctccttccccccatctctgagtggaggaagcccaccaatctgccctttgcagtgtgcagggtggaaggtaagaggttggtgtggagttggggctgccatagggtctgcagcctgctggggctaagcggtggaggaaggctctgtcactccaggcatatgtttccccatctctgtctggggctacagaatagggtggcagaagtgtcaccctgtgggtgtctcctcttcctagactccctcattactaagtcctgagcagaagggtccgtgcaatgtagccagccgggtggggggagcggcttccggcggccgtctggggtggaaccggcctgtcactcggttgcccctggtccctcttttctggcccggcgtggtgtctggcttccggggggggtggcccggttgtcgttgtgcggggggccttcggtctggggcgcgggtgttg

SEQ ID NO: 339251 - DNA, 1428 bp, Homo sapiens
aattaggctaggtacgaggctggtgttgaatcggcaccgaggccagctccagccgccgtcgctgctgcctgtgtagttgcagccgcggccgcctcccgccagctcgcctcggggaacaggacgcgcgtgagctcaggcgtccccgccccagcttttctcggaaccatgaaccccaactgcgcccggtgcggcaagatcgtgtatcccacggagaaggtgaactgtctggataagttctggcataaagcatgcttccattgcgagacctgcaagatgacactgaacatgaagaactacaagggctacgagaagaagccctactgcaacgcacactaccccaagcagtccttcaccatggtggcggacaccccggaaaaccttcgcctcaagcaacagagtgagctccagagtcaggtgcgctacaaggaggagtttgagaagaacaagggcaaaggtttcagcgtagtggcagacacgcccgagctccagagaatcaagaagacccaggaccagatcagtaacataaaataccatgaggagtttgagaagagccgcatgggccctagcgggggcgagggcatggagccagagcgtcgggattcgcaggacggcagcagctaccggcggcccctggagcagcagcagcctcaccacatcccgaccagtgccccggtttaccagcagccccagcagcagccggtggcccagtcctatggtggctacaaggagcctgcagccccagtctccatacagcgcagcgccccaggtggtggcgggaagcggtaccgcgcggtgtatgactacagcgccgccgacgaggacgaggtctccttccaggacggggacaccatcgtcaacgtgcagcagatcgacgacggctggatgtacgggacggtggagcgcaccggcgacacggggatgctgccggccaactacgtggaggccatctgaacccgcagcgcccccatctgtcttcagcacattccacggcatcgcatccgtcctgggcgtgacccgtccattcttcagtgtctctgttttttaaaacctgcgacagcttgtgattcctacccctcttccagcttcttttgccaactgaagccttcttctgccacttctgcgggctccctcctctggcaggcttcccccttgatcgacttcttggttttctctctggatggaacgggcatgggcctctgtccaaacatttcatccgtgtgtatgtgtatgtgtgtgagtgtgtgaagccgccagttcatctttttatatggggttgttgtctcattttggtctgttttggtcccctccctcgtgggcttgtgctcgggatcaaacctttctggcctgttatgattctgaacatttgacttgaaccacaagtgaatctttctcctggtgactcaaataaaagtataatttttacctgcg

SEQ ID NO: 339252 - DNA, 1183 bp, Homo sapiens
aattaggctaggtacgaggctggtgttgaatcggcaccgaggccagctccagccgccgtcgctgctgcctgtgtagttgcagccgcggccgcctcccgccagctcgcctcggggaacaggacgcgcgtgagctcaggcgtccccgccccagcttttctcggaaccatgaaccccaactgcgcccggtgcggcaagatcgtgtatcccacggagaaggtgaactgtctggataagttctggcataaagcatgcttccattgcgagacctgcaagatgacactgaacatgaagaactacaagggctacgagaagaagccctactgcaacgcacactaccccaagcagtccttcaccatggtggcggacaccccggaaaaccttcgcctcaagcaacagagtgagctccagagtcaggtgcgctacaaggaggagtttgagaagaacaagggcaaaggtttcagcgtagtggcagacacgcccgagctccagagaatcaagaagacccaggaccagatcagtaacataaaataccatgaggagtttgagaagagccgcatgggccctagcgggggcgagggcatggagccagagcgtcgggattcgcaggacggcagcagctaccggcggcccctggagcagcagcagcctcaccacatcccgaccagtgccccggtttaccagcagccccagcagcagccggtggcccagtcctatggtggctacaaggagcctgcagccccagtctccatacagcgcagcgccccaggtggtggcgggaagcggtaccgcgcggtgtatgactacagcgccgccgacgaggacgaggtctccttccaggacggggacaccatcgtcaacgtgcagcagatcgacgacggctggatgtacgggacggtggagcgcaccggcgacacggggatgctgccggccaactacgtggaggccatctgaacccgcagcgcccccatctgtcttcagcacattccacggcatcgcatccgtcctgggcgtgacccgtccattcttcagtgtctctgttttttaaaacctgcgacagcttgtgattcctacttcagtgttcatttttatttttcttgaaagtaaagatactcctgtaaaaattgccattgttccattaggaaaaatatttaactcattaagttttaaaggacaggtggataac

SEQ ID NO: 339253 - DNA, 910 bp, Homo sapiens
aattaggctaggtacgaggctggtgttgaatcggcaccgaggccagctccagccgccgtcgctgctgcctgtgtagttgcagccgcggccgcctcccgccagctcgcctcggggaacaggacgcgcgtgagctcaggcgtccccgccccagcttttctcggaaccatgaaccccaactgcgcccggtgcggcaagatcgtgtatcccacggagaaggtgaactgtctggataagttctggcataaagcatgcttccattgcgagacctgcaagatgacactgaacatgaagaactacaagggctacgagaagaagccctactgcaacgcacactaccccaagcagtccttcaccatggtggcggacaccccggaaaaccttcgcctcaagcaacagagtgagctccagagtcaggtgcgctacaaggaggagtttgagaagaacaagggcaaaggtttcagcgtagtggcagacacgcccgagctccagagaatcaagaagacccaggaccagatcagtaacgtgagctcttgccctgccctgcggcatccctgctgccctctgtttggtccccttcctgccagcctggcagacgcaagcctggcagatgtgaatgaggccagtgcctccactacccctgccctccagggtgggcctggggaagagcttggggttcccagatgcctcttctctgtgtacccccagaccaccagcacgcatagcattttcttcttgaagggactgtattctgtgggggcctgtgtgctaaatcagcccccactctctctgactgttgttcttttttctggatatcgtgggtatcggtgaagactgcatgtctcatcttagcacaaaggtcaaaactgggggcggggagcacctgcctccctggtctgcgcctgggtgctga

SEQ ID NO: 339254 - DNA, 152 bp, Homo sapiens
tggagattctctgggccaagtttatggactgcaagccaggagcactgactcaaatggccccgaatatccatgctgtgattagctgcagttacaagtggcattttgttgttttgtttttgtttttttgagaaggggtctcactctgtcccggc

SEQ ID NO: 339255 - DNA, 185 bp, Homo sapiens
agcctgcgttcggtgacggggagatagggaacaggaagaaggagggagaggagatggctttctgctctccagatgctcgtcagccagtgagaagaagggtgaagggcacacctccagctgtgcctgggccaccctttcatggagctgtggccagttgctggccaggtaaacggcctgctcctccc

SEQ ID NO: 339256 - DNA, 292 bp, Homo sapiens
ttgtactggcaggggagttatgtgaagaaagaaggataccaaacagaagccacagggggactccattttcttttctttttgttccagttggggtgtgactcagtctggagtgcagtggtgtgatcatagctcgctacagcctcaaactcctggcctcacgagcatgatcctctcacctcagcctcctgagttgttgggattataggtacaagccatgcgcctagctcattatctttttaagttaaaaaaaaagtttttttgagacagagtgtcattctcttgcccaggctgg

SEQ ID NO: 339257 - DNA, 713 bp, Homo sapiens
tccactgcctatcccaaacctataagaataaatgataatcccaccaccctttgctgactcctttcttggattcagcccacttgcacccaagtgaataaacagccttgttgcttacactaagcctgctcaggtggtctcttatacggacacacatagtatttggtgctgaagacccgggacaggggaactccttcaggagactggtcccctgtcctcatgctacctctgtgaggagatccacctacgacctcaggtcatcagaccagccagcccaaggaccatttcaccaatttcaaatcggtaagcagttatttgcactcgggtaagcagtgtttttgctctctacctaacctctattgcctcccttcaatctctctcctttcaatttcagtttctctcccttcctggtagagacaaaaaggagacacactttatctgtgcattcaaaaactccgatgttggtcacggacttgggaagacagtcttcccttggtgtctgatcaccgtggggacacctgtcttgatcattcacccacattctcttggtggcaggtcaattatggggatgcctgctttggctgctcacccacattacagcccaggactcagtcagggatgcctacgggaagcctgtagttgccacctccatttctccgtgtctctaccttcctctttaaacttaccttctccactatgggcaacattctgccatc

SEQ ID NO: 339258 - DNA, 332 bp, Homo sapiens
tgtcaccttagtgggattcaaagaagctgaaatagacatgtgtttacccatcacgtttaaccagtgctttcagctctggcacctgctgctccggtcaccaaaccttccagcagccccctgacgacaccatctcctgtcctgacttctcagagttgtcttcttgggtgctagtccatgcctgctgaagtcctccagctcccaggagccatgttcccatgggtgcctttctgcacgtggctgcctcctctgagtcccggctgtggccccttccctgctggctcctgtgtggtgctgccagcctttgtcctgccctcgcccctttgcaggtagtg

SEQ ID NO: 339259 - DNA, 309 bp, Homo sapiens
aagacatcctactcagtggtctagtggttaggattcagcgctcccaccgccgcagcccgggttcgattcccggtcatggaaccaagaagtggagcaggacgagccgtggccaaaaatatcctactcagccctcctggcctgcttccagtaccagccccattgtaaaccaagttctcactgatttctcccctcttttaagttgtagcacttatggacaatagtgcttttttgtcacttgtcatttataatctgaaattcttttcctgtgaatgctcagatttaactagaaattaatgattacgcactgac

SEQ ID NO: 339260 - DNA, 256 bp, Homo sapiens
tgttcagttctgtctctctggagaactccaagtgctacaagtgcactttctgatttaattttttcaaacttacatgtttaaattacccatgagaaagactgttatcgtcacatccactttcctgaggaggaaacatgttcactagctccctagagtcacacacacaggtttaagctggatcagcctgactccaaagctagtgctctcattctcaacctgctgcatatgtgaaggcttcactgaaggcagacagtct

SEQ ID NO: 339261 - DNA, 588 bp, Homo sapiens
cagtatattcccgtcctacatagtgttaataacaacgaagtacactaaactaagaaagtaatcacacaaattttctgagaagcaatttctgctggcattcttcaccactgactacagctaaaggctgccacaggtctgacagtggcccctgcccactagatgccatcaggtcccccagtaactgtcagccacaaagtctccatacatttccaaattcctctcctccattaagaatcactgattatatattcattttaagaataacatttagaactttatattcccaaatctaaatttatcaaacataaatgagtcttaatataacaaaaggatacctgttatactttgtaaggggatttaagattccattaaataacagacatgctggcatttcaaagacaattcaacttaaattttcttttaacttctacccaacttctgaagcatgcagctattccacaaaacagtttatctatctagataggctactgtcctagagagttttagccagtacttatgggaagtcttctgttacttggagcacaacttttttacttagtaagactctgaagaatccttctactacca

SEQ ID NO: 339262 - DNA, 119 bp, Homo sapiens
tgtgaagctgcagccttcctaatcagtgacatgtttacaagaagttgagatatgcggaaaaagctggcagcagaaactttattcctaggtctgcataaaatcaaagtggcctggcagct

SEQ ID NO: 339263 - DNA, 216 bp, Homo sapiens
ccgaataaataaaatgagagtcaactgtctccctcaaagaaaaaaacctggaatttccctgacagggacaaaagtgggaacctcaaaacaaaaaatacaagaaatgtgcttctggctgttgtagagaacccatgtaatatagacaactaaggataagatggtctttcttctgaagccatagagcaactctgagaaatcaagtccagatactggctt

SEQ ID NO: 339264 - DNA, 215 bp, Homo sapiens
tcactttctttctaacaggcctcacgcttgttaattctactctgcaagcagcgagctttgtgttacataaatgatcacaattcagaatatataaatcataattcagaataagttatacattccctttaaatgaacttatgtaaatgtatttcacgtttgtacaaataagagaaaagtacggaaagatgctagccaaatttttaactaggaagggg

SEQ ID NO: 339265 - DNA, 307 bp, Homo sapiens
tgctgggattacaggtgtgagccactgtgcccggcccaatttttgtatttttagtagagatggggtttcaccatgttggccaggctggtctcgagctcctgacctcaagttatctgcccacctccacctcccagagtgctgggattacaagcatgagctaccatgccccatcctgctctctgcattttacagatgaggaaactgaggcacaaggaagccaaatgatggggtctctgggtcaccttgctagtaagtggtgagtggggaatgcaggctgtcctgccccagagtctgcccccctgactta

SEQ ID NO: 339266 - DNA, 270 bp, Homo sapiens
caatagagagtacaaaggtgaacaaatgaggacttctgagcagtggctgagacaagaagtgagagtttgccagaggatcccagatttgaagggaaggtaaaatgtcatatactgctatagaaggtactagcaaatgagttcatggctttaaagttcttggaactgtgcctggtatcttataagtactctttattacccacttttactttttaaatattcagctgttaatctttattttttaatttacctttgaggttcagggggtacatg

SEQ ID NO: 339267 - DNA, 321 bp, Homo sapiens
tcacccactagttgatgagtggtgctcagcaaatgaaactcttggttgtattaatatcagccttcacataatggcattagggaaaaaaataatacaaagttgattttttaaaaaataccaattgtagcactgcgttctgcctctgattgtgtagaaaatggagactccactgtcaggcccttggtccccttggaagacggtgctatctagtcttttcacagtccagcacgctcacactccagaacaaacactcacactccaacacaccctcacacacacactccaacacacacagatgctcgcactcacacacatcctccc

SEQ ID NO: 339268 - DNA, 304 bp, Homo sapiens
tctgcacaccgccggctcccccgacatgcagcttgcaccttcagtcactgtgcacaccgccagctcccccgacatgcagcccgcaccttcagtcactctgcacaccgccagctcccccgacatgcagcccgcaccttcagtcactctgcacaccgccagctcccccgacatgcagcccgcaccttcagtcactctgcacaccgccagctcccccgacatgcagcccgcaccttcagtcactctgcacaccgccagctcccccgacatgcagcccgcaccttcagtcactctccacaccgccagc

SEQ ID NO: 339269 - DNA, 1876 bp, Homo sapiens
tggctcagatctgcgtgggcgtgggcagaagcaaggatgctgacggcttcatccgcgtcagcagtggcaagaagcggggcctggtgccagtcgacgccctgactgagatctgagaggagccaagggaacccagatgacacccttgcccatgcctggaccttgcttctggccagggaggggatcaggcccccttgtccactccatacccttcctccctctgtccctctcctaggtgccacttaccgtggcttaggagccttttgtactggggaagattttatttcttgggtggggtgccctgagtgggttgatcctctgggacttggcggggatggggtggggtgggagggaatgaggaagctacaggtaggtccacccaacgcccaggcaccccagtctacttgctgggctgagtccagccctggggaagattcctggggaatttatttgctgcttctcccagccttcccctgcccacaccacctgcgcatgcctggcacaaccctctccccacagagcctctgcttgggtctatgtgtgtgtgaccgtgcatctgctcctttgcaagtggggtcttgggagcaggcctttttgtgtcctcggccctccacccttggtggggaggggacccaggaccataggaaggtcctgagtccacctcctggtctccacctctgtcattccgtcaattctcaggaaagttttgcaggaatctctcccgttacttgaaacctgggcggacagatgaggggaaggctgaggtccctggaaggtgtaacaaatcagagactatctgttcaagtagaaaacccaagagctggccaggtgtggtggctcatgcctgtaatcccagcactttgggaggctgaggtgggcagatcacctgaggtcaggagttcaagaccagcctggccaacatggtgaaaccccctctctactaaaagtacgaaacttagccaggcatgatgggggtctgcctgtaatgccagctactccagaggctgaggcaagagaatcacttgaacccgggaggcggaggtttcagtgagccgagattgcaccattgcaccccagcctgggcaacagagcgagactccgtctcaaaaaaaaaaaaagaaagaaagaaaaggaaacccaagagctgcctggacacacggaaacccaactgagaacaaaatcctggcccgtgcttggtcaaagcaaacccatttcactgtcaggacccccggtcacacaggaaccacccgccaggggagcctgtgactgtcagttcctgtcccaggctttgcccggccgccccaggaacccaaccctctgggctgacctttctcctgcttctctccaggctctgcaggggacagggcaggtgctgcaggagcccctttgctggctttatctgctcccttgttctggacacagagccctgggaaaaagagggggtggaagacagacaaggaaggtggaatgttctgttttggccaccaggaaatggggtggggtgggcatacacagagaggacccctctcttaatacagctgcttttctcggtgccaacctccctcccccaagctcagatcctcctcttatgcccttgattgtgccagcccatgccacccccatcctgggcacagttacaccctcccatgcagtgggagaaacacagaccctcgtacccaaaggcccctgccccacttctcccccacaaagcggggtctcaagccacactgccctgtttgctgccatgaggcccccccccccagcaatatcccaggggcgggcccaatgcccactgtacatgaggctgcatgatgggtctggggccttgctgattccccagacccctaattaaatgtttcttgtcccagcccatctgctc

SEQ ID NO: 339270 - DNA, 1548 bp, Homo sapiens
gcgctatctagaggatcccgttcgaggagactctacaggtaggtccacccaacgcccaggcaccccagtctacttgctgggctgagtccagccctggggaagattcctggggaatttatttgctgcttctcccagccttcccctgcccacaccacctgcgcatgcctggcacaaccctctccccacagagcctctgcttgggtctatgtgtgtgtgaccgtgcatctgctcctttgcaagtggggtcttgggagcaggcctttttgtgtcctcggccctccacccttggtggggaggggacccaggaccataggaaggtcctgagtccacctcctggtctccacctctgtcattccgtcaattctcaggaaagttttgcaggaatctctcccgttacttgaaacctgggcggacagatgaggggaaggctgaggtccctggaaggtgtaacaaatcagagactatctgttcaagtagaaaacccaagagctggccaggtgtggtggctcatgcctgtaatcccagcactttgggaggctgaggtgggcagatcacctgaggtcaggagttcaagaccagcctggccaacatggtgaaaccccctctctactaaaagtacgaaacttagccaggcatgatgggggtctgcctgtaatgccagctactccagaggctgaggcaagagaatcacttgaacccgggaggcggaggtttcagtgagccgagattgcaccattgcaccccagcctgggcaacagagcgagactccgtctcaaaaaaaaaaaaagaaagaaagaaaaggaaacccaagagctgcctggacacacggaaacccaactgagaacaaaatcctggcccgtgcttggtcaaagcaaacccatttcactgtcaggacccccggtcacacaggaaccacccgccaggggagcctgtgactgtcagttcctgtcccaggctttgcccggccgccccaggaacccaaccctctgggctgacctttctcctgcttctctccaggctctgcaggggacagggcaggtgctgcaggagcccctttgctggctttatctgctcccttgttctggacacagagccctgggaaaaagagggggtggaagacagacaaggaaggtggaatgttctgttttggccaccaggaaatggggtggggtgggcatacacagagaggacccctctcttaatacagctgcttttctcggtgccaacctccctcccccaagctcagatcctcctcttatgcccttgattgtgccagcccatgccacccccatcctgggcacagttacaccctcccatgcagtgggagaaacacagaccctcgtacccaaaggcccctgccccacttctcccccacaaagcggggtctcaagccacactgccctgtttgctgccatgaggcccccccccccagcaatatcccaggggcgggcccaatgcccactgtacatgaggctgcatgatgggtctggggccttgctgattccccagacccctaattaaatgtttcttgtcccagcccatctgctc

SEQ ID NO: 339271 - DNA, 103 bp, Homo sapiens
atatgtgtttaattttctgaaataaattgagtttttagaaaatgatgaattacaatattatatgtaaatatgagaaatgtggtgttttttgtttgtttgcttg

SEQ ID NO: 339272 - DNA, 442 bp, Homo sapiens
catggcttcaaatactaattgtaggtatctattatatacagcctaaatctttctaagtaccagactagagtggcctaatggtcaatgtcatatgaacttggttttaaaacaaggcttgaaatgaattctccaactctagtttttctcaactctcgctgaaaggccatccactcttaccaaagttatagatacacacagatttgtgtgagtgtgtgtgtgtgtgtatctcaatttttagacagtatgctatagaatttgaggattcaaatacaaagaatctttaagataatgtcagtattagcagatgagacacatttaaaaataatgaaaaaggtgattaaacaaggtatctaatagctaatggtgaaatgtactgctgtaacaattctggattttatacagggtaatatatgaagaaaatgaggtactccggtcaaataaa

SEQ ID NO: 339273 - DNA, 273 bp, Homo sapiens
tgttctgaaagataaaccagactttgtggtttatgataagccaaagatatggtctgtaataaatagtgttgctagacagacactgtacggagcgcatcattgaggttgagtctccatctttaggagcttggcatcaacgacaaagaacgtgagcacgtaggaagatacgggagatgtactgacggtgaaatactaagacgctgactaatatgtgtgtctctttaacaggacttcactcacataattttgaatttattccatgagccaagacac

SEQ ID NO: 339274 - DNA, 312 bp, Homo sapiens
gctcccccttcatctatttagccacttatccatcagcaagcaattgttgcacgtctggcacgtgccaggcactgagcactggagattcagagacaacaacatagactctgcctggaaaatatccgcggggtagttcaagacagccatggaagccagcagtcatagcaaggactggtaagggtacagctaggcatagacaccacggggtcacagagaaggggcatggagggtaggccaggaggacaacagaaggcgttctgagctgactcagagaaatgggctaaccatgagaaggaagaagccatgtgaagg

SEQ ID NO: 339275 - DNA, 1073 bp, Homo sapiens
ctcactctcctggaaacccaccgagaacctccaccctctgacaccatggtcaactcctgttgtggctctgtgtgctctgaccagggctgtggcctggagaactgctgccgccccagctgctgccagaccacctgctgcaggaccacctgctgccgccccagctgctgtgtgtccagctgctgcaggccccagtgctgccagtctgtgtgctgtcagcccacctgctgccgccccagctgctgtcagaccacctgctgtaggaccacctgctgccgccccagctgctgtgtgtccagctgctgcagaccccagtgctgccagtctgtgtgctgccagcccacctgctgccgccccagctgctgtcagaccacctgctgcaggaccacttgctgccgccccagctgctgtgtgtccagctgctgcagaccccagtgctgccagtctgtgtgctgccagcccacctgctgccgccccagctgctgcatctccagcagctgctgcccctcttgctgtgaatccagctgctgccgcccctgctgctgcctgcgtccagtctgtggccgagtctcctgccacaccacttgctatcgcccaacctgtgtcatctccacctgcccccgccccttgtgctgtgcctcctcttgctgctaaatctctgctgtgaacacaccacttccttattacgtcctttcctacagatgaaggctctcattgcaaacatgcggactgttcaagagaattgatctgggtcccataagcaaacctcatccttagaaattctgtatttgcattctaccttttgtccaaactcccttccttccaaaggaattcattgacaatctcctaataaattgacaaattgtcctccaacatcctcccacctctttgacttcaggacatttattcatcatgcctaaggaatttgaagattgcctccatcatttgtagggccacagatcttaaagcctccaaccttgaagtccagtgaagtctctctcttaaagtcttttgcaaacatttttgtaccttgttatttccatgtaccaaaataaacctctattctattggcactg

SEQ ID NO: 339276 - DNA, 1090 bp, Homo sapiens
tgtcaccaccgcgggtcacctgggagtcctgtgagtgcaccgccggggtcacctgggagccccgcgtgtcaccgccgcggtcgtcggggagccccggggctcaccaacgaggtcacctgggagccccgcgggtcaccgccgcggtcacctggaagtgtcacctgtgtcactaggtcacctagtgtatcacacaggtcacctagaaattcgtgtcaccgccaaggtcacctagaaattcgtgtcaccgccgaggtcccctgggagccccgcgggtgccgcacaagtgcccccgcccttccccccggttccgggtctccacgccctcctggtttgcgggcagccgcgaagccgcgagtggaccgagcgagtgcagctgcctccgcggggccgcgcctggccgccgcctccctttacctccggccgccccgtggcaggtgtagaagctgcagaggccgcagcagcccagcgcgccccttccgtgtggccgcatgccacccgcgccgcgcccaggtaagcaggtccgtgggtcgctgggtccatgcgtgggtccgtggctggccggggatggaccagcccctccccgcaggggcatcgcctgcccaaggacgcaggacccagtgagggaagcgcgcgctgcaggcacggggctctccaccctcgccatggttggcaccaagccacactgtgcactcgacacacgcagcgtcctggctgccacctgcagattccagctcgtgtctatgcagggccatggccgccatcacagggccatatgcaagaaactctctgagctctcctcgcccaaaaccgcagctatccttttgtggtttggtattataggtaacatgcccttccttaaagaaacagtatttcaggcctgtagtcccagctactccggaggccgaggcagaagctgaggcagaagcaggaggatcatttgagcccagaagtttgagcctgggcaatgtagcaagacccccccccccaacctcattccccaatcagttaaaagagagagagagagagagagaattccagcaggaagaagtacacatttccacgaatggtttgggaattcaagcatcatatg

SEQ ID NO: 339277 - DNA, 618 bp, Homo sapiens
tgtgaagatggagtgacattgagagaactgcagaagaaagggacttggcatttatggagcatacacctgtaccatcatatcaaaatgcaacacagctattgcctcttggaacattataatagaatggggaaatcaagtatataaagaggtaaatagcatctagggtcatgagtcctataccagagatatgcacaggagcttgtttaatgattatagcaaccaggtaacagactttttactaaatttccaactctctgatgagaaaactgcgactctgagagtccaagtaaccagctcccaggtcatgcaatcaatacattgagggagcaggcgttgaactcttgtcactgactccaaagccctctttgtactttacccagctgcccgcagcttctatgagagtgtctgcaggcacgccggctggagggggtaggaataatattatttcatttatgttttatttatgtggtggtgtgatatttatctagcagctttcatctgggaaatgtgaagtgttttataaacaggttcttatttttttctccctccccttccactcctccacctgagtacttaagaaccaaagaggtttccagagaagaccaaggtcacaagggt

SEQ ID NO: 339278 - DNA, 403 bp, Homo sapiens
aaaaaggaaaaacaaatgctttgcagaagccaagaaggaagtgaagggaaataaatgagagtggaaaaacgagagatcaattgtggtgagatatgctttttttggcaattaattgcaacaagtgcccaaaatgccaattataacatagtttgctatctaccattgctttatttaactgaagtattcaaccatagatatggaaaaaagactgacctagtttagaaaagttctatcctgatacatttaagcactagagagtatacacaaataaaaacacaaacttaacttttcttaaaaacttttactgagtcaaatattaaaagagaacacttgttggtaaagcatctcatgaagttgatttttgatttttcagtccttcagtaactaataatctttattttga

SEQ ID NO: 339279 - DNA, 379 bp, Homo sapiens
gaagcggcccgcgcttaagtacacggagacacctttcaaagtctttgccatcaggcagaaacggttcaaacctctcacttcctaatccccaccccatttttccaagcaatgtgactcaggccaggagcaagagaaagcacctcaggtatgagtatgcactcacctacatgagcgttttggtggatatcccgaggattcatgacagcctctagcaagaatgaatgaaaacagagatgtgagcttcctttacatttatgtcccttccctgcaacccaaacactttgctgttgtccttctgggctctgagcaggaccaacaaattggatctcttaatagttacttgatatggggagtctagatcgaccgcatagcaggcgca

SEQ ID NO: 339280 - DNA, 386 bp, Homo sapiens
cctatagagcgatccccgcgtcaaagtacacggagacacctttcaaagtctttgccatcaggcagaaacggttcaaacctctcacttcctaatccccaccccatttttccaagcaatgtgactcaggccaggagcaagagaaagcacctcaggtatgagtatgcactcacctacatgagcgttttggtggatatcccgaggattcatgacagcctctagcaagaatgaatgaaaacagagatgtgagcttcctttacatttatgtcccttccctgcaacccaaacactttgctgttgtccttctgggctctgagcaggaccaacaaattggatctcttaatagttacttgatatggggagtctagatcgaccgcatagcaggcgca

SEQ ID NO: 339281 - DNA, 241 bp, Homo sapiens
tctgatgtattttagcacagccatgcttcaagatggtggaacttaccctcctgtcttcccagactgatttctgttcctgccctgggtacttcttgtctcctctgaatgggtacgggagtgtggacctcagggaggcccccttggtatgctcctccgctttcattcggggatctcagacctaatttcagctttgcccaatgtgaaagcatttccagagcaaggtgacttcttcaggaatttt

SEQ ID NO: 339282 - DNA, 137 bp, Homo sapiens
ctggactcttcatcagtggtgtttgctaataaagttatctctgatctgttacttgagaggatgagttgggagttaactagggaagagagaagaagatggttccaggaatctgcagctcacagagtaagggagggtgg

SEQ ID NO: 339283 - DNA, 1096 bp, Homo sapiens
tcagcatgagtcagcggcaaacaccctcaagtcatgagctggaacgctcagaaacggttcactgagttttttttctcctattattttcaaatttattagttttacttaattatttttaaagtatctgagaaaatgttatagattttaagcgtgtttttattataacttcatgtcaataatttctccacagatatgtaccttcaatcaaattacagaattaactaggggaaaatgaggaagaactttaggtacagacagcgagagatcttcaaaatactattaaaagaagaaagcactctcggtgtaaaaaaggtaggaaaatagagtatctgtgttgctatataataacatatttgtgtttgttaataatatagatatttgtgtctgcataaagagacactggaaagatcaacaagaaaaaatgtggcccttcacctttgggacagtagcactgagtggacgctgagtggacgcagacaggagtggaggggatttcctagcacgttttttggagggttttcttgggaggggactacatactttattcaaaacattaatcataaaaagtaaacacaacagaaatcaccttacaactcttcaaatacacccattttgcacagacataatttcataagcatgttagtttcaagagctcattgacaacagcttaggacttgatgaaaacatgtcacgcaaaaaaatacaccataagtaactgctgattaccagctatgcaacactgaactatcatttaacacttgacaaatcactagccacggctgttttgaactccaacttaatttccttaacactggctcacatagctcaaaaaacaactccatcaaaatacacgtgaatcacattttaatccttaaatgcatgagcttttaaaagtgagcagttacacttcagcaatatttaaaaccggtcctttcgattttataactgaaataaaggaacgggctaagaagtcagtgccaagggtttaagagcatctctgcaaggcgctcagcctcccggggaacttgattagaatttccatctcccatacaatgagtattccccatatgctcatggcagataaactacatgtatc

SEQ ID NO: 339284 - DNA, 302 bp, Homo sapiens
aggcaggggatgcaacatgcaatggaagttgcattcctattactcaacctactctgcgttcaaaactccctgttcagtcagcaaatattattaaagtgcccactacgttccagatactctcttaggtactagggatatggaagtgaataaaacacacaatttcatcccttcatgagtaaaacatgtggtatgttaaatagtgataaatgggcagggtgtagtggttcacgcctgtaatcccagcactttgagagacatgcagatcacttgagcccaggaattcaagaccaacttggccaaca

SEQ ID NO: 339285 - DNA, 481 bp, Homo sapiens
tcacatttaaaattagaatagtccctgtcccacttaaaaataagatgaaaaaagcttttaaaaacttctttataattgacagagaaaaaagcagacaagaaaaagaacaaaaaataggatgaaaaatcacttctctttgtgccacggaaaaaaatatcacaagcttgtttgtgtttggcatccagtttatagcttggcaatctgagtctatgaacttaagccttcatggatgagtgcaccaattggcttttgaattacaggatagcattactcaattaactttaagactagccctttcaagcaatatagttagctgtggcacacaatatttcagttctaaaatgagaatgtcaactgtgaagctaaatttacaatttcagttgtttctctatcagccccctcccacacttactacaaatctgaataatacgactacaagaagcatttaaataaaaatgtgtgcattctaggcttattggca

SEQ ID NO: 339286 - DNA, 469 bp, Homo sapiens
ccagcagccctcgcgcggtccggcacagcggacaccaggactccaaaatggcgtcagttggtgagtgtccggccccagtaccagtgaaggacaagaaacttctggaggtcaaactgggggagctgccaagctggatcttgatgcgggacttcagtcctagtggcattttcggagcgtttcaaagaggttactaccggtactacaacaagtacatcaatgtgaagaaggggagcatctcggggattaccatggtgctggcatgctacgtgctctttagctactccttttcctacaagcatctcaagcacgagcggctccgcaaataccactgaagaggacacactctgcacccccccaccccacgaccttggcccgagcccctccgtgaggaacacaatctcaatcgttgctgaatcctttcatatcctaataggaattaacctccaaataaaacatgactggtacgtgt

SEQ ID NO: 339287 - DNA, 181 bp, Homo sapiens
  misc_feature (30)..(30): n is a, c, g, or t
gcggccgcctactactactatacggctgtntagaagacgacagaaggggacacactctgcacccccccaccccacgaccttggcccgagcccctccgtgaggaacacaatctcaatcgttgctgaatcctttcatatcctaataggaattaacctccaaataaaacatgactggtacgtgt

SEQ ID NO: 339288 - DNA, 920 bp, Homo sapiens
ctttcctgtccgccacgttactgcttttttcgagacccttttctggagttactcccagcaagctgttactcagacgtcctgttggttaataaagctgtccctgcagcagttctgctattgtatagactcagtcttaaaatagtgggcttgatgtgacatatttcttcataatattgtgtatgtgcagcctctgtgtaattgcattatgcacctttattgcatagttgaagcagtggcaggaaaggatgccatatgtgttactgggagattattcagtgggtattttttctcactcttccgtttcagttaccagtgaaggacaagaaacttctggaggtcaaactgggggagctgccaagctggatcttgatgcgggacttcagtcctagtggcattttcggagcgtttcaaagaggttactaccggtactacaacaagtacatcaatgtgaagaaggggagcatctcggggattaccatggtgctggcatgctacgtgctctttagctactccttttcctacaagcatctcagtgagtgcctctgcggcgtcttgcctttagttcccatgagagggtggtggtgactgatttcattagatacagcagcccaccttcttctgaggctgagggacctttagttaaagttccttatgtttccacctaaaagaattggagggacctatcagagtacagtatgtgggatattgtttgaaatgagaaaattgtgacaaagagaacacaggaaaatcaagatgaagccagggtaaagagagtacttagaagcattctttaaaatacagcacactgtgaaaatttggctcgattttcctagtagccaatgcagaaagagaaatgagttgagtgggataatctggtaccccagaaaagcatggctgttccggctctgaggcttgagagg

SEQ ID NO: 339289 - DNA, 368 bp, Homo sapiens
gcgtcgacggaaaatcaagatgaagccagggtaaagagagtacttagataggtccctccacttcttctgaggctgagggacctttagttaaagttccttatgtttccacctaaaagaattggagggacctatcagagtacagtatgtgggatattgtttgaaatgagaaaattgtgacaaagagaacacaggaaaatcaagatgaagccagggtaaagagagtacttagaagcattctttaaaatacagcacactgtgaaaatttggctcgattttcctagtagccaatgcagaaagagaaatgagttgagtgggataatctggtaccccagaaaagcatggctgttccggctctgaggcttgagagg

SEQ ID NO: 339290 - DNA, 541 bp, Homo sapiens
tgttgctgaggtgactctagattatccctcagtaagcggagcatcagtaacggagcatcagtaagcggagcgtcagtaagcggagcaacacaacatacccccagcaggcgtgactccgctcggaccaggactccaaaatggcgtcagttgtaccagtgaaggacaagaaacttctggaggtcaaactgggggagctgccaagctggatcttgatgcgggacttcagtcctagtggcattttcggagcgtttcaaagaggttactaccggtactacaacaagtacatcaatgtgaagaaggggagcatctcggggattaccatggtgctggcatgctacgtgctctttagctactccttttcctacaagcatctcaagcacgagcggctccgcaaataccactgaagaggacacactctgcacccccccaccccacgaccttggcccgagcccctccgtgaggaacacaatctcaatcgttgctgaatcctttcatatcctaataggaattaacctccaaataaaacatgactggtacgtgt

SEQ ID NO: 339291 - DNA, 1363 bp, Homo sapiens
tgttgctgaggtgactctagattatccctcagtaagcggagcatcagtaacggagcatcagtaagcggagcgtcagtaagcggagcaacacaacatacccccagcaggcgtgactccgctcggaccaggactccaaaatggcgtcagttgtaccagtgaaggacaagaaacttctggaggtcaaactgggggagctgccaagctggatcttgatgcgggacttcagtcctagtggcattttcggagcgtttcaaagaggtcagagccttgtggatgtctgtaaatgaaagcaaatctctgggtcttcagatctcttttttgccatgaattaatttgggcaatgaaggccttgttgtctgaaagcagtaagttatgtagaggatgacagggagggatgctaggccttggacttctgtggttgattggccctttcaaaggctggctctgagatattacagccaagaacatgtttcctgttgcttggaatcagtatgtctgcctctgtcttagagaaatcctaagacttctttaagaggaaaatgaattggaaccgtagtgggcattagtctataatatgatgctctcctccctgccagaacttcaggacaaatatttgaaatggcctatcttggcctggtgtggtggcttatgcctgtaatcccggcacttcgggaggccaaggctggaggattgcttgagccgagtttagaccagcctaggcaatatggagagaccccatctctataaaaaaaaccacacaagaaaaattagctggctgtggtggtgcatgcctgtagtcccagctactcaggaggctataagctcacagccaaaggggagaggtggaatccaggtaggcctagttcaggagctggtatgtgcttatagttcaggctatggggatgagagaccttactggcatttgtgcttgtcatctttatcagccagtgaatgcagggcgaggggcttaaacagccagagcaggactaggtccctgaatgtcagccagactcaactgtgtgctcaacttcactcaaatgtgaagcccagcagggcagtgagcgcctcttgcgtttgcaggttactaccggtactacaacaagtacatcaatgtgaagaaggggagcatctcggggattaccatggtgctggcatgctacgtgctctttagctactccttttcctacaagcatctcaagcacgagcggctccgcaaataccactgaagaggacacactctgcacccccccaccccacgaccttggcccgagcccctccgtgaggaacacaatctcaatcgttgctgaatcctttcatatcctaataggaattaacctccaaataaaacatgactggtacgtgt

SEQ ID NO: 339292 - DNA, 335 bp, Homo sapiens
gtggcgttctagaggatcccgacagcacagaggaggtggacacaaagaggtcgttactaccggtactacaacaagtacatcaatgtgaagaaggggagcatctcggggattaccatggtgctggcatgctacgtgctctttagctactccttttcctacaagcatctcaagcacgagcggctccgcaaataccactgaagaggacacactctgcacccccccaccccacgaccttggcccgagcccctccgtgaggaacacaatctcaatcgttgctgaatcctttcatatcctaataggaattaacctccaaataaaacatgactggtacgtgt

SEQ ID NO: 339293 - DNA, 334 bp, Homo sapiens
ccagcagccctcgcgcggtccggcacagcggacaccaggactccaaaatggcgtcagttgtaccagtgaaggacaagaaacttctggaggtcaaactgggggagctgccaagctggatcttgatgcgggacttcagtcctagtggcattttcggagcgtttcaaagagagcacgagcggctccgcaaataccactgaagaggacacactctgcacccccccaccccacgaccttggcccgagcccctccgtgaggaacacaatctcaatcgttgctgaatcctttcatatcctaataggaattaacctccaaataaaacatgactggtacgtgt

SEQ ID NO: 339294 - DNA, 499 bp, Homo sapiens
ccagcagccctcgcgcggtccggcacagcggacaccaggactccaaaatggcgtcagttggtgagtgtccggccccagtaccagtgaaggacaagaaacttctggaggtcaaactgggggagctgccaagctggatcttgatgcgggacttcagtcctagtggcattttcggagcgtttcaaagaggttactaccggtactacaacaagtacatcaatgtgaagaaggggagcatctcggggattaccatggtgctggcatgctacgtgctctttagctactccttttcctacaagcatctcaagcacgagcggctccgcaaataccactgaagaggacacactctgcacccccccaccccacgaccttggcccgagcccctccgtgaggaacacaatctcaatcgttgctgaatcctttcatatcctaataggaattaacctccaaataaaacatgactggtacgtgtgctgattgcctgcctgtctgccgtagccat

SEQ ID NO: 339295 - DNA, 778 bp, Homo sapiens
  misc_feature (472)..(472): n is a, c, g, or t
ccagcagccctcgcgcggtccggcacagcggacaccaggactccaaaatggcgtcagttggtgagtgtccggccccagtaccagtgaaggacaagaaacttctggaggtcaaactgggggagctgccaagctggatcttgatgcgggacttcagtcctagtggcattttcggagcgtttcaaagaggttactaccggtactacaacaagtacatcaatgtgaagaaggggagcatctcggggattaccatggtgctggcatgctacgtgctctttagctactccttttcctacaagcatctcaagcacgagcggctccgcaaataccactgaagaggacacactctgcacccccccaccccacgaccttggcccgagcccctccgtgaggaacacaatctcaatcgttgctgaatcctttcatatcctaataggaattaacctccaaataaaacatgactggtacgtgtaanaaaaaaaaaaaagaaaaaaaaaaaaaagaaaaaaaaaaaaaaaaaaaaaaaaaagaaaaaaacaaaaagggggggggaacacaaagtagaagatccacacagggggggcaaaaaagtagagcacgccgccggaagtatgagagagagagagaggacgcaccaccacagagagaagagagggtgcacaagcagacagcggaggaagagagacgcggacgagcaaaaaaagagagggagagagagaaaacgaaagagggaagaagaggaaaagagggagagagagagaagcaaagagagaggggaaac

SEQ ID NO: 339296 - DNA, 741 bp, Homo sapiens
ccagcagccctcgcgcggtccggcacagcggacaccaggactccaaaatggcgtcagttgtaccagtgaaggacaagaaacttctggaggtcaaactgggggagctgccaagctggatcttgatgcgggacttcagtcctagtggcattttcggagcgtttcaaagaggttactaccggtactacaacaagtacatcaatgtgaagaaggggagcatctcggggattaccatggtgctggcatgctacgtgctctttagctactccttttcctacaagcatctcaagcacgagcggctccgcaaataccactgaagaggacacactctgcacccccccaccccacgaccttggcccgagcccctccgtgaggaacacaatctcaatcgttgctgaatcctttcatatcctaataggaattaacctccaaataaaacatgactggtacgtgtaaaaaaaaaaaaaaaaaaaaaaaaaaaaattggggggcgggggcccggaaaaaaggttgctataaaccacaattggttggggcgcgccgcgaggacccacggatgggaaagagaaacaggggccagaaccagggtgcaccaaggaaaaaacggggacaaggaagaagagcggagaattgaccccaagataaaaaaagcccgtgaggaaacgggcgagttggaaaagaacacgaaagagagacggaggacaaaacgggcataacaagaggatcaagaagtcaataataagg

SEQ ID NO: 339297 - DNA, 392 bp, Homo sapiens
ccagcagccctcgcgcggtccggcacagcggacaccaggactccaaaatggcgtcagttgtaccagtgaaggacaagaaacttctggaggtcaaactgggggagctgccaagctggatcttgatgcgggacttcagtcctagtggcattttcggagcgtttcaaagaggttactaccggtactacaacaagtacatcaatgtgaagaaggggagcatctcggggattaccatggtgctggcatgctacgtgctctttagctactccttttcctacaagcatctcaagcacgagcggctccgcaaataccactgaagaggacacactctgcacctgaatcctttcatatcctaataggaattaacctccaaataaaacatgactggtacgtgt

SEQ ID NO: 339298 - DNA, 1585 bp, Homo sapiens
tgttgctgaggtgactctagattatccctcagtaagcggagcatcagtaacggagcatcagtaagcggagcgtcagtaagcggagcaacacaacatacccccagcaggcgtgactccgctcggaccaggactccaaaatggcgtcagttgtaccagtgaaggacaagaaacttctggaggtcaaactgggggagctgccaagctggatcttgatgcgggacttcagtcctagtggcattttcggagcgtttcaaagaggtcagagccttgtggatgtctgtaaatgaaagcaaatctctgggtcttcagatctcttttttgccatgaattaatttgggcaatgaaggccttgttgtctgaaagcagtaagttatgtagaggatgacagggagggatgctaggccttggacttctgtggttgattggccctttcaaaggctggctctgagatattacagccaagaacatgtttcctgttgcttggaatcagtatgtctgcctctgtcttagagaaatcctaagacttctttaagaggaaaatgaattggaaccgtagtgggcattagtctataatatgatgctctcctccctgccagaacttcaggacaaatatttgaaatggcctatcttggcctggtgtggtggcttatgcctgtaatcccggcacttcgggaggccaaggctggaggattgcttgagccgagtttagaccagcctaggcaatatggagagaccccatctctataaaaaaaaccacacaagaaaaattagctggctgtggtggtgcatgcctgtagtcccagctactcaggaggctataagctcacagccaaaggggagaggtggaatccaggtaggcctagttcaggagctggtatgtgcttatagttcaggctatggggatgagagaccttactggcatttgtgcttgtcatctttatcagccagtgaatgcagggcgaggggcttaaacagccagagcaggactaggtccctgaatgtcagccagactcaactgtgtgctcaacttcactcaaatgtgaagcccagcagggcagtgagcgcctcttgcgtttgcaggttactaccggtactacaacaagtacatcaatgtgaagaaggggagcatctcggggattaccatggtgctggcatgctacgtgctctttagctactccttttcctacaagcatctcagtgagtgcctctgcggcgtcttgcctttagttcccatgagagggtggtggtgactgatttcattagatacagcagcccaccttcttctgaggctgagggacctttagttaaagttccttatgtttccacctaaaagaattggagggacctatcagagtacagtatgtgggatattgtttgaaatgagaaaattgtgacaaagagaacacaggaaaatcaagatgaagccagggtaaagagagtacttagaagcattctttaaaatacagcacactgtgaaaatttggctcgattttcctagtagccaatgcagaaagagaaatgagttgagtgggataatctggtaccccagaaaagcatggctgttccggctctgaggcttgagagg

SEQ ID NO: 339299 - DNA, 451 bp, Homo sapiens
ggtcctgcctctgaaggacgggttctctggggctgtttgtctgagcgtgtgttccctctgttccttctggaaagaaagtggttggccaggtggcaggttggctcctgaggtgtctttgtgccccccgggtctgctgattctgcagagacaccggcaggcgggtcatgggtcatctctgaagggaattctcaggaaggctttgtgtgatctcagcctgcttcctgccatgctgtgccttcactgtaaccttttaagatacttaccatcttgccttcctgacttcagagcacgagcggctccgcaaataccactgaagaggacacactctgcacccccccaccccacgaccttggcccgagcccctccgtgaggaacacaatctcaatcgttgctgaatcctttcatatcctaataggaattaacctccaaataaaacatgactggtacgtgt

SEQ ID NO: 339300 - DNA, 451 bp, Homo sapiens
ccagcagccctcgcgcggtccggcacagcggacaccaggactccaaaatggcgtcagttgtaccagtgaaggacaagaaacttctggaggtcaaactgggggagctgccaagctggatcttgatgcgggacttcagtcctagtggcattttcggagcgtttcaaagaggttactaccggtactacaacaagtacatcaatgtgaagaaggggagcatctcggggattaccatggtgctggcatgctacgtgctctttagctactccttttcctacaagcatctcaagcacgagcggctccgcaaataccactgaagaggacacactctgcacccccccaccccacgaccttggcccgagcccctccgtgaggaacacaatctcaatcgttgctgaatcctttcatatcctaataggaattaacctccaaataaaacatgactggtacgtgt

SEQ ID NO: 339301 - DNA, 757 bp, Homo sapiens
  misc_feature (757)..(757): n is a, c, g, or t
ccagcagccctcgcgcggtccggcacagcggacaccaggactccaaaatggcgtcagttggtgagtgtccggccccagtaccagtgaaggacaagaaacttctggaggtcaaactgggggagctgccaagctggatcttgatgcgggacttcagtcctagtggcattttcggagcgtttcaaagaggttactaccggtactacaacaagtacatcaatgtgaagaaggggagcatctcggggattaccatggtgctggcatgctacgtgctctttagctactccttttcctacaagcatctcaagcacgagcggctccgcaaataccactgaagaggacacactctgcacccccccaccccacgaccttggcccgagcccctccgtgaggaacacaatctcaatcgttgctgaatcctttcatatcctaataggaattaacctccaaataaaacatgactggtacgtgtaaaaaaaaaatctgcacttcctctccgccatatcataatctctattcttctgatcccacgtcacctttcccgtgcctttcctccacgtccaatttgcccctaaagaaaaaaattgtggcggcctttggccccattcttctttaaatctcgagcctgtttataccttcgcggccgttgtggccttctttggcaacattccccccttatgggggcgccgttttcttaacggggccccggtctttttaaccacgcgcggaatttgtgaacacccctttggggtttccctcn

SEQ ID NO: 339302 - DNA, 829 bp, Homo sapiens
  misc_feature (829)..(829): n is a, c, g, or t
tgttgctgaggtgactctagattatccctcagtaagcggagcatcagtaacggagcatcagtaagcggagcgtcagtaagcggagcaacacaacatacccccagcaggcgtgactccgctcggaccaggactccaaaatggcgtcagttgtaccagtgaaggacaagaaacttctggaggtcaaactgggggagctgccaagctggatcttgatgcgggacttcagtcctagtggcattttcggagcgtttcaaagaggttactaccggtactacaacaagtacatcaatgtgaagaaggggagcatctcggggattaccatggtgctggcatgctacgtgctctttagctactccttttcctacaagcatctcaagcacgagcggctccgcaaataccactgaagaggacacactctgcacccccccaccccacgaccttggcccgagcccctccgtgaggaacacaatctcaatcgttgctgaatcctttcatatcctaataggaattaacctccaaataaaacatgactggtacgtgtaaaaaaaaaatctgcacttcctctccgccatatcataatctctattcttctgatcccacgtcacctttcccgtgcctttcctccacgtccaatttgcccctaaagaaaaaaattgtggcggcctttggccccattcttctttaaatctcgagcctgtttataccttcgcggccgttgtggccttctttggcaacattccccccttatgggggcgccgttttcttaacggggccccggtctttttaaccacgcgcggaatttgtgaacacccctttggggtttccctcn

SEQ ID NO: 339303 - DNA, 747 bp, Homo sapiens
ccagcagccctcgcgcggtccggcacagcggacaccaggactccaaaatggcgtcagttggtgagtgtccggccccagtaccagtgaaggacaagaaacttctggaggtcaaactgggggagctgccaagctggatcttgatgcgggacttcagtcctagtggcattttcggagcgtttcaaagaggttactaccggtactacaacaagtacatcaatgtgaagaaggggagcatctcggggattaccatggtgctggcatgctacgtgctctttagctactccttttcctacaagcatctcaagcacgagcggctccgcaaataccactgaagaggacacactctgcacccccccaccccacgaccttggcccgagcccctccgtgaggaacacaatctcaatcgttgctgaatcctttcatatcctaataggaattaacctccaaataaaacatgactggtacgtgtaaaaaaaaaaaaaaaaaaaaaaaaaagaaaaaaacaaaaagggggggggaacacaaagtagaagatccacacagggggggcaaaaaagtagagcacgccgccggaagtatgagagagagagagaggacgcaccaccacagagagaagagagggtgcacaagcagacagcggaggaagagagacgcggacgagcaaaaaaagagagggagagagagaaaacgaaagagggaagaagaggaaaagagggagagagagagaagcaaagagagaggggaaac

SEQ ID NO: 339304 - DNA, 390 bp, Homo sapiens
ctatgactcaaagtgaatcctgtcttgattttgagttctttttgtgtagctcttttttctttgtagttctgccccacaacttcagtcatctcagcctgacctttgtttcttcaacttgatatatctccagtgctctccttgggaatcccttttccctgatccttcaggcaccaattcaaggggaatataggggtcttgttggttttcctactctgagggatcagggtcccgtggtgtctttatttaatgactgaaaaaaatttttttcatatattttgcctacttttctacttgattacagcaggaaggtaaacctggttcctaataaaccatcatgactggaagcagaagtttggctcaaccttttaatattttggtcatatgattttt

SEQ ID NO: 339305 - DNA, 484 bp, Homo sapiens
aaaggagacttcattgttgtggcggggaggagtctcggagaactcacatggaaacattttaattatagttcactctaacatctttgaacaagcaagctgtcttcactggctccctccaagcctccatgcagctgctcttgcaatgcctagacctgccccaggcagcactcagtctcccagactcgtggagcatcctagggagacccttacttcctcaaagttgctgatctgaacctcctccctgcctagcaacttgggtctcagcattcccagcctggtctccctggagagtggcttttagcctgagaattggagacccagcctgaggacactaaggtacttgtggagaaaatactttgacatcttgatcccactgtccccaccctttcacagcagaaaaatgcccctcccacccttcagtcacttcggcacaatcctgttctattctttatctgcaatcgcacattgtgctctcaattttatt

SEQ ID NO: 339306 - DNA, 186 bp, Homo sapiens
tccccatcatgtagcttatattctgttgggggtgatgggggggtataaagttagcacatgtagggcaagtaagtgtgaagctatgtcatagcagtaaatgcaatagggtttaagaaaaagaagtcaggaaaagggtcatgaaagatgacatttaggctaagcttagaatgataggtgggattttga

SEQ ID NO: 339307 - DNA, 625 bp, Homo sapiens
agaattggatagacctgggtgtttatatcccagctctgcctaagtgaacttaggcaagcacttaacctcaaatactccatgttttttcatctccacaatagagggaatcatagtaactgtctcctatggtggttgcgaggattaaatgggattgttagcacggtacctggtgaagcattccacaaaggttcaaacagtggtaataatgacaataataacaatagcaatattatctgatctctctgggcctctgttagccagctataaactcagtctcattccctgtccgttccaactttactgtgttcttttaaaaaccagaccacgggctgggaaatgccttgatctttactgaccgagttgtatattgggcctagccctagccctgttaaggggcactgtgtggaaatgcccaggctctccagattgaaacttctcactcttcaccatccagttgtccagctgcagcaaagcacatacagagtgggagttagagcagtccctacaggaccaggcactgctgaaagcgcagctgacacaggtgaggttttccgagggagggatgtggaaggacgatgaccccaggtggccaggagcaggtgaggaccagtgacagcccttccta

SEQ ID NO: 339308 - DNA, 638 bp, Homo sapiens
caagtggaacatcagctggaagaagaaaagaaagcaaacaacgagagacagaaagccgaaagggtgctagaggttcaaatccagacattgatcatacagaaagaggaactaaatacggacctgtaccacatggaacgttctctcagatactttgaagaagagtccaaggacctggctgtccgcctgcaacattcattgcagtgtaaaggagagttagagagggctctgtctgctgtcatcgccacagagaagaagaaggcaaaccagttgtccagctgcagcaaagcacatacagagtgggagttagagcagtccctacaggaccaggcactgctgaaagcgcagctgacacagttgaaggagtcatttcaacaactccaattagaaagagatgagtgtgctgaacatatagaaggagagagggcccggtggcatcagaggatgagtaaaatgtcgcaggagatttgcacattaaagaaagagaagcaggatatgcgttgggtagagcagctggagtggagcttgtccaaactcaaaaaccagacggctgaacccttgcccccggagcccccagcagtgccctctgaggtggagctgcagcacctgaggaaggaactagagagagtggcaggagagct

SEQ ID NO: 339309 - DNA, 251 bp, Homo sapiens
ccctcccacttgagctcttcactgatcaagtactgtctgccagtggaggaggtataatgagggctcccaggaggcaccccacctgggcatctgaggctgcactacaagcaggcagagccagtctggggccgcgggagaaggcagtagactgaggggtgttctggcctcttctcatgggcaagactaccctgcaacgtttaggtccaacagtttccctagggctaaagtgtcctagggatgggcatccttgg

SEQ ID NO: 339310 - DNA, 283 bp, Homo sapiens
aacattacaaataaaaagatgaaaatggtagaagattctaaatagagaaataagcattaagggatagctttgctcaaatatataaaacaatattatgataaaggacacaaactagttgttgtgagcctccacagaggacaaaaaatgtaatcatgaatgttcaaatagatataaaaacaagctgttataaggatgattaaatgtcgctacaggccagcaaaaaagtgtgcagaattagaatatgttttaaatcatataatagtaatcgctaatgttagagata

SEQ ID NO: 339311 - DNA, 218 bp, Homo sapiens
aacattacaaataaaaagatgaaaatggtagaagattctaaatagagaaataagcattaagggatagctttgctcaaatatataaaacaatattatgataaaggacacaaactagttgttgtgagcctccacagaggacaaaaaatgtaatcatccttataacagcttgtttttatatctatttgaacattcatgattacattttttgtcctctgtgg

SEQ ID NO: 339312 - DNA, 692 bp, Homo sapiens
tgtttccatttgtccaatgttcggtgttagtgttttactattgtcttttgagtaactgagtttcatcactttttatttctttgatttgttctttttatgatacccaaatttggaactctctttattcttcaggtgattctgctttgagtacgatctagtcaaaccctacactcagacattgtggaatggatgatacactgcttttaaggcagtttggaaggaggatgatttaaatgaccttcaaagactaatgtcaagcccccatgtcaatgtcactgcaattcatgcatgcatggagaataggaaaggaacttaattgtggaggaggggaattgtaaccctgtttgaatgggtagttgaaagtcctgggcccgcccctaaggctcaaaaaaggactttcttacatttgctgccaagaggtcagagggagagcccatataaataccatcctcccgcggggtgtgtgagccagtcttattcttttacttccacaggtgcagaacaggttcaccaaatagtattctgatctcccttgaacagaatctgacatcatattgtccttctctagaaaatcaatccctttaaagcatggaacatggcaattttaggtcagtaggcatttaaagacacctttttaactttcaagggctggcctaataagatatattttgtacaaaataccagtgttatca

SEQ ID NO: 339313 - DNA, 429 bp, Homo sapiens
ttgatatggatgaaaaatgtgtgaaaatcaccaagaacttattaaaaaagacaaagaagagctgcttttctttccccccatgagacagagtctcactccatcacccagggtggagtgcagtggtgctatcttggctcactgcaacctccgcttccggggttcaactgattctcctgcctcagcctcctgagtagctgggattacaggcatgtgccaccatgcctggctaatttttatatttttagtagagatggggtttcaccatgttggccaggctggtcttgaacttcttaccacgtgatccgaccgtctctgcctcccaaagtgctgggattacaggcgtgatccaccgtgcctggcctgtttggtttttttaattgcggtaaaatgttcgtaacagaaaatttagtagcacagaacaccgtcgag

SEQ ID NO: 339314 - DNA, 680 bp, Homo sapiens
gacagcagtataggctatgtataatttgtttcagtatggcatagagagacacaaatggatcattttagatttctcttggtgagcaacacttctattcatgaggtattttgttttcgattggctttgtactttgcaaattccacttgagcctgtgtaaaaaatagatcttattcccaataaagacatcatagcaaagatacaagtgtttgcctgggaattattttacatgaagttgtgctttgcttatttcttacagaactattgtaaagccctttgtcctgtattagagagagagagagagagaggttttaaaagcaagacaggagccttggcttctatataaattgtgcatattactacttgacacaccatcttgaccaaggcccagcctcatcttaatctttgaaaatgcctgtctttcaagataccacagtttccacccttcctgccttccatcattattttgtaaacacctgctgcgtaacaccacctctttgatttcagactgcctgggttagatggaaggattggtttatgtatcagaggagcccccactggaggaagtgagccttgtgttttcagcattgagtggatatatgttgagcaaaagaagccaaatacaaaagcatacatactaaaggatttcatttgcaaaaagtacaaaagaagcatggtaatag

SEQ ID NO: 339315 - DNA, 190 bp, Homo sapiens
tatggcaagatacaaaaccatttgtttcctaactgtgttctactggattacacaaagttaaagaagtgacaatattgaagggcttctcagagccttttataagctaatatgtaacgagtttctaagaggagagtagtgaatgcagtgatgttttatttgacctaggaaaacttttctcaaggaacaccta

SEQ ID NO: 339316 - DNA, 285 bp, Homo sapiens
actggggaagtcatcggcaaataaggctctcacagagaaaacatacatgcccacattagctcctgagaagccaatcatcagattactgatggattcagaaacagactcttatgaagattgataaaatctgaaaagaacccacagtgatgctcctgccaatgtcaaatgtaaagtacaggatgctgtcaaaagaatttttttcagaccatttactccaaggaaaccaagtcgacacttgattacctctctgttcatcctgagttgctgcatactggcagtaacaac

SEQ ID NO: 339317 - DNA, 357 bp, Homo sapiens
ccaacaggagcttgggcacggtggctcatgtctgtaatcccagcacttcaggaggctgaggatggaggatcccttaaggccaggagttcaagatcagcctaagcagtatagtgaaatctcatctctacaaaaaatataaaaatgagccaggcgtggtgacacacacctgtaatccttgacacttgggaggtgaagtgggaggattgcttgagcctgggacttcgaggctatagtaagctatgactgtgcctgcctggggaacagagcaacaccttgtctctatataacagtaaataaatacataaataaaatctaactgggcatgtggccatagctgcagtgtttcccgacttcatg

SEQ ID NO: 339318 - DNA, 430 bp, Homo sapiens
taacgaggagttttctttttataacaaagagagtacatttacaaaacttaaatacaattctgttcatccttggattactgtgagtttgagttagggagggcagagctggattatctagttagtggcttccatgatttttcatgtctgtgaaaatgttgaaaacatactagatgcagtttcaggacatgtggtttcttaatatagtttgcatattttgaattccagaatctgtgtaggcattttgccaatggcatgtaaattgtggttcacagaccaccaggctgccttgtgcattctttttttttttttttgagacctagtctcagtctgttgccaggctgcagtgcagtggtgcaatcttggctcactccaacctctacctcctggtttcaagcgattctcctgcctcagcctccctagtagctgggac

SEQ ID NO: 339319 - DNA, 451 bp, Homo sapiens
cacagtggaggaggtgagccttaaagagatcgataagggtttgcccggcagaagaaaacagcgtgagcagaggcatggagtctgcagtagaactgcatgttaggtgaacctgatatagggtcaggaggggtagcaggagagatttctggacaggctttcacacagtgaatcgtggaagctcccccaaatcacccagccaaagcccaaattataaagatccaacatcctcccactgatatgctcctcatggtgtgagtcttccctccttgcaacaagtaataaaccaaacttgcttgactacagagtgtttctggtggtcgttactggaggacattcacaactgtaacagtgaaaaaggatggttaagtttcttgggggaagttaagggagtctcattctgagggctcccattttctatgttaagcaataggtgaaattatcttatttattt

SEQ ID NO: 339320 - DNA, 341 bp, Homo sapiens
aaattaaaaccacaatgagatattatcttatattcatcagatgactattattaaaaagacaaaaaccaaaaacaaaaacaaatgttggtgagatgcagagaaaagagagcatttttatactatttgtgggaaagtaggtcactacagactctatggaaaatggtatggacagttctcaaagaactaaaagtagaactaccatttgacccagcaattccactactgggtatctaccttaaagaaaataaatcatcatataaaaagatacctgcacttatatgtttatatcagcactattcacaaccctaagtgtccatcagtggatgagtggataaagaaaa

SEQ ID NO: 339321 - DNA, 351 bp, Homo sapiens
  misc_feature (18)..(18): n is a, c, g, or t
  misc_feature (24)..(24): n is a, c, g, or t
tatacacagatgagtcanctattngttactggatatatgggtaaacattatgggagctgaaggggtggtatcagcgctataccaccaacttcaacaattcctattcttcattagtaaatgtttagagttgtttgaacttctcggatgatatatggtattttgggtaaaacctatgtttatttttgctactgtattgtatggtagtttgataatgtcttaatttatgctctattttgttctgatgaggattttaagagtttgtcactactgtttttaaaagcaagtaactatttttaaattttttttaaagacatggtcttgctctgttgcctaggttggagtgcggtggta

SEQ ID NO: 339322 - DNA, 863 bp, Homo sapiens
ctcccaggttcaagcgattctcctgcctcagcctcccgagtagctgggactacaggcgcacaccaccaccacgcctggctaatttttttgaatttttagtagagacggagttccaccatcttgaccaggctggtcttgaactcttggcctcaagtgatccgcctgcctcagcctcccaaagtgctaggattacaggcgtgagccactgcacccggctgaggtcctgttcttaactatgcacactgcccgtgttccttggtcatcacaagattacatacccactgctgtcttcctttgttcaagcttcacaagatgtcccagcctttctcctttccttttagattcttctagttgttatctatattcaatccatttctacagaagctttgatactgcccagtggaaccagtcttataaatattttactcttaagacttttcaacagagaaaaaagcccttaatcacagtccttgcaagaggcaggtgctgcctgttttctttttaaccaattagtgaaaacagctgcaggcttttgatgggatgacccagagaggctgttgtaagcgttgcattggcagaggaacgccacagcatgaaggcagggaaagtgctacaaaactagatgtgtaagggtatctctggctttttcttttgtttggctttatattcctgtgaattaggtagaagcaaggtgttgtctccatttcaaagatgtggaaaatgagtataacgaagatgctgatcaggaagaaggtaagatcccacagcatagcagcagggtgatgtgatgtgggtgaacaggagatgggatgcctttttcccaatctgggtgctgcacttgagcagtatgaactggtgccagt

SEQ ID NO: 339323 - DNA, 393 bp, Homo sapiens
gcacacacaaaataatattatttcactgcaccagattctgcagttcagacaaatgaactatgtaaatgtgaatctcagaaagacacaaaatgagctcaaccagggatgtgatgaaaaatgggaaacacatggataaacctaaatatacgaatgaatggcaagtacataatgcatgttgaatgtttatatactgctgggaagtatagaattactttgaaaactggtttggcattatctcctaaagttgaaattgtacatacccagccttattcttgagtaatttttcttgtcaattctatttttctgttgtgagagtgatcatggaaacagtgggtgagaacactggtctgtctagtccattcttgtcttgctattgaaacttctaaaactagg

SEQ ID NO: 339324 - DNA, 938 bp, Homo sapiens
ctgacctccaggctaccaagcatggattttctgttttaaaggggcaagctgaacttcagatgaagaggatttggggagaaaaagaaaagaagaatttggaggatggaataaataacttgaagaaacaatgggaaacattggagccattacacttagaagcagaaaatcagattaagaagtgtgacataaggaacaagatgaaagagactatcttatgggccaagaatttgttgggtgaacttaatccctccattccccttctcccagatgacattctttcacagatcagaaagtgcaaagtgacacatgatggcattctagctaggcagcagtctgtggaatcgttggctgaagaggtcaaagataaggttcctagccttacaacctatgagggcggtgatttaaataataccctagaggacttacggaatcaataccaaatgctggttttaaaatcaactcaaagatcacagcaattagaatttaagttggaagaaagaagcaatttttttgctataataaggaagtttcaacttatggttcaagaaagtgaaacactgataattcccagggtggagacagctgccacggaagctgaactaaaacatcaccatgttactttggaggcatctcagaaggaattgcaagaaattgacagtggaatctcaacacatcttcaggagctaacaaacatctatgaggagctgaatgtgtttgaaagattatttctggaagatcagttgaaaaatcttaagattaggaccaacagaatacaaagattcattcagaatacatgtaatgaagtggaacacaaggtaaagttttgcagacaattccatgaaaaaacatcagcgcttcaggaggaggctgacagtatacagcgcaatgaactattacttaatcaagaagtaaataaaggtgttaaagaggagatctat

SEQ ID NO: 339325 - DNA, 609 bp, Homo sapiens
catttggaaattatttttatgaggattttcagacatttgaacattttcaactggcactgaaagttgaatactgcttttagaataacaacagaaaatcaaagcctgtatgttccttttcccttttacttgttaagcaaatcttgaagaagttacttgactcattgttctgaatgtcttaatcagtcactttaattttttgaaagaatttccttgaaagtgttcttaaataaaaatagggatcttcctgttagtgagtgtaaaattactcagcagtgattctttggttttgtgaaacttaagggaagactaactcttctttctctatcccttccttccattccctctgcagtccatcatcttggttcaggcctttgtgacagttcttgcctagcctcccaaaagatagctttccccacttctcctgcttgtcagtgttttcaaccacctgcagatgacttcttcaggtcagcagtagttgtcacttacctcttggaccaaccttttgggattccttattgcctgatgaatttaatggatttcttaccatagtattccaggtcctgataatctgctcccaacctatagctttctagtcttcctctccctcat

SEQ ID NO: 339326 - DNA, 1879 bp, Homo sapiens
tataccgtgaggagtggggcggctgtgtagacacctgatctgccggtgccttggtcttggacttccagcctccagaactgtccatgtcacaaacggcgggcaagcatctgctgtacccagctggggtccctgtcggccctgaagcatgctgtcctggggctctacctgctggtcttcctgattcttgtgggcatcttcatcttagcagtgtccaggccgcgcagctcccctgacgacctgaaggccctgactcgcaatgtgaaccggctgaatgagagcttccgggacttgcagctgcggctgctgcaggctccgctgcaagcggacctgacggagcaggtgtggaaggtgcaggacgcgctgcagaaccagtcagactcgttgctggcgctggcgggcgcagtgcagcggctggagggcgcgctgtgggggctgcaggcgcaggcggtgcagaccgagcaggcggtggccctgctgcgggaccgcacgggccagcagagcgacacggcgcagctggagctctaccagctgcaggtggagagcaacagtagccagctgctgctgaggcgccacgcgggcctgctggacgggctggcgcgcagggtgggcatcctgggcgaggagctggccgacgtgggcggcgtgctgcgcggctcaaccacagcctgtcctacgacgtggcctccaccgcacgcggctgcaggacctgcgggtgctggtgagcaacgccagcgaggacacgcgccgcctgcgcctggcgcacgtaggcatggagctgcagctgaagcaggagctggccatgctcaacgcggtcaccgaggacctgcgcctcaaggactgggagcactccatcgcactgcggaacatctccctcgcgaaagggccaccgggacccaaaggtgatcagggggatgaaggaaaggaaggcaggcctggcatccctggattgcctggacttcgaggtctgcccggggagagaggtaccccaggattgcccgggcccaagggcgatgatgggaagctgggggccacaggaccaatgggcatgcgtgggttcaaaggtgaccgaggcccaaaaggagagaaaggagagaaaggagacagagctggggatgccagtggcgtggaggccccgatgatgatccgcctggtgaatggctcaggtccgcacgagggccgcgtggaagtgtaccacgaccggcgctggggcaccgtgtgtgacgacggctgggacaagaaggacggagacgtggtgtgccgcatgctcggcttccgcggtgtggaggaggtgtaccgcacagcatgaggagccctgatcaactggatcaccactttgcccagcctctgaacaccatgcaccaggcctcaatatcccagttccctttggccttttagttacaggtgaatgctgagaatgtgtcagagacaagtgcagcagcagcgatggttggtagtatagatcatttactcttcagacaattcccaaacctccattagtccaagagtttctacatcttcctccccagcaagaggcaacgtcaagtgatgaatttcccccctttactctgcctctgctccccatttgctagtttgaggaagtgacatagaggagaagccagctgtaggggcaagagggaaatgcaagtcacctgcaggaatccagctagatttggagaagggaatgaacactaacattgaatgactaccatggcacgctaaatagtatcttgggtgccaaattcatgtatccacttagctgcattggtccagggcatgtcagtctggatacagccttacctccaggtagcacttaactggtccattcacctagactgcaagtaagaagacaaaatgactgagaccgtgtgcccacctgaac

SEQ ID NO: 339327 - DNA, 2007 bp, Homo sapiens
gtagaggagctgccggtgcctcctcagaacatctcctgatcgctacccaggaccaggcaccaaggacagggagtcccaggcgcacaccccccattctgggtcccccaggcccagacccccactctgccacaggttgcatcttgacctggtcctcctgcagaagtggcccctgtggtcctgctctgagactcgtccctgggcgcccctgcagcccctttctatgactccatctggatttggctggctgtggggacgcggtccgaggggcggcctggctctcagcgtggtggcagccagctctctggccaccatggcaaatgctgagatctgaggggacaaggctctacagcctcagccaggggcactcagctgttgcagggtgtgatggagaacaaagctatgtacctacacaccgtcagcgactgtgacaccagctccatctgtgaggattcctttgatggcaggagcctgtccaagctgaacctgtgtgaggatggtccatgtcacaaacggcgggcaagcatctgctgtacccagctggggtccctgtcggccctgaagcatgctgtcctggggctctacctgctggtcttcctgattcttgtgggcatcttcatcttagcagtgtccaggccgcgcagctcccctgacgacctgaaggccctgactcgcaatgtgaaccggctgaatgagagcttccgggacttgcagctgcggctgctgcaggctccgctgcaagcggacctgacggagcaggtgtggaaggtgcaggacgcgctgcagaaccagtcagactcgttgctggcgctggcgggcgcagtgcagcggctggagggcgcgctgtgggggctgcaggcgcaggcggtgcagaccgagcaggcggtggccctgctgcgggaccgcacgggccagcagagcgacacggcgcagctggagctctaccagctgcaggtggagagcaacagtagccagctgctgctgaggcgccgcctgcgcctggcgcacgtaggcatggagctgcagctgaagcaggagctggccatgctcaacgcggtcaccgaggacctgcgcctcaaggactgggagcactccatcgcactgcggaacatctccctcgcgaaagccgggcccaagggcgatgatgggaagctgggggccacaggaccaatgggcatgcgtgggttcaaaggtgaccgaggcccaaaaggagagaaaggagagaaaggagacagagctggggatgccagtggcgtggaggccccgatgatgatccgcctggtgaatggctcaggtccgcacgagggccgcgtggaagtgtaccacgaccggcgctggggcaccgtgtgtgacgacggctgggacaagaaggacggagacgtggtgtgccgcatgctcggcttccgcggtgtggaggaggtgtaccgcacagcatgaggagccctgatcaactggatcaccactttgcccagcctctgaacaccatgcaccaggcctcaatatcccagttccctttggccttttagttacaggtgaatgctgagaatgtgtcagagacaagtgcagcagcagcgatggttggtagtatagatcatttactcttcagacaattcccaaacctccattagtccaagagtttctacatcttcctccccagcaagaggcaacgtcaagtgatgaatttcccccctttactctgcctctgctccccatttgctagtttgaggaagtgacatagaggagaagccagctgtaggggcaagagggaaatgcaagtcacctgcaggaatccagctagatttggagaagggaatgaacactaacattgaatgactaccatggcacgctaaatagtatcttgggtgccaaattcatgtatccacttagctgcattggtccagggcatgtcagtctggatacagccttacctccaggtagcacttaactggtccattcacctagactgcaagtaagaagacaaaatgactgagaccgtgtgcccacctgaac

SEQ ID NO: 339328 - DNA, 507 bp, Homo sapiens
tataccgtgaggagtggggcggctgtgtagacacctgatctgccggtgccttggtcttggacttccagcctccagaactgtgagcagtacatttgtgtttatgagccaccctggctgtggtactttgctgtggcagcctggactaaggcaggggggctggctaagccaggactgagggctcaagcgatcctgctgggtggcctcagggcagaaactgctggtgaggctgtgaggttttgtggggaggagtttttcgaggagcacccaaagtcctagggcgcctcatccccatcctctttgccccgacctgctgagctccctcctctggcatggcctgctgtgtttttcgtgcgtaagtagcagagctggaggcttcagggacacggatgactcagtcctctacaagtggcaggggaggctctcagcatttctgtctcccaagccagacacccttcccactgaatggtggtaggaattgggagagtgagacaggtgtattcaactcat

SEQ ID NO: 339329 - DNA, 2296 bp, Homo sapiens
gtagaggagctgccggtgcctcctcagaacatctcctgatcgctacccaggaccaggcaccaaggacagggagtcccaggcgcacaccccccattctgggtcccccaggcccagacccccactctgccacaggttgcatcttgacctggtcctcctgcagaagtggcccctgtggtcctgctctgagactcgtccctgggcgcccctgcagcccctttctatgactccatctggatttggctggctgtggggacgcggtccgaggggcggcctggctctcagcgtggtggcagccagctctctggccaccatggcaaatgctgagatctgaggggacaaggctctacagcctcagccaggggcactcagctgttgcagggtgtgatggagaacaaagctatgtacctacacaccgtcagcgactgtgacaccagctccatctgtgaggattcctttgatggcaggagcctgtccaagctgaacctgtgtgaggatggtccatgtcacaaacggcgggcaagcatctgctgtacccagctggggtccctgtcggccctgaagcatgctgtcctggggctctacctgctggtcttcctgattcttgtgggcatcttcatcttagcagtgtccaggccgcgcagctcccctgacgacctgaaggccctgactcgcaatgtgaaccggctgaatgagagcttccgggacttgcagctgcggctgctgcaggctccgctgcaagcggacctgacggagcaggtgtggaaggtgcaggacgcgctgcagaaccagtcagactcgttgctggcgctggcgggcgcagtgcagcggctggagggcgcgctgtgggggctgcaggcgcaggcggtgcagaccgagcaggcggtggccctgctgcgggaccgcacgggccagcagagcgacacggcgcagctggagctctaccagctgcaggtggagagcaacagtagccagctgctgctgaggcgccacgcgggcctgctggacgggctggcgcgcagggtgggcatcctgggcgaggagctggccgacgtgggcggcgtgctgcgcggctcaaccacagcctgtcctacgacgtggcctccaccgcacgcggctgcaggacctgcgggtgctggtgagcaacgccagcgaggacacgcgccgcctgcgcctggcgcacgtaggcatggagctgcagctgaagcaggagctggccatgctcaacgcggtcaccgaggacctgcgcctcaaggactgggagcactccatcgcactgcggaacatctccctcgcgaaagggccaccgggacccaaaggtgatcagggggatgaaggaaaggaaggcaggcctggcatccctggattgcctggacttcgaggtctgcccggggagagaggtaccccaggattgcccgggcccaagggcgatgatgggaagctgggggccacaggaccaatgggcatgcgtgggttcaaaggtgaccgaggcccaaaaggagagaaaggagagaaaggagacagagctggggatgccagtggcgtggaggccccgatgatgatccgcctggtgaatggctcaggtccgcacgagggccgcgtggaagtgtaccacgaccggcgctggggcaccgtgtgtgacgacggctgggacaagaaggacggagacgtggtgtgccgcatgctcggcttccgcggtgtggaggaggtgtaccgcacagcatgaggagccctgatcaactggatcaccactttgcccagcctctgaacaccatgcaccaggcctcaatatcccagttccctttggccttttagttacaggtgaatgctgagaatgtgtcagagacaagtgcagcagcagcgatggttggtagtatagatcatttactcttcagacaattcccaaacctccattagtccaagagtttctacatcttcctccccagcaagaggcaacgtcaagtgatgaatttcccccctttactctgcctctgctccccatttgctagtttgaggaagtgacatagaggagaagccagctgtaggggcaagagggaaatgcaagtcacctgcaggaatccagctagatttggagaagggaatgaacactaacattgaatgactaccatggcacgctaaatagtatcttgggtgccaaattcatgtatccacttagctgcattggtccagggcatgtcagtctggatacagccttacctccaggtagcacttaactggtccattcacctagactgcaagtaagaagacaaaatgactgagaccgtgtgcccacctgaac

SEQ ID NO: 339330 - DNA, 227 bp, Homo sapiens
tggcaacgtactttacccttacaatattgattttcacaactgttaattatcaaacttttttataatttaaaggtaaaaaaattatctcttttctatctgcatttcctggatttataaagctgaatgctgtttttaaaaatcattccatttctcattttataaactgcctgttaacatacaagatgttcttcaatcatcaaaaaaacctaacctaacttgtttgctat

SEQ ID NO: 339331 - DNA, 390 bp, Homo sapiens
tgttcaaccagggcctcccaccctgaagagcagggcatgctatagcggccacaggtgtctcggtatgttgggccagtggagttctttgtggagtggggttatggagcatgtcacatttggggctgggacaggaatgaggatagggatggcggaggagtcttttaaagacatctctgtaccctcccctccttcctacttaaaccctctgtgggttctccattgtcctcagggtacactttgacttcctcttcctgatgcaggcctgtccctgtccatctcccacccttttctctgccagtctgcccttctgtctcctggaatgccccctgtgcaatcctgcccctttgcacatgctgttccctctgtctagactgtcctttcacctcttca

SEQ ID NO: 339332 - DNA, 333 bp, Homo sapiens
gatatgtgccttgatcgattagtgatgtctgccttgggcccaggaagagaaatagacttacacgtgtgttgcataccctgcccagatatgaatgggttcactcaatagtgagagacacaaatgagccttaaataggagcagggtcagctggtgtggggcagggggtgcaaggtgggatttcgtaccagggaaacaaaaatgggtatgaagtaagttgttaccattttaatgaaactgaggaacagagaaaaacacagaaatttctctgtgtctctctttctctgggcctatctctgtctttctgtccctatttctgtctcttgctgtctgtcc

SEQ ID NO: 339333 - DNA, 356 bp, Homo sapiens
tgccacagatccagcatatggcagaagaggctcttaccactcctggactgcttttaaaaacaaacacaaacatgaaacaaaggcgggctttctgagcctgatcccggcctgggccttctacagcggtgccttccaaaggctgctcctgacacactatgtggcatacctgaagctcaacaccaaggtcaggtagccaggcggtgaggagtccagcacaaccttttcctcaccagtcccatgctggctgaagaggaccagaggagcagaccagcacttcaacctagtccgctgaagatggagggggctggggtcacagaggcatagaatacacattttttgccactttaaaaaagtct

SEQ ID NO: 339334 - DNA, 1600 bp, Homo sapiens
tacacagagagccacggccagggctgaaacagtctgttgagtgcagccatgggggacgtcctggaacagttcttcatcctcacagggctgctggtgtgcctggcctgcctggcgaagtgcgtgagattctccagatgtgttttactgaactactggaaagttttgccaaagtctttcttgcggtcaatgggacagtgggcagtgatcactggagcaggcgatggaattgggaaagcgtactcgttcgagctagcaaaacgtggactcaatgttgtccttattagccggacgctggaaaaactagaggccattgccacagagatcgagcggactacagggaggagtgtgaagattatacaagcagattttacaaaagatgacatctacgagcatattaaagaaaaacttgcaggcttagaaattggaattttagtcaacaatgtcggaatgcttccaaaccttctcccaagccatttcctgaacgcaccggatgaaatccagcactcgatccacagtcaagagtaccacttttcacgatatctctaggatatggacatcttcctccttctctgcacatcaaaacttacctgtccattgtcctatgcttctggggtgctgcactctactttataaagggtatcccatcgtcctgtgtaagccccgagtctgctgcaccgggtgataatgccagactgcttgggcgctgctgcacatcctcaccaaactcctgaactcctctctggaccacacatctcctgtgtgggctctgtctcccacactctgtttctggcacaaatctacgtctcttcaagaagaatatagttccgagttttccaggaaactcttaattgatgtctagtcaagatgacgtgggtacagaatgacagaatgggagtcagatgtttcttgatgctagtacatgcttgctggaaggcagttatgagcctaatttgcaggagcctcatccattgtaacatcacctccgtagtcaagatgacacagctaattctgaaacatatggaatcaaggcagaaaggtctcatcctgaacatttcttctgggatagccctgtttccttggcctctctactccatgtactcagcttccaaggcgtttgtgtgcgcattttccaaggccctgcaagaggaatataaagcaaaagaagtcatcatccaggtgctgaccccatatgctgtctcgactgcaatgacaaagtatctaaatacaaatgtgataaccaagactgctgatgagtttgtcaaagagtcattgaattatgtcacaattggaggtgaaacctgtggctgccttgcccatgaaatcttggcgggctttctgagcctgatcccggcctgggccttctacagcggtgccttccaaaggctgctcctgacacactatgtggcatacctgaagctcaacaccaaggtcaggtagccaggcggtgaggagtccagcacaaccttttcctcaccagtcccatgctggctgaagaggaccagaggagcagaccagcacttcaacctagtccgctgaagatggagggggctggggtcacagaggcatagaatacacattttttgccactttaaaaaagtct

SEQ ID NO: 339335 - DNA, 1603 bp, Homo sapiens
tacacagagagccacggccagggctgaaacagtctgttgagtgcagccatgggggacgtcctggaacagttcttcatcctcacagggctgctggtgtgcctggcctgcctggcgaagtgcgtgagattctccagatgtgttttactgaactactggaaagttttgccaaagtctttcttgcggtcaatgggacagtgggcagtgatcactggagcaggcgatggaattgggaaagcgtactcgttcgagctagcaaaacgtggactcaatgttgtccttattagccggacgctggaaaaactagaggccattgccacagagatcgagcggactacagggaggagtgtgaagattatacaagcagattttacaaaagatgacatctacgagcatattaaagaaaaacttgcaggcttagaaattggaattttagtcaacaatgtcggaatgcttccaaaccttctcccaagccatttcctgaacgcaccggatgaaatccagcactcgatccacagtcaagagtaccacttttcacgatatctctaggatatggacatcttcctccttctctgcacatcaaaacttacctgtccattgtcctatgcttctggggtgctgcactctactttataaagggtatcccatcgtcctgtgtaagccccgagtctgctgcaccgggtgataatgccagactgcttgggcgctgctgcacatcctcaccaaactcctgaactcctctctggaccacacatctcctgtgtgggctctgtctcccacactctgtttctggcacaaatctacgtctcttcaagaagaatatagttccgagttttccaggaaactcttaattgatgtctagtcaagatgacgtgggtacagaatgacagaatgggagtcagatgtttcttgatgctagtacatgcttgctggaaggcagttatgagcctaatttgcaggagcctcatccattgtaacatcacctccgtagtcaaggcagaaaggtctcatcctgaacatttcttctgggatagccctgtttccttggcctctctactccatgtactcagcttccaaggcgtttgtgtgcgcattttccaaggccctgcaagaggaatataaagcaaaagaagtcatcatccaggtgaggtgggcagctgtggagtccttgtcatcatccaggtgctgaccccatatgctgtctcgactgcaatgacaaagtatctaaatacaaatgtgataaccaagactgctgatgagtttgtcaaagagtcattgaattatgtcacaattggaggtgaaacctgtggctgccttgcccatgaaatcttggcgggctttctgagcctgatcccggcctgggccttctacagcggtgccttccaaaggctgctcctgacacactatgtggcatacctgaagctcaacaccaaggtcaggtagccaggcggtgaggagtccagcacaaccttttcctcaccagtcccatgctggctgaagaggaccagaggagcagaccagcacttcaacctagtccgctgaagatggagggggctggggtcacagaggcatagaatacacattttttgccactttaaaaaagtct

SEQ ID NO: 339336 - DNA, 1671 bp, Homo sapiens
tacacagagagccacggccagggctgaaacagtctgttgagtgcagccatgggggacgtcctggaacagttcttcatcctcacagggctgctggtgtgcctggcctgcctggcgaagtgcgtgagattctccagatgtgttttactgaactactggaaagttttgccaaagtctttcttgcggtcaatgggacagtgggcagtgatcactggagcaggcgatggaattgggaaagcgtactcgttcgagctagcaaaacgtggactcaatgttgtccttattagccggacgctggaaaaactagaggccattgccacagagatcgagcggactacagggaggagtgtgaagattatacaagcagattttacaaaagatgacatctacgagcatattaaagaaaaacttgcaggcttagaaattggaattttagtcaacaatgtcggaatgcttccaaaccttctcccaagccatttcctgaacgcaccggatgaaatccagcactcgatccacagtcaagagtaccacttttcacgatatctctaggatatggacatcttcctccttctctgcacatcaaaacttacctgtccattgtcctatgcttctggggtgctgcactctactttataaagggtatcccatcgtcctgtgtaagccccgagtctgctgcaccgggtgataatgccagactgcttgggcgctgctgcacatcctcaccaaactcctgaactcctctctggaccacacatctcctgtgtgggctctgtctcccacactctgtttctggcacaaatctacgtctcttcaagaagaatatagttccgagttttccaggaaactcttaattgatgtctagtcaagatgacgtgggtacagaatgacagaatgggagtcagatgtttcttgatgctagtacatgcttgctggaaggcagttatgagcctaatttgcaggagcctcatccattgtaacatcacctccgtagtcaagatgacacagctaattctgaaacatatggaatcaaggcagaaaggtctcatcctgaacatttcttctgggatagccctgtttccttggcctctctactccatgtactcagcttccaaggcgtttgtgtgcgcattttccaaggccctgcaagaggaatataaagcaaaagaagtcatcatccaggtgctgaccccatatgctgtctcgactgcaatgacaaagtatctaaatacaaatgtgataaccaagactgctgatgagtttgtcaaagagtcattgaattatgtcacaattggaggtgaaacctgtggctgccttgcccatgaaatcttggaattggatctctctctgtctttcatggatggtagaaggattcatggctccatgcgctaaagtctaccaaagcattcctttatctgctgggacttaaagactctggcaagagatattgaactttctcaattacttgctatttttatgtagaacctcaacaatgtgcataatcaccaatgtaactcacactacaaagcagacatgcagagaggatataaagtctttattttttctgttgctgatctggtctttttccagatcaccacttgctgcaggaaaattcatcgaatgtccaatgagtctaaactgagtttgatctagtcatctcaactggccatttaggaa

SEQ ID NO: 339337 - DNA, 433 bp, Homo sapiens
ttaagcaggtggctggctgggctccacccacagagtttctgatgcaataggtctggggtagagcccgagaatttgcatttctggcaagtttccctgtaaccctgatgctgtggtttgtggactccactttgagaaccgctgcagtaaatctatcttaatgcatatacgtgtccctgcagtaactcttagagacacgtaggaaccaccattcaccaatcttagcacctcccaacatttacccagaaccatgtcccatttttatttggggcaatgggctgtcctcttcaatgtctgctcaggtaatacaggagcactgggggaaacttcatgggcgagggggcatttggatccctgttcattaaaaaaactgttgtctctcgtgtagagcggactacagggaggagtgtgaagattatacaagcagattttacaa

SEQ ID NO: 339338 - DNA, 458 bp, Homo sapiens
tgaactcctctctggaccacacatctcctgtgtgggctctgtctcccacactctgtttctggcacaaatctacgtctcttcaagaagcaagttccagggttgctcctctgcctgtgtgtgtctgtgtttgtgctagtgtctgtgtccgtcctcttgtcctttctctttatctttggtcattctagtggtttctttacctgccctccatagcccagaacctctaccttatattatacaaccatttgtctttctgttctcctggactcacataggctaacccctcttcctccagctgagaatggagtagctccctttgaaaaaccgtatttatattcctccaggaatatagttccgagttttccaggaaactcttaattgatgtctagtcaagatgacgtgggtacagaatgacagaatgggagtcagatgtttcttgatgctagtacatgcttgctgga

SEQ ID NO: 339339 - DNA, 464 bp, Homo sapiens
agcctcatccattgtaacatcacctccgtagtcaaggtatgtgatcaatatatgtgcgaaatgcattaacatgtagtaacttgaaatttggcaactcaggagaattgtgcccatccactgtagaagcaggattctttgaaatcgaaccacacttagttgagaggccatgtcgtggtcttgtaattgtcttgttctgtttttcatctagaaaatacagtaatggattcaactctcccttgtatctgaattctatttctgctttcagttttgtcacacgttggaacatactaagctcgatgatgctgaaacgtattcaggattccaaggcaattctaaaaaaaattagtatcttcctctaattttaggctttgtagatagaggaaagctcactctggaaaactgacggagggcgtggcttggattttctggacttttgttgttcaataaatatttgttaaatcaaa

SEQ ID NO: 339340 - DNA, 1144 bp, Homo sapiens
tacacagagagccacggccagggctgaaacagtctgttgagtgcagccatgggggacgtcctggaacagttcttcatcctcacagggctgctggtgtgcctggcctgcctggcgaagtgcgtgagattctccagatgtgttttactgaactactggaaagttttgccaaagtctttcttgcggtcaatgggacagtgggcagtgatcactggagcaggcgatggaattgggaaagcgtactcgttcgagctagcaaaacgtggactcaatgttgtccttattagccggacgctggaaaaactagaggccattgccacagagatcgagcggactacagggaggagtgtgaagattatacaagcagattttacaaaagatgacatctacgagcatattaaagaaaaacttgcaggcttagaaattggaattttagtcaacaatgtcggaatgcttccaaaccttctcccaagccatttcctgaacgcaccggatgaaatccagagcctcatccattgtaacatcacctccgtagtcaagatgacacagctaattctgaaacatatggaatcaaggcagaaaggtctcatcctgaacatttcttctgggatagccctgtttccttggcctctctactccatgtactcagcttccaaggcgtttgtgtgcgcattttccaaggccctgcaagaggaatataaagcaaaagaagtcatcatccaggtgctgaccccatatgctgtctcgactgcaatgacaaagtatctaaatacaaatgtgataaccaagactgctgatgagtttgtcaaagagtcattgaattatgtcacaattggaggtgaaacctgtggctgccttgcccatgaaatcttggcgggctttctgagcctgatcccggcctgggccttctacagcggtgccttccaaaggctgctcctgacacactatgtggcatacctgaagctcaacaccaaggtcaggtagccaggcggtgaggagtccagcacaaccttttcctcaccagtcccatgctggctgaagaggaccagaggagcagaccagcacttcaacctagtccgctgaagatggagggggctggggtcacagaggcatagaatacacattttttgccactttaaaaaagtct

SEQ ID NO: 339341 - DNA, 1036 bp, Homo sapiens
tacacagagagccacggccagggctgaaacagtctgttgagtgcagccatgggggacgtcctggaacagttcttcatcctcacagggctgctggtgtgcctggcctgcctggcgaagtgcgtgagattctccagatgtgttttactgaactactggaaagttttgccaaagtctttcttgcggtcaatgggacagtgggcagtgatcactggagcaggcgatggaattgggaaagcgtactcgttcgagctagcaaaacgtggactcaatgttgtccttattagccggacgctggaaaaactagaggccattgccacagagatcgtcaacaatgtcggaatgcttccaaaccttctcccaagccatttcctgaacgcaccggatgaaatccagagcctcatccattgtaacatcacctccgtagtcaagatgacacagctaattctgaaacatatggaatcaaggcagaaaggtctcatcctgaacatttcttctgggatagccctgtttccttggcctctctactccatgtactcagcttccaaggcgtttgtgtgcgcattttccaaggccctgcaagaggaatataaagcaaaagaagtcatcatccaggtgctgaccccatatgctgtctcgactgcaatgacaaagtatctaaatacaaatgtgataaccaagactgctgatgagtttgtcaaagagtcattgaattatgtcacaattggaggtgaaacctgtggctgccttgcccatgaaatcttggcgggctttctgagcctgatcccggcctgggccttctacagcggtgccttccaaaggctgctcctgacacactatgtggcatacctgaagctcaacaccaaggtcaggtagccaggcggtgaggagtccagcacaaccttttcctcaccagtcccatgctggctgaagaggaccagaggagcagaccagcacttcaacctagtccgctgaagatggagggggctggggtcacagaggcatagaatacacattttttgccactttaaaaaagtct

SEQ ID NO: 339342 - DNA, 1422 bp, Homo sapiens
tacacagagagccacggccagggctgaaacagtctgttgagtgcagccatgggggacgtcctggaacagttcttcatcctcacagggctgctggtgtgcctggcctgcctggcgaagtgcgtgagattctccagatgtgttttactgaactactggaaagttttgccaaagtctttcttgcggtcaatgggacagtgggcagtgatcactggagcaggcgatggaattgggaaagcgtactcgttcgagctagcaaaacgtggactcaatgttgtccttattagccggacgctggaaaaactagaggccattgccacagagatcgagcggactacagggaggagtgtgaagattatacaagcagattttacaaaagatgacatctacgagcatattaaagaaaaacttgcaggcttagaaattggaattttagtcaacaatgtcggaatgcttccaaaccttctcccaagccatttcctgaacgcaccggatgaaatccagcactcgatccacagtcaagagtaccacttttcacgatatctctaggatatggacatcttcctccttctctgcacatcaaaacttacctgtccattgtcctatgcttctggggtgctgcactctactttataaagggtatcccatcgtcctgtgtaagccccgagtctgctgcaccgggtgataatgccagactgcttgggcgctgctgcacatcctcaccaaactcctgaactcctctctggaccacacatctcctgtgtgggctctgtctcccacactctgtttctggcacaaatctacgtctcttcaagaagaatatagttccgagttttccaggaaactcttaattgatgtctagtcaagatgacgtgggtacagaatgacagaatgggagtcagatgtttcttgatgctagtacatgcttgctggaaggcagttatgagcctaatttgcaggagcctcatccattgtaacatcacctccgtagtcaaggtatgtgatcaatatatgtgcgaaatgcattaacatgtagtaacttgaaatttggcaactcaggagaattgtgcccatccactgtagaagcaggattctttgaaatcgaaccacacttagttgagaggccatgtcgtggtcttgtaattgtcttgttctgtttttcatctagaaaatacagtaatggattcaactctcccttgtatctgaattctatttctgctttcagttttgtcacacgttggaacatactaagctcgatgatgctgaaacgtattcaggattccaaggcaattctaaaaaaaattagtatcttcctctaattttaggctttgtagatagaggaaagctcactctggaaaactgacggagggcgtggcttggattttctggacttttgttgttcaataaatatttgttaaatcaaag

SEQ ID NO: 339343 - DNA, 437 bp, Homo sapiens
aacccctccaagaccaacaagcatgtcagagagccccacactgctagggaaaacaatggatacaatgaaatagaagccctaactcagtcattttgacagaactgagttttacggctaggaaaatctagttcaaaaactttgtgactcctttcaccatctcctctctccttttgtacgttttctttacactgtaagtgaagacaccatagctaaggaagaaaatcccacgcgagtgtgaatcagaacagattattcactgtgataaaaactcaggccaggcatggtggctcacatcccagcattttgagaggctgaggcagcaaggaagagcccagggtctgtgtcacagtgggtaccgcaaggctaaagaggccccatctcccatgggacccacagcaggctaaagaggccccatctcccaggggacctgcagctct

SEQ ID NO: 339344 - DNA, 685 bp, Homo sapiens
aaaaggtggaattttggagcatttgtggccttaggcaagtcactttgcgaattttcctgagcctcagcttccttgtctgtagaatgggaattgtaccctgcaagcctgtggggaagattagatagaagagggtttagcattttggactacataaaagataattttgttgttattttttacaaatgtgcttggcagttttattcacagtacccgatacttagaaacaactcagatatccatcattagctgaatatgtaaacaaaatgtagaaaatccatatactggatggagcattacccaccaataaaaaggaacaaatagtgaaacaaccctgccacttagcagtttattagttggctccaagttcaccctcccgtacttgctctgctttgactaaataacttctgaagtatgtatttcagctggtgaagagctggactctttcacctttgcagtgaacaacatgttgggctttgtcaatagagggcactagagggacattacagaggaaaggggcttcttagatttggtggacttttctttttttaagtttttaaatattatcatggtgtcttaacatgccaataatgttgacctacggaattggtataatctcaaaatcttaggtgtcagtgttaaatatatgtttcacttttacttcatcgtcaccccaagcaaaaaaaaa

SEQ ID NO: 339345 - DNA, 143 bp, Homo sapiens
ggcaatgaaggaaagaacttccctagaaggttgtaggggtccccagatctttgtggctcactgtcacgagtatttccaggtggatatttgagcagcagactgtcattgggaagcagggcctgggctctgggccgcattggaca

SEQ ID NO: 339346 - DNA, 836 bp, Homo sapiens
agatggggtttcgccgtgttggccaggctggtctcgaacgcctgtcttcaggtgatccacccacctcagcctcccagagtgctgggattacaggcgtgagccaccgcacccagccaaaacagcttttttaaaagcagtgaggatagtagcaagtagagtgaatgcccaataagtcccttcctttcacgggcgataaccatgaagacacattggtgccgtttgtcacattactgtttctctgatgggactcattgtgaatgtgccatttgctgctgctttgagctttgcatttgtgaaacaggctgtgacaaagggtcccttagatagggattctagttgtgcttgaccacggtcagtcatgtgagcatcagtgagtctggtttccattgtagcagagcagcaggctttgcctccttctggacctgcttggcactgcacactgccaccaacagtggggccagtgctggaactgtgtggcagagcccagacactgtgtgttgacacgtgaggtctcccccgcttggtgacgaaatccttaacttgttaagaagttgtgcacctagtgggttactcaggagttctaaaacggttctgtgccctactttatgccacccagaccagaatagttctaggaggcaaagtgagtaatatttgggtaaagagaggttacaaccagatgggaggatgaagctgggcctccgtggtgactcaggagtgaagtgaaagtggctaaatcattgtctgagccttcgggaacgttgttttgctagagccattctgctggcacaggagcgcgtgttcctctgaatgtagtgggggaaaatgcggaatcagat

SEQ ID NO: 339347 - DNA, 217 bp, Homo sapiens
tgaatactttttaacttctatattacagttatgatttcaaggtttgtacttccttaatgtaaatctagggaaattgaaaaataaagcaccccacttccagtttctacatttataccacatctgttatcttacttatagatataatatccaactccttgaggttattatgtttataatgaactggtttatgttttcattccagatgtgtaaatagtag

SEQ ID NO: 339348 - DNA, 489 bp, Homo sapiens
tctcttctagttattttgaaatatataatgtattgttgttaactacagtcactcctgtatgctatcaaacactagaacttatttcgtctaattgtatgtctatatccattaaccagcctgtcttcgtatcttcctggaacccttcccatacacccttcccagcctctagtaactacctttcttctttttatttatttttttgacatgacatcttgctatgttgcccagactggaatcaatctcctggactcaagcaatcctcctgcctcagcctcccatgtagctgagactacaggggtgcatcacgactcctggctaaagacgaactttttttagttcccacatcagtaagaacatgtgatatttgtctttctaggcctggcttatttcatttaacataatgatctcaattctatccatgtggctgcaaatgacagaatttcattttcataaaaaatatggtagaatataattccattgtgtatatat

SEQ ID NO: 339349 - DNA, 463 bp, Homo sapiens
tgttgttgcccaggctggagtgcaatgacatgatctcggctcactgcaacctctgtctcctgggttcaagcgattctcctgcctcagcctcctgattagctgggactacgggcacccgccaccatgcccggctaattgttttgtattttcagtagagatggggtttctccatgttggccaggctgatcttcaactcctggcctcaggtgatccccccaacttggcctcccacagtgttgggattacacgcgtgagccagtgcgcccggcctgacccatggattattaagtatgtggttttattttgaagtgtttgcagattgttttgttaatgatttctagtttaataccattgtgattggagaacaaactgcatatgatttcatttcttttaaatttgttaagatttatgtgtcaggttatgttctcagtgaacattctgtatgtgcttaaaaagtatatgt

SEQ ID NO: 339350 - DNA, 395 bp, Homo sapiens
tttatttctcacaacatgtgtgtgaggtggcattgctcttattttatagataggaaaatatgctcaccaaagtcaaataccattctcaaagtcatctagttaatacttgtcgattacatgtattctgcaaaatctttaaggaaaattccatctcaaatggtaaaaacaaagcagaaggtttattatctcacatgacaaaacactcaaaggctcattcattcagcagctcagtggcatcatcagaatttaggttctttccaactttctgctctgtcaagcttgtaagctttgttttgctcaagggtgcaagatggctgcaggagttccaggcattgcatgcgtaagaagaaggccgtgtctttgtgcgtgtatatgtgcatgtgtatgtttcctgt

SEQ ID NO: 339351 - DNA, 415 bp, Homo sapiens
tcactaaaatttttacctccaatattaagataaaaaatcaccggcgtaggccggcatcttattttatagataggaaaatatgctcaccaaagtcaaataccattctcaaagtcatctagttaatacttgtcgattacatgtattctgcaaaatctttaaggaaaattccatctcaaatggtaaaaacaaagcagaaggtttattatctcacatgacaaaacactcaaaggctcattcattcagcagctcagtggcatcatcagaatttaggttctttccaactttctgctctgtcaagcttgtaagctttgttttgctcaagggtgcaagatggctgcaggagttccaggcattgcatgcgtaagaagaaggccgtgtctttgtgcgtgtatatgtgcatgtgtatgtttcctgt

SEQ ID NO: 339352 - DNA, 215 bp, Homo sapiens
cctctcttgccctgttccctattattagaaagttttatctagtcataaatcaactacctacagttccttataagattgatttatatttctaaatcaaaatgaaacaataattgctactatcctctcagttccagaaaaccacatatgctgtcctcaaaccccaaaccacaaatgctaaaaattatgaataagaggaatgtctatttgcttacatt

SEQ ID NO: 339353 - DNA, 309 bp, Homo sapiens
taaatcgcctaaaatcacacaactaggaaaagagatggctccacagccaggacacaaaaccaaacagactctggcttccgagtcttctcctgaacactgagcaaactacttctcaagacaactgagaggtcatctttgtgggtcctcacttctcagaagaggtcaccaaaatacaaggcactaaaactggcatttgattaattcttaagttactaggctaaaatattaactcagttatcagcaggtacgcaagagtattacatccattcacccagacagaacaaagatcactggcttcatgaaatttat

SEQ ID NO: 339354 - DNA, 341 bp, Homo sapiens
caggtgcagtgactcacgcttataattctagcactttgggaggctgaggcgggcgatcacgaggtcaggagttcaagaccagcctggccaacacagtgaaaccctgtctctactaaaaatacgaaaattagctgggcgtggtggcaggtgcctgtaatcccagctactcaggaggctgaggcaggagaaatcgcttgaacccgggagctagaggtttcagtgagctgagattgcgccactgcgctccagcctgggtgatagagctagactccatctcaaaaaaggaattttttaacaagcaagtgctcatgacattacaataataaattgtcctctagtta

SEQ ID NO: 339355 - DNA, 96 bp, Homo sapiens
agaaactgggaggatggggctttgggagtccatggcggaattcagcaagtgaatagtgctaggccttagagacagacatacctgaatatcaattcc

SEQ ID NO: 339356 - DNA, 384 bp, Homo sapiens
caatttattcacataaacttctctttactgagagtgcctgctgtggctctgcaaagtaagttattttaaaaattaacttcaaaattgaaagattttagggaaaaacttttgaacctagattcttagatatttgccacaaagcttaagactttgatctccaagtcctctcctgcagaataaactttctatatttaaatatcatctttcaacttagtcacatttcatttgtttattcagagtaccagctatatgctaagccccattcaaagatcttaggctatagatgcaaataaaacaaaaaccctgcccttagaaagattacattgtagtgaattaagacaatcaatcatcaaataaacaagtaagtatgtattacataaaatg

SEQ ID NO: 339357 - DNA, 200 bp, Homo sapiens
gatatatgcaagtggcagatctggagggcagttctctcaaaagtatccgtttgcgtctactctggggtccacacaactgatttggaaacagctcagtaggtcctggtccaggcaaaccttttcttcaatatcttggataatgatagtgatgccgggcctgccaaagggagatgggaactgggtgatagggtgccagctat

SEQ ID NO: 339358 - DNA, 297 bp, Homo sapiens
tatgagaagcttattatttttgaacgtctgcagcagggccaagccttagtttgtgtgcatcttcatttcctcctcaagagatttaaaaaaaaccccagttagacctcctgaagtccccttccaggcacctgcatctccttcctcatggttatgtgttaatggccttgatccagagctgcaaggcagccctgcaggtgtaggcacctgccaaacagatgagcactcacacgtggtgcaaacaagcacaagtcctttagcccgatgcccatccagccatttaaacacacaccagtgcct

SEQ ID NO: 339359 - DNA, 452 bp, Homo sapiens
gtttaatctatacatttatatattaagtatatgattatgtatggcttgcaatgttgactgacttgtggagtggcttcagcctgtgtgcccgaggctctgcctcctgagtgaacaggaagtactaaggagaattgtctttttgggaactccatgtggctagtggtgtttatgattgaaattgcatcaataaaagtctgactttgtggaaagacacaaacgtgcggggacctggttatataatgaatttgccattccgcttgaaattccagtcataaatgaaattcagagaacacttctgttaggagtaccacctaacctgcagttctcctacatgaatgctctctcggcatgcagagccatgcaagatatactagacgcgtaattatcaggtacccataaggtaacatttatggcaaaacctgaaaaacataccaagagaaaggggataggaa

SEQ ID NO: 339360 - DNA, 1100 bp, Homo sapiens
aacatgtaagactactgttcacaatttggacattttcctttcaaacacatttttcatgaatatattataggaaagttaaaaccatctctattctaaaaggaaaatctaccatttggctcagagagaaagttactgagtttgtctatgtgattttaagtagtatttgattagagtattaaagaaatggggtacttcaagtaacataacacctgatatttaaatctaagttttaaaaatgtatttcacccattgttaatgaaagtgtttctaagatgtaacccctggttagctattccgtcttcttgccttgatgggttgactggtggtgaatgtgctgttgtcattccattgacagttcgggattttgtggtggtctcagcatattagcatagatgtgagttgtaattttataggattatggaactgtaattgtggaactcctgcagggcagactctggaggctagctttttagaaaactaaaacctccagtataaacttaatttctgtcatttgccccattttcttgaaagttaagtgccagaaaagaaaaggatcgagtctctcttttctttctacaataaaacagaatatactttctccagggtttggtggtgggttcctttttcctgttgaggtggattctgagattgaggaggggctggagaagacagagcatgagggaaagagactgagaacatactcaggctgccctcgcctccttttccctttcgtgctcctgtctcccatctaggaggaccagggctaccagtccttgtggggacaagtttgagtaggatcaagagacatgtaactgcgccaggcgcggtggcttacacctgtaatcctggcactttgggaggctgaggcaggtgaatcacttgaggtcaggatttggagaccagcctggccaacatggtgaaaccctgcctctactaaaagaatacaaaaattagccaggtgtggtggcaggtgcctgtaatcccagctactcgagaggctgaggtaggagaattgattgagcctgggaggcggaggttgcagtgagccgagatggagccactgcactccagcctggtgacagagcaagaactctgtctca

SEQ ID NO: 339361 - DNA, 295 bp, Homo sapiens
ctgtgttatgctctgagtctaaactttgtctaaattatcttttgcacatagttctatgaataggaacttgaaacagggccttcctgatacatatattgctctctatgaagaaacaaaatttcatgggatcagctacatgagaatatgcactatctattttaactccttttttttgttgaaattctttgttgtcccttaaagatattttgtttgttatcacattaaattttctctgttgtttcacttccttaaattacacttaccaaagtggttattacaaatgttcaatatgttt

SEQ ID NO: 339362 - DNA, 760 bp, Homo sapiens
gggtatgtcggcaggatttggaagtgctcaagcaggtggtgggagagcttgctttgatgctcccaaagaaagtgttgcccaggttctctcctgcttgtaattagacctgtgttccaccccagactttggctgcagctgcgtgaccctggacaattcactgtgaatgttgcagccgtggtaacctcatccataagaacactgggaccccatgggattgtgtgtggacacagtgagatgaaagcttgcaggcaccaaccattgctctgaaatgggagccagtgatgggatcagaggttgttaattatactagtaatcaactgagccctggttctcaaagcctgttccctggatcagcagcagcacctgctaaattctgatggcgtttgatagaaatgcaaattctcagccccacttcccccaaagtccttgattgaatttattaatctgccgggtgtgatggctcacgcctgtaatcccagcactttgggaggccgaggcggatggatcacctgaggttaggagttcaagactaacctggctaatgtggtgaaacccccgtctctactaaaaatacaaaaattagctgggcgtggtggcacctgttatacaaaaattagctgggcgtggtggcgggccctgtaatctcagctacttaggaggctgaggcaggagaatcgcttgaaccagggaggctaaagttgcagtgagccgagatcatgccattgcactccagcctaggcaataagagtgaaactctgtc

SEQ ID NO: 339363 - DNA, 243 bp, Homo sapiens
aaatctgcgttcaagtacttgaaagacaacaaggataacttattcctaagagcccacagtccttcccacatcgtcgccatcaccatcactctccccattttctgatttcatttctcaaatatcacctgggaagtttttacctcctttttctttattttaatgattagtatgaaagattaatttttcctcattgccaagggcatgatattggagaacaggtaaatagatttatctgatgcttta

SEQ ID NO: 339364 - DNA, 180 bp, Homo sapiens
aacctttgtgagtcagccatgcccgcaaagcgtgctgtgttttagtcctggtaggaatatttatcagagttcacactatataaaacccaacagcttcaactattgccctttcaacagttttgccactgaccggataaaaacggtttcagtctttggatggatgtgtttgtggtttgtaac

SEQ ID NO: 339365 - DNA, 504 bp, Homo sapiens
aacacacaataggtttggtagaaattatgtgaaatgagataacaaagaattttacaatggctgttctgcacattttaaattccaaatatctcacagtaggccagacactttgggattacaggcgtgagccaccgcacccggccaatctgtataaagcttttaaaagattcctcagagtctggattttagtccaactctttgtttcccaactgatatatctgcctctacgctcaagccaaactcaattcccacacaccctgtgctctcttggcctctgaacttttttgctcatgctgttaactctacctaaaatgtccagtctaaaatcctcaccatcccccagccctttcctccacaaaggaatccctgactccccactccccacacttcttatacccactcccatacctcccttatggcatgtaggcctgtaccattttctacctcataccagtatcttgctcctcaaaaacaccattaggtcttgagcgctttgtccataac

SEQ ID NO: 339366 - DNA, 363 bp, Homo sapiens
tttcatttcctttgggactatgccctgaagtaggattgctgggtcatatggtagctctatttgtactttctttaggaatccataccattttccactatttccaccaatgacactagtctacattcccaccaacagcatgcaagggtcccttttctccacacccttgccaacacttgttacctgttgtctttttgataatagccatcccaacaaatgtgagcccacccttccttttaactgtcattttaaatatagcccagtggctgggtgcagtggttcacgcctataatcccagcactttgggaggctgaggcgggcagatcacctgaggttaagagttcaagactagcctggccaatatgg

SEQ ID NO: 339367 - DNA, 511 bp, Homo sapiens
ctccctacaaagaaaattcctgctaagccaatgagtgaggtgagaaaattggaacctcagttgcccagtcctttctctgcaatatgcataagccgtggctgcctcagagagccccagtctgccccacctctctcaaggtgcaggagctccccccacacccgcagtgatgcctcctggtactggcctagcacctaagcacaagccagtgcagggctgattgtcaccatcattcactgggatcaagcattgcctcaccacccctcaacctcaccctccactaaaggaatttacctataacacacaaaggcagaaatgccagcactgtgctgcccacattggcttttttcccctccaaacagcctatctatatatcagatgtgctacaaaagcctggaggatgggaagtttttcatctttttttttttttttttttttttgggaaagggggggggaggaacgaaggggatccctaaaaagccacccggagggtttccaagttgggcagggcccg

SEQ ID NO: 339368 - DNA, 650 bp, Homo sapiens
ggtatacaggaaatggataatactgtaacaatctgcagctgtctcatatgttatataaagaatgaactcataacagtgagaaaagggtatgtagtgcctttatgaatactaaaaaaataggtcaaattcctggaatatgtatgacttggttttattataattatgaaaccctttaacctattattcttttaaatacaagcagaaatacaagacattgccattaccagttagctttaatagactcaagaaacaaaatagtctcttaagttttatgtaagtgataaaataaactaagagttcctcatagatataatacttgaaaaatggtttctagttagtgacggtggaataaaatcattttcttactctcttctcttgaatgccaatgaaaagaaaatcaaacaaaagatagaaaatgtcaatttcaaagacacaaacaatcaaacaaaacttcaaacttgagattatgaagcatgcatgccagttgctgtagataagtcaaaatgaagaaggaaccagagagatgacaccttagatcattaggaagaagtaaattgctcttaaaaccaattgtaagaatttgcacaagctatctaaggattctttgattacagctgagatctacagattaggacaggccagggaatgtt

SEQ ID NO: 339369 - DNA, 559 bp, Homo sapiens
tttctgttaatgttactgtaggttctgggtttttccttgcccccctcagagcaaagatgggtagtttttaagcaagagtaaacagtccacctcttgctgtagagtccatccgtttgaggtctttttgcttcagagtatcttcccctctaccagcatgcccctcagttgctttttcaccattagaggaagatgaggatattgttttctctgtgcttgagattgatactctatcacccctcagtctctgtggtttctgttttgttcctttagatgacatctacctacttaggttgctgctccctatgggatgtttggaatgaagaagggaagggagatgtgtggaggccagtagccgtctttattgggttgggtgttctcattagcatcagagtgccctttttgtttacttacttctgttaagtctaccacttctggatctcactgcagattataaggcagggcctctggattgaagttaatgtgtataaatttttataaagctcctcagatgagcctaatttgctcctattagtgagaaccacgattggataattgcaac

SEQ ID NO: 339370 - DNA, 262 bp, Homo sapiens
catggcaggctaaggggtggtggtggggagtcatcggaacccctcaaatggtaatcatactccatggcttctgtctgtatccagagtgatggtggcggatgtatcactctggttccaagagcaactagagagcttgtcatctgtgctgagatgcactcacttctgcaggttttgttctctccctgggccatcactcctcagaaagggtggaagaactctggaaaattttcacctatggtctcttcaaatactagttttctgc

SEQ ID NO: 339371 - DNA, 357 bp, Homo sapiens
tcaattttgccccaatttacatatggaaatatttaacacgttcaaagggtcacatagacatcaacattttggttttcatgggcaaaaccgtaatgacaaaggacaataagaactaatgcaggccagtgcagtggctcacgcctgtaatcccaaccctttgggaggccgaggcaggcagatcacttgaggtcaggagtttgagaccagcccggccaacacggtgaaatcccctctctaccaaaaatacaaaaattagccaggcctgatggtgcatgccggtaatcacagctacttgggaggctgaagcaagagaattgcttgaacccgggaggtggaggttgcagcaagctgagacca

SEQ ID NO: 339372 - DNA, 118 bp, Homo sapiens
aaaggtggaatcctagcccatgcttttggacctggatctggcattggaggggatgcacatttcgatgaggacgaattctggactacacattcaggaggtgggcaaaacaaacaaacaa

SEQ ID NO: 339373 - DNA, 669 bp, Homo sapiens
aaaggaacacagtaaactgaattgatccgtttagaagtttacaatgaagtttcttctaatactgctcctgcaggccactgcttctggagctcttcccctgaacagctctacaagcctggaaaaaaataatgtgctatttggtgaaagatacttagaaaaattttatggccttgagataaacaaacttccagtgacaaaaatgaaatatagtggaaacttaatgaaggaaaaaatccaagaaatgcagcacttcttgggtctgaaagtgaccgggcaactggacacatctaccctggagatgatgcacgcacctcgatgtggagtccccgatgtccatcatttcagggaaatgccaggggggcccgtatggaggaaacattatatcacctacagaatcaataattacacacctgacatgaaccgtgaggatgttgactacgcaatccggaaagctttccaagtatggagtaatgttacccccttgaaattcagcaagattaacacaggcatggctgacattttggtggtttttgcccgtggagctcatggagacttccatgcttttgatggcaaaggtggaatcctagcccatgcttttggacctggatctggcattggaggggatgcacatttcgatgaggacgaattctggactacacattcaggagg

SEQ ID NO: 339374 - DNA, 242 bp, Homo sapiens
gacaacaaaaacaaacaaaagacttaattgtctcattctattctaatattttaatgaccttttactacaagccaccaaatatacttttgggccatagatgtaacatgaagtttaaattaagctgccttaataaacaacacaagctaattaagattgcttgagaacactaagatttttacaactgagcaacaactttagaatcagattctaaagctagcagatatcatcttctatgcacatgt

SEQ ID NO: 339375 - DNA, 411 bp, Homo sapiens
acacacacacactcactcacacactccttcttgactggataagctaaagtgaaaaagagattatgttttccatagcagaaaagctgacaccaaattcagcaagcagattaattatgcatgtgaattgcaatctcccagataatttgctttccttctttttctggttgcactttctagagggaagtgaattaatggaacaattaccttgtatttaaataataccctgcattttgtttcctcagtctggtagtagtcactaaaatttatccaagctatgtatccaaatgtgtgaagtaaaaggatacacaaatgttatttgtataaaatttgcatattttccctattcagcattccttaggcaaagtttaaaattagaagtggatctttattaacctcaggtgcaactttttt

SEQ ID NO: 339376 - DNA, 956 bp, Homo sapiens
aggctgaaagaatgagagttgtgaccaactcagtataccactggaggctatatgagcaaacagaaaactgttcttatgaaagcaggatgttggaaaactgataactgtgtctgccgccagaaggggtgctgagggcagtcaggcctcatgcacagtgttccttgtgattatctataggaacatctgaagcctgttgtacaaagaaagcaattatgtggacctgtgataaatcaagcagtggaccaaccattagctctccctccctgctctttctacctaacaaatatgaaagactgtagaaactcagggctgcctttgctctctagaagcaaggagcccctgaccccctctttcaaaataggtcttttcgtctttgtctttacttctgcattcgacccccttcattgaccctgtagaaactgtcagtgacattctcttttcccttgtattttctaaattttctataatttgcatgttattttaataattagtgagggcatcaaagaagtggatttacaatggtgcaaacattggcagtttcagttaggaactcatattcctgttgggtcagagattgagccctggaggaaacctctggtctgagggctacagggaagctcctgtttcatgcctattcctgaaattaggcctgtccctctgatttagggaagatttattcctctgtttgtctgcatactacagaaacagctgtgaaagaatctgcaggcatcacttacaatgtaacttagcatattggaaatttctgttgaggacatcaatggctttcatgtcctctggagtctactcaacaatttttcttcaaagtctaaaggagattttttcttccagcataatattccgtgcagtgcagaaagtcttttcttttgccttttggtaaatggcctaagagattttacagtttattgagagaattcctatgccattatcattaagtt

SEQ ID NO: 339377 - DNA, 299 bp, Homo sapiens
ctgtgacttatcaaaatattagaatctctcaagaggctaattgcccccaggttcttcttgcttatgcattatcttgtggatgacataataaaatcaccacctcatttaccattcagttaaggtttaattgagtccatctttttcccccctcaaaatatgcaggaacttagagaatcaaaacaaattttcatctgtaaaataagaggatcttcataaattgcctctttataagttaggtcctatttataaaattcttgaagttaaaacctgagctagcataataaacatttttccttgat

SEQ ID NO: 339378 - DNA, 126 bp, Homo sapiens
ctgttagaaatattttataagccatttcacactagaaaacaaacattttttcatcagtatccctgatcaaattaaattaattccaaactatatttagaatattaaggcaaatacatgatcaagttt

SEQ ID NO: 339379 - DNA, 226 bp, Homo sapiens
caatataggagatgttactgccaacagataattatttagctttgaaataaatggtttgaaaacttgcttttataaaatatttgaagaaatatcaacttctttattcttagtaaggaaaaaattcattctaaattttcacattgagagagggactgctgattatagttggtgtgaatgggcttacagcttaaaacatttagacatcgaattgattttaagtgtttta

SEQ ID NO: 339380 - DNA, 468 bp, Homo sapiens
tgtttctctgtgtccccatagaactctggatgctcctgcataacccagctaatccaaaaggtcctttggaggtaggactctgtgcctgtctctgaatcccttttatttagcacaggacaggtggtagatggaatgtttgctaaacgaatgattcaacagaggtaagaataagaatgtcatgttccagctgggcatgatggctcacgcctgtaatcctggcagtttgggaggccaaggcaggcagatcatttgagggcacgagttcgagatgacccgtctggccaacatggtgaaaccccgtctccgctaaaaatacaaaaattagctgggtatgatggcacacacctgtaatcccagctactcgggaggctgaggcacaataatcgcttgaaaccgggaggcagagattgcagtgagccaagattgtgccattgcactccagcctgagtcacagagtgagacgctgtc

SEQ ID NO: 339381 - DNA, 178 bp, Homo sapiens
tgcctcccccaaatagttaattttatattttttgtactttgtttaaaaagagtgataaatttaggaaaataccacctgtatgcattttccttaatcttatttactaagaccttatgtactttttatttttgagatagggtctcactctgtcactcaggctggaatgcaatgacatgat

SEQ ID NO: 339382 - DNA, 1005 bp, Homo sapiens
attaatttgtgtggttccttaattaaaggctatgtcctgcactaggtagtaaactctctgagtatagggattgtaatactttcctgtgactgctgtaactgagcctttaaaaggccatttcaccgttctgtcaagccagccgcttcaggacgatggggaacgtgggaagaccagatagttccacggcccatcgctgtgctgtagttgcagttgttcgctgtcaggtggcgagtgcagatatgaaccatctggaagccaggacccagtgtgttttcttcctcgttcggctggtcctagggaactccttacgaggcataggcatcagcaggggccacactcacttggaagctctgggtgaacatctgtttccttgcctttccagcatctagggctacattccctgcattccttggctcacagcaccttcctctatcttcagtgctagtgtgtagcatcttctctctgactccgcttccccctgctgctgtcacgtggccttctgctcttctgtctggaatctccctctgcctctctcttagaatgacactgaggatggcgtttagggcccacccagatcatccagaatgatctccccacctcaagatccttaacttcatcacatctgcagtataagataacatctttttttggcatataagatagcattcacaggttccaggggctaggacctgggtatcttttggaggaccacgatgctgcccatcacagggattatgtgttttctttgtagcctcacaagctagtacagcacctgggactgggtaagccagtgacatagcgaatgaatcaataaatagtgttgtattagtctgttctcatgctgctaataaagatataccccaggccaggcacagtgactcatgcctgtaatcccagccctttgggaggttgatgcaggcagatcacttgaggtcaggcattcgagaccagcctggccaacatggtgaatgccgtctctactatacaaatacaaaaattagccag

SEQ ID NO: 339383 - DNA, 130 bp, Homo sapiens
tagacgtcttagctcctgaagtacaactttaatgctatatgaattttgtcattttgctaacactggtgtgctgcggtcatccaccatcccactggagttatttattccattcatattaattcttgttaca

SEQ ID NO: 339384 - DNA, 447 bp, Homo sapiens
tgtatgagccgtaagaatgacttggagctcttaaccctctcactcctacaacacagctgctgggtctcagatgtccctgcaggatcacactgcttcggtcccatcaatgccatgcagcccccactgcccagggaacacagcacagttaccatagttcttagtgggcatgagctccatttccttagctaagcctcagtcctcctgtctaagcctcagtctaacctgtttgctgattccactgcataatcccgacacctggcaatgtgcagggtataacctggcactcgatgtatacctcgctgctgccgcgatgccctcttgcagggagatcctgcctggagcatggtcctggccagctgggcaccaggtgcctgccctcctgccacacttttagttagcacagcgaccctttccagggcgggcaagttcccaatttgaagctatgga

SEQ ID NO: 339385 - DNA, 856 bp, Homo sapiens
ggtgacacgcaaggattccagccttcatgagttaaaagcaatttttgtctattttgtagcattacaaaattaaatttcagtctttactatttttcaatatacagtttttttattcagctcattaacagtaaggttctacttacaggattaaagcaaatttaaacttattgttgaatatgaaaagttgtaatcaacatatattatggtgttatttaaaataaatattataatgtactttcaatagggagaataatttttatttagaatcacttatttatatcatactgtcctaaaaataacaaaataatcgttgaaaaattttaagcagtctaacaagattgtgtattgctgtgaaaaagagctgggaaaatgtcctgccgctttaatttacaaagcatgccatgctcctgccacctagtggtaagctttaagagcagtggtttgttgaacaagtacttaagcttgtgacctgttttaagttacaggttgcatttacttgttgacagtgctgtctgttgccttatggaggtgttgcctaggagtctggagcattcatgctgcttctcctaccagctcacaaggagaaaccccctctttagtgagtggaaactcaggcagcagagtcagtggttcaggtagtgctaaatatgccatggaaaaaactcttaaatgatgacaaccaattggacccctctccagggagctatggtaagctgcagtctcttggcacatgtttctagttgagttgggaccctggctctattattaaaagatccctggcaaccggggcaaactgttgaacttctcctgccgtgggtcttctcaagggtaggatatggagtaacttcatctgccc

SEQ ID NO: 339386 - DNA, 217 bp, Homo sapiens
gaggctgaggcagaacgatcgcttgagcccaggacacagaggctgcagtgagttgactgccccactgcattccagcctgggtgacacagtgagaacctgtcaaaacaacagacaaaacaaaaacacaaactcatgactcaacctatgctagcttcaaacttttcatctgaggcttcctcatcactctcagccttcacagaactgaagagttaaagct

SEQ ID NO: 339387 - DNA, 295 bp, Homo sapiens
aagagattgtgtcagaacagggttccaataatgaacttcataagaggttttagataacctaagacattttgaaatataacacaactacaggaaattatacaatacaaatatgtagcttgattaattattataagataaacacctttgttgactcctgatatggcctagctgtgtctttacccaaatctcatcttgaattgtagttctcataatccccacttgtcatgggagggacccagtgggagataactgaatcatggagttggttaccctcgtgctgttcttgtgatagcga

SEQ ID NO: 339388 - DNA, 249 bp, Homo sapiens
atggcaataataatccctttcctgccttcttcaccaggaaaccatgaggacggggtgtaaagggactgtgtaaaatgtgaaatgtagtgaacactaaaaggtgtgtttggactaaggagcacccctgacctagggctcagacctgtacagccacctctgtacagaggtgagggctccctctcctctctcacctggggctaggttcgggaggtggacaacactgagtggcattgagagcatcaacccact

SEQ ID NO: 339389 - DNA, 428 bp, Homo sapiens
ccaccgcacccagcctacctggctactttttaatgttctttcaagtaatggatgaaataattccttaacacagagatcctcaacctttttagcaccagggaccggtttcctggaagacagtttttccatggactgggggcatggttttgggatggaactgttccaccttggatcatcaggcattagttagattctcataaggagtgtgtaacctagattgctcacatgctgagttcacagtaaggttcacgttcctatgagaatctaatgccaccgctgatctgacaggagacggagctttgtaagcttgattgccactcacctcctgctgtgcggcctggttactaacaggccacggactatactggtctgcagcctggggtttggggacctttgccttagcctactgttacaatagtagttggagc

SEQ ID NO: 339390 - DNA, 799 bp, Homo sapiens
tctcacagtggcatctgatggggtttcgggaataattgccgaggtcagatgtgggttagtgcaacctgtgcttctcatgggagggtggagactgagaggcagaagtgatgatatagagggttagaatcacttaattttacttacagaaaaacctaggctcaaagtgttgaagccatttgtgcaggagtgagtttgtagcagagctagaactggagcccggatttcctttgctgctatattttccctttagaaatgcccatttcagaactgaaatagaaatactgtccataggcttctctttcacctacagagaagaaaagcagatttcctccttctgccctggacactagttcatcatctgtcggaagcagtcataaacaagcacacatttactatgcatacaatgtaccgttatgacaaaggaggaccaaaatccaaacaatatcaaaccacaccaaaaaccacaaggagcctaataattactaaggtgatacttccaaagggaggactttatttcttagatgagaatgaaaatggacacattggaaattattggagagccctctggctatgagtccttccacaaccatatggtaccaccgactggcaggagaaatgtgtgaacatgtgcctcctcctcccccaaccactggggtcggtggggtgacggtggcacttttagcagtatcctccgtggtttgagttgaaaataagttttaaaaatcctgtgagtcatggttttgcattgaaacctcttcccactgtgtacccacaaatagttaactaaatagaccattag

SEQ ID NO: 339391 - DNA, 709 bp, Homo sapiens
tggaaagcgttttcttctgctattctgatggaaaactacttctcatgctctcattaatgttatatttgcaatggagtcatgttggcctctaccccagcacactctgatgctgggctggtgataagaggcttgtgagcctgaaattggatgctgaccttgtgggacattgataggacagagatgacatggcaagtaccagcatcacgtctcagaaaatagctcccagaggtttggagggagtttactacaagaagataatggtccttgcctcggatatcttctgtgtgagagatactggaaatggaatgcttgactgataactgaagaagggagaaagtcctatgggagtggcccccaaatatctctagaagagtctccacaaggttgcccttcatttaggcgagaaatgaatcttttctcttatttgggtgagagcacagggattcttataactcgtctgtcctcatggctgggacagagccagggcgtagaagatgtcattgaaccctgctctggtcaggcctagctgttttcacattagaccatttctgggcttttggtgtctgtatcaaaaatcattatgttctggctgggcgcggtagctcacgcctgtaatctagcactttgggaggccgaggtgggcagatcacatgaggccaggagttcaagaccagcctggccaacatggtgaaaccctgtctctgctaaa

SEQ ID NO: 339392 - DNA, 473 bp, Homo sapiens
gggaatagactgtgcagatatctgggggaagagcatcttggcagagggaaaagcatgtctaaggtcccgagttaagagcaagtgttgtacctttcaggagcagtgagaatctccttgtggcttcactggagtgaatgaggaagagagaaagaggaaatgaaataaaaccagaacagtagaagggggctgaatcacttagggcctggtagatcactgtgagaatttgcattctaggcttttattctagataagaagggaagccattgaaggttttttgtttctttttttaaacatgactaccattgtcacacctaactaagttagcagtgattccttaatatcacctaattctcagtctgtatttagatctctccagttatctccaaggtatcctttcacagatggtttattccatcaggatcaataagttgcatttgtctttttgtcacttttattttatgtcagctcccccc

SEQ ID NO: 339393 - DNA, 289 bp, Homo sapiens
aaaataaatagggttttgtgtgcaaggaccttaaatttaggttaggggtatgagcagccaaggagcgggggtgtcgggcaagcacagagtcttctttttaagaaatccattcaagagctctaaattgctgtttctgtttcaattatgtgacaatttcaagggtttagaaaaatctaataaaatggtcttgatgatgcattctggggagagagtgcttcagaagatctaggagaataaattccttgggggtcaagagattctcgttcctgccaccttgggccttccttca

SEQ ID NO: 339394 - DNA, 516 bp, Homo sapiens
tgtagtggctagtgtctcatttctgtgcttaggaaagggtgtcagaataacagagactgatgataaaggaaaaagtgtttcttttttttctatttctcaaatgtataaaaaaggaagtagttgattttcagtaaaaaagttgcccactttacaatctgagaaatatattaacaacaaaaattatttttttaaaaagatggatatttgggttcaaaattaatttaaattttttttttttttgaaacggagtctcactctgttgcccagactggagtgcagtggtgtgatcttggctcattgtaacctcctccgtctcccaggctcaagcggttctcctgcctcagcctcctgagtagctgagattacaggcatacaccaccaagcctggctatattttgtatttttagtagagatggggtttccccatgttggccagggtgatcttgaactcctgacctcgagtgagccgcccgcctcagcctcccaaagtgctgggattacaggcgtgaaccaccg

SEQ ID NO: 339395 - DNA, 276 bp, Homo sapiens
aatataatgtagtttgtgtgatggtagcttgttagtttatgaatgttcaattccctatcagactttagcctaattgttttacattccagtagataatccctaccttaatcaataatttcattatgggccaggcaatgtggtttatgcttataattccagcacgttggaaggctgaggtgggacggttgcttgatgtcaggcattcaagaccagcctgggcaacatagcaagagcctgtctcaaaaaaaaaataatacattaaccaagcatgttggc

SEQ ID NO: 339396 - DNA, 262 bp, Homo sapiens
gctcctgactggctctggggtagcccccctaagtccagggccaggaccccaaacttgcatcttcaggagccatctgtgggtctcccgggaggcaccagagaagccacacttcccacagggctgctcctcccggggggcgccctgttcacgtcagctctgccatcgtccccccattgcccatttaagaagcagtggcgcctgtaatcccagcactttgggaggccaaggtgggtggatcacaaggtcaagagatcgacaccat

SEQ ID NO: 339397 - DNA, 464 bp, Homo sapiens
tcacccacttccaccaacgtcaaaagtttgatactactgtagtacctactcaaattaaataatcttgtcatctgaatcaggttcagccatggtgtagacacttcaggtctagttccataaatacatatccttgaatataatccctcttcgtctgaaaactggtagatactggtttcccaaatacacaacagataataatgatacagatagagggtaactgctttaaacatttctgttcagaaaggggggaatggcaggtacaaaaaagccactggcctataacaattctgaagtccaattatgcaattactggaagttacttaataaggtcaaaagactttgtataattctccatggctcttggctttaactgctggggtctggttctgccctctgagtcatcattcagttgagcagctctctcagtctactccctatcagcataattctgagagcccaaacgg

SEQ ID NO: 339398 - DNA, 509 bp, Homo sapiens
ttctgtgcccaatgtggctgaagagcaggtcagaggagaaacccactgtgggcagagaaggctgttcatgggggagataggtggcagccttcttaagagccagaactgtatctctaatgttgcctcctctgcaaatgaggccaaaagaaatgtaaagttatattaatttgcattttccagattttagagaggctataaaatttgccttgtaaagagagactggctttcagaaaactgtttggcacccagcatctggtaatgcacgttactctgagctgcccagtgaaggggtttgaggcaactggacttaactgtacctaaaggccccaaaacctgagtgggcctgagacagcctcaggagtttgctggcttccaatgcactgtgggaacagacagactcctcttttagaaaaataaagatggaatttttttcccctctttcggttgcagcttatttcaaaggtcatcaaagtaaacaaaaggaaaagactgtggggcattaaaagtca

SEQ ID NO: 339399 - DNA, 378 bp, Homo sapiens
agcaacaggaaaccaaggaagtgagttgacaggctgcttccagcatggggacaggaacgggctgggctgcagcggatcaagctcattgccaggtttcgggcctgtggagtttaggatacaaagcaaaaactgcaaagggcttcagagaactcaggagacgagactgtgcataccccagacggcctgcaggttgagtcattctttccctcccatccgagcttgctggatcctccactgattagattagaacagcggcttcttggcatggccctcgctagggttcatgggggctggtctgtccccaccctacaggagccaacagggaaagagcaagcccttgcctgctcctggggtcctacaccctgaagccacggtcaa

SEQ ID NO: 339400 - DNA, 407 bp, Homo sapiens
ctgaacactgaatgagttcagtgtcgcaatgtcaggagtgtggcaggggtcagattagccaggtgtttggctgtcaggctaaagagggtgggctttacgtgggcagccatcaaaaggttttaaactgagagtgacaaagttaaatctttggaaatccctttcaggctggaaggtgcacggataggaagggagactcctagggcaggtggtggccactgccgatagagaactgagtgggaaagacacactgaggctgaggccgctgcggatggcacgggcacagcaggccatcagtcatgtctgttagtgagcatccatggcctgtgggcctccagctcgacctctctaggcctaagcaggagagtagggctggggaatcatccaggaatggtggcagaaggaaagga

SEQ ID NO: 339401 - DNA, 630 bp, Homo sapiens
cccaggttcgcccccttggttcagtccccctaggtccatgcaggctacaagtggcacttgaacaggcaacagtccgaacacagggactatgaggacatgaacgaagaaggtctgccggagcagaggaactgaaattgaaaggcgaacagggatgccgggccgggtctgccagcagcggatataagtctgtaaaatcagatggactgccaattggagaatgagagctgcccagcctggccctacgttctttcaattaattcataaacagaaagggggatatgcagggagccgaaggcccgtaggattcggcattccactggaggctatgtgatcaaacagcaaactgtttatcatgaatgcagaatgtgggcaaactcacaactgctcctgccgacagaaggtttgctggaggcaatcactccctggcactgaggttatctactgcgacatctagagcctgttgttcgaggaatgcagtcttgcaagcctgctctggactgagcagctgaccccttcttccaccccccttctcactatctcttttgcctaataaatatggagggctgtgtaaagctcagggcccttgtctactagaagcaaagtgcccccagaccccttcttccaaataca

SEQ ID NO: 339402 - DNA, 591 bp, Homo sapiens
caaatatactcttttgtctcttgtcttttattcccaggttcgcccccttggttcagtccccctaggtccatgcaggctacaagtggcacttgaacaggcaacagtccgaacacagggactatgaggacatgaacgaagaaggtctgccggagcagaggaactgaaattgaaaggcgaacagggatgccgggccgggtctgccagcagcggatataaggtcagtgccctaaggaggtactgggagtagtgctttaaggaagtgctgggaaccggaagttttctgaatcaggctaacaaggggaagaatttgtctgttgaagacaaacattatgtgcagctgcttaaagttctgttgagacagtctggagctcaggttaattcgcaggcactaactaacctcctgcagaagccacaaaatgttactatgcataacccatggtttccccaggcaggcactcttgatgtggaaaattgggacagagcacgagaaggattaaaacgggctcatcaaaaaggtcttaaagttgattcttctgttttcttcacttggagttcagttcatactgtacttctgacattatcttcttctta

SEQ ID NO: 339403 - DNA, 625 bp, Homo sapiens
gggtacgatcatagctcactgcagtcaacttctcagactcaagcgatcctcccacctcagcctcccgagtagctggaactacagacgctgcaccatcacacttggctaatttttaaaattttatttttaatttttgtagagacggcggggttgggggggcgggtggcgggtcttgctatgttgcccaggctggtctcgaactcctggccccaagcccaaagcgatcctcctgcctgggcctcccaaagtgctggaattgcaggcatgagccactatacagcctaattcagggttttttttaaccagggtggggtaatgagcttgtgtaggaacaaaatgcacccctatttttctctatgtgaagtatagcatttcctttcctgattgctggagcagccttagcagtgcctgaaactgtgagggtgagtgtaaatgatagttccagataacagtttgtgcagggccaggcatggtggctcacacctgtaacctcagcgcttgggagtctgaggcgagaggatcacgtgaggtcaggagttcgagaccagcctggacaggatggcaaaaccccgtccctactgaaaatataaaaattggcctggagtagtggcgcgttcctgtaatc

SEQ ID NO: 339404 - DNA, 107 bp, Homo sapiens
tctagaacacagatgccacaaaagtgagactgttttattatcccatgggtccttgatgctctgttcctttttgtcagtttgtcttctctctgttgttcctgttgttg

SEQ ID NO: 339405 - DNA, 683 bp, Homo sapiens
aatcgcaggcaaccagcagaagctagaattttaggcaaggaaagatcttcccccagagccctcagagggaccatagctggccaacaccttgatttcagacttctagcattcagaactgtagagaaaacatttctgttgttgtgagcctcccagtttgtggtactctgttacagcagccttaggaaatgaatatagattcccagttagggtcccacttaagagctgaagctgtaggaggtacgcagtctccctggaagaagacccgtggggtggggggatccaagccagagttgggggagaaagagccatgtgtgagaaacaagatgaaaaaccaggctggacactggacaagggatcaggaaacagcaatgagcccttggtttgaggagagcagggaggaaggagagggtggtgagatgggaagcagtgtcgtgaagtcaatgcaggagaattttgaacagagatgaggtagcaaatggagacagatgctcccaaaatatagaataagaaatgagagaaattcctaagaggcaggtgatcaatgcacatttcataccaccatattccaaagaaaagaaacttcgaatgccaaaaaggtcaagtgaccccctctatatccattagacaggtgttagggctaagatacattatgtgaaaaactaagctccaagacgatatagaga

SEQ ID NO: 339406 - DNA, 303 bp, Homo sapiens
gatgactctctcacactcattgatctattccagtgtgtaatccgcgtagactcctacagtcagagcattgcaagcgtgagtgactggtccctggcgtaggccttgcatcttctctcttttaaaataggccagaaataaaactaccccttatctcatcataaaattattattttgcagctaaagatatgtaatggcttcatgctggcctaagacacagactgagagtgtaactaatggatcatttccttcccgggtgagaattatcatcccctgaacatcattaacataaaatcccatgcaata

SEQ ID NO: 339407 - DNA, 303 bp, Homo sapiens
ccgactctttaggatcccctgatctcccatctctatattctaagaaggtaattatataattttataactgaaatgtctaaattttataaccaaaggtcagatccattaaaatggaccatcatttatgcaactgcacctgttgaaggcattacatcacattttctgccaacttacttaattcttgctcagcaattactggtttctcagtttctcgcctgacaataaaatacagaaatcttccattctttattaacctacaggcaattttcctttgtggtttaagaagtctgacatactcgctat

SEQ ID NO: 339408 - DNA, 163 bp, Homo sapiens
ctacctattcatctatctatacatccatctatccatctatctatctatccatctatctatcatctacctacctacctacctctctaatctaatctatctctatctaattatctatctaattatttagagacaggttctgctatattgcccagggtggtctcaa

SEQ ID NO: 339409 - DNA, 233 bp, Homo sapiens
atggggaaactgaggcccggaggagccgaggaggttgctgaaggtcacacagccggtgagacgcagctgtgcacttggggctaggtctgtgtgcccccggggctgtgctcaccctgcctgtagttgcctctcccctcaaggggcttccagtctagtcagggaggcagagcaggtacgtcaggccaggcggtcatgccgggaggccggagaccagcccgtgggagaggagttta

SEQ ID NO: 339410 - DNA, 353 bp, Homo sapiens
acagactcatagaaacagagaaatacaataagagagagaaaaggcaaggagacagagttaaagggacaaatggcagagagaaacagatccagagagatggagacacagaaacagagaacacagaagcccaaaagtcagacagacgaaaacagagacagattgagcaacaggagacacatggaaaaataagatgcacaaaggcagataaaggaagaggaagaagaaaaaagaaaaccggagagaaaaggcagaaacagggagaagtaggttcctatatcaagctgcaggaactgtgggagcactaggtgataggggatcattccgggggtccccggctgggtctgattgagtgg

SEQ ID NO: 339411 - DNA, 581 bp, Homo sapiens
atacttgatatgcctaggtgcgacattttggagtagctacctgtcaccaccatgaactaaatccatcaaaggcaatgggcacttcttttcatgttatggatttcattaccagaacaattgttattacctgtttatctttggcaataaatggtttgttgttattatatagtccattattttatatgtgttaaagacatgattttatgacaggcttataatttgtatgcgtttgaatctatgctcaggtctttttggtcagtctgtacattgcatgtatatacatacacacacatataaatttttaaaattacaaaagtaactcaaagttacttttggaaaaatttcaaacaataaaaattatatttccctcatgtctgttgctcaccccattccccattccagtccctagagttaactatttttattcagtttgaatattttttgagaccttttacaatatatctgtaactttatacacataaacacatgtactcacagacatacccctacatactttttaaagaaaagagatacttagaacaattaaaaaattgacaattggctgggtgtggtggctcatg

SEQ ID NO: 339412 - DNA, 165 bp, Homo sapiens
acagatactgcttgcattaagcaaagacctcataaataagaatgtaataaaatgggccatagtgacttaattttcactgccattcttggtttgattatcaagccaatccaaacagggacaaagaattagatgagtatattggctgactgggttggatattaaaaa

SEQ ID NO: 339413 - DNA, 1133 bp, Homo sapiens
ttggaaccccctctatcatcatatgctctcagatccacacacccttctgtactgcactgaacactatcagcaccggtcctttatgtttatgtccagactccactaaatagtgggaatggtagggcctttctctaccatcccacccagctcctaaaacactgctcaggttcatatctagatttcgaaatacacaaccttctgttaacatccactaacactagccgagatcttgccattgcactccagcttgggcaacaagaacgaaactctgtctcaaaaatgaaagaaagtctgccttcctaacttgcttccaggtgtcatctgtgttgttgatccttggaccacagctagagtgccaaggtaataatagatgggcttcaataggtaggcaggggccagatcacatgggatcttgtcgccatgttatagacagttactggattttgagcaaagcagcagttttcattagtgtttgaagaagtttactccttctcttggttgggaaaaaaagatgctagaggggagctggaagaccagtttgaaaaccacagtagtagttgcaagataggtcgtgctggcctggacttggctagtgttagtggatgttaacagaaggttgtgtatttcgaaatctagatatgaacctgagcagtgtttttggagctgggtgggatggtagagaaaggccctaccattcccactatttagtggagtctggacataaacataaaggaccggtgctgatagtgttcagtgcagtacagaagggtgtgtggatctgagagcatatgatgatggagggggttcccaaacgagtctgagaggttagtggaggcttccctggtgtggggactgatgctcaaattaaaacctgaaacctgagtgggagtgaaccaggcagaggtagctcctgtagaacttctgatgatgtgaaaagagagaagagtcaaggatgtgtcctactgttcagagctcctgggtgctgcctcttactcagaggaacaaggctcaggggagttgacaggaggggaagtcaagggttacgtttcatgttcagccatgacatatttgagccaaacaagggaagatttttcagcaggccactggacctgggagtctggagcttgcaaggg

SEQ ID NO: 339414 - DNA, 325 bp, Homo sapiens
agaggcagaagaggtgagaatgagagaaagggatgtgattacagaaacagggtcagaaagatgctatgtggctggctttgaagatggagccaagaatagattttgaatgtgggtaacttctagatgttggaaaaagcaaggaaattatattctctcctagagactgcagaaggaacacagccttgccaacaccttgattatagcctggtgagactcaggctggattttttttttttttttttttttgggaaacaaatttttcctcgggggcccggggtgggaggtgcgggggttacaacccccgggcccagggacaaccccgcgc

SEQ ID NO: 339415 - DNA, 262 bp, Homo sapiens
ctctaatgagagcatttacgaagattgccaaacaacaatcagaacaagaattacatgggactgaactgatggagaactaaaacgattttcatggggctgaactgatggaaggttacagtgatttttatgacttctgtttgaaacattgctgattctatttatattttgttttccaaagtgaagaatgcttcttttcttttgagctatttttatcttacaacaattggataaagtttacttttgtgaacaaaattaaaacatt

SEQ ID NO: 339416 - DNA, 216 bp, Homo sapiens
gaggctactgcagccatccaggtgagagctgtcagcagctaggctacaggcgtgacagtggagcaggggagagtgggcagagttgagatctgttttttagagctaggatccagaatgaatgaatgaatgaatgaatgagcccctgagggataaaatttaggctcgagttcctgtaatgccactgagtttcagtgtgaccctgggcagatcccttcc

SEQ ID NO: 339417 - DNA, 90 bp, Homo sapiens
agtccctgctctcatggaacttaaatcctcatggggtctggcagttaactgaaataaaaggtaacatatgtacggtatttgaaggttgta

SEQ ID NO: 339418 - DNA, 96 bp, Homo sapiens
acacaagtcagaatatgacattaaaatccagtgaattgcactgatattttctcttacagacaaacctagtctgtaggaaaataaattactctttct

SEQ ID NO: 339419 - DNA, 234 bp, Homo sapiens
gatatatcaagttaagggcttgattctttccttctacttaaccagttttcaagagtgagttaaaaaatatagggctttcaacaacaaattcagtgttcctaatcagagattacataaagtatctatctagaagatgatctatttctatctaaatgatttctacagggaaggttgagtcaagtgaaacataatttcactttgaaataagaatactaatcagaatccagtaaaaca

SEQ ID NO: 339420 - DNA, 544 bp, Homo sapiens
aggacagcaggctggatggacccttctgaactaaggaagtggggaagagtttaccctgcaggtagagaatttcatgctcttcccacaatacccttcctcttttccttcttccagttgcgttagcaacttggcactccacagtcctttgctcaccgccccctgccttcccagtgcctacttctgttctcagtctctgtggtctctgattttgagtatttttccagaccctatatagcaaatcccatgtcttcccagatttagcatttcccactgaccttttaggttttggttcctcaattctggctaaatctgatttttctgtaaatttgatcctgtttgctgtatctcttccagaaattcctcaaaatttcttattgattgatggcatccgttcctgttttctggctttttaatgggtttattcttatttttatattccttttgtcattcccttggaacttggagtgacacaagaatcaaacacttgagctcagcccgtcaccattgtggactcagtgtatctcattacttttcactttgggct

SEQ ID NO: 339421 - DNA, 144 bp, Homo sapiens
attaacagcctggtgtctctccttctgtatgtttcttcatgctcaatcatgtgcaaatacctcttgtcatatttttggttgtttatttttacagaaaatggtattgtgtcatattcatacttagcttgcttccacatcaataga

SEQ ID NO: 339422 - DNA, 234 bp, Homo sapiens
gggtccaatggtaccgctcggtgataggcaatggcctcaccacttggcgataggcgatggtctcaccatttggtgatagtctcacctcttggcgacaggtgacagtcccatctggcttgccaaaatatgcccaaaattgtgagttcttgggtctgacttcaagaatgaagccgcagacccttgtggtgagtgttacagttcttaaagatggtgtgtctggagcttgttccttct

SEQ ID NO: 339423 - DNA, 168 bp, Homo sapiens
tccatctgcctggacattcacccaccatgtcaggaaaataaaaacctaggtagcaactgtacagattctaagtcaaaaaagatagagcaaattgcataccctctctaggaaaagcaaaccactgactttctgaggtcttttgtttaagcccaaagataattacaagag

SEQ ID NO: 339424 - DNA, 462 bp, Homo sapiens
ctcagccccacataaggagtacttccctgctaaggtttccattcatcacaccaaaatcactacttaaacagcttctgctaatacaagattcaatttactgttataaaaagatctaatctgcaacaacatccgtatgactgtcaaaccccaataagcaaggtgacctctctgcttggtgattcaaacttgggccaaaatgaattgaaaagctgagacaaacagggacagttttctattcagtttcacagctgcttgggctactgcccagtctccataatgagggtggtctcttgctttgttttcatgaaaccaacagcatgtagaacacacagcatttcaataacgtatgaatttcagccttcaggatatcatattgtccccagttgcttgatattttgtctctctcctcctcagaatagtcagaaacacactggagcacacacatagtaatactatgactat

SEQ ID NO: 339425 - DNA, 945 bp, Homo sapiens
aggtcatgatataatttaagaccaattcccctactctcccaataatcacatagtcttattactttcaatttaacttgagtcactattaagcaagtttaccaaagtgccacaaagttgatttttaacgtttgtaaaggtttgaatgtttatagaagtgcatcatgaaattttgtgtaaatccagatgaactgtcattatagtactataaattagagatagtccataaagttgggttgaaggagattgaaaatatttcctttgattaaaagaaaataattaactaacttgggcttgcttgtgattgaagagggagattagatagtcctctgtccccccaaaaaagaaactagcagagaaagacataaaaagctctttggtgtctgttcatgtgctgtacattttttccgttttaatgtcttgtgtagataattcaaagtttgaactatttctttcttggaataagtaataatttattcaatatggtgtatctctgagttcaatttaaaacaatccaactcagtaatatttatttttaaatacaaatcctaactaaccaattaattaataaaaaggcaagacttacttgctgtagtattggttctcatctgtagagaactgacattggagcaaattttaagtctcccctttgaaaataagccttgttaactgagggcgtaatacatttcccacagattttatccagaaacattttattagagatcttatagtagtatctcagttcctactacagctttctaaaggatgagacttgcatttaacaaaatgacatatataatatttttctatagttttgcaactgaattaaaggaaggtgatgtattataatgtgtagtgaggtataaagggctagttcattctctcccaacaagaacttagaataaaataacacttttttttcatgagacttacctcatttttgttagg

SEQ ID NO: 339426 - DNA, 618 bp, Homo sapiens
agcggcatcctttttttgtaacttgaaggcacagatgtaaggagcctctgctttgcccccactacctgacttattgtagacgtctttcttacataatcatgcatcacttaacaacagggatacattctttgagaaatgtgaagttaggccaaaacatcattgtgcaaacttcagactatactcacacaaaccttgatgatatagcctattgctcctaggctacaaacctgtacaggatgttactgtactgaatactgttaccatttgtaagaaaatggtatttgtgtatctaaacacagaaagagtacagtaaaaacacagtacaaaagattttaggctgggtgctgtggctcacaccctcacgcccgtaatcacagcactttaggaggcctaggagggtggatcacaaggtcaggagttcgagaccagcctggccaatatggtgaaacccccgtctctactaaaaatacaaaaaattagccgggcatggtggcggatgcctgtagtcccagctacttgggaggctgaggcagaggagaatcgcttgaacccgggaggcagaggttgcggtgagtcgagatgcaccactgcactccagcctgggtgacagagcgagac

SEQ ID NO: 339427 - DNA, 286 bp, Homo sapiens
gacaaactctgtgacattggcatttgactctccctgcatgtgctgtgactgtaaatgccaaagtctcaggtagatatacagacacccccgttcaacggtccctttttagtgggactaccccagcgcttcccacctgcccatatatctgtgccgctcccagcaccacactctatggctcctagtgccctaggtagaaaatccacattcttcctgcccttgggatttgaggctccagaaggaaagtgtctctgacgatgctgttgctgcctggaacagccactttgcc

SEQ ID NO: 339428 - DNA, 921 bp, Homo sapiens
cctggtaactaactgaaatataatactgctttcaacaaatggtcgtcttttaaaactaaattatcattttattatgtctttattatttttcctgtttacgaacataacctgtactcatttggaaagttctaaatattctggaagtatacattatgaaatttcccccacaaactcaccctctaggggtaagtgtataatttccaaaactctttactcatgtttgagattttttttgacttatctggttaggtctagctgggttaggtctacctgggacctaacccagggtgagatgtgtgaacagaaagtagtacatttacagaaaggccactgcagctgcatcatagttctataactcttcaaagtccccaggcaccctaagtagatagcttgaagcttcacctttacaaagtccaatccattgcatcaaaagcctacattatcccatttcctgtggcctagagattacaaatcacctgaagtagataccaaaacccagtgagtaaagacggaagtaaatctagtgagtttccaaccacccaccgcccccgagatcttaaaggaagcagtaacaagcaactagaactcacatgagaatttataggccaagagattttaatgtaagtgggaccaaaggaggataagtgagaggataagcagtgtgggttaagagaaagaggatagtggcaaatatcaagttgagatgggtagagaatcattgtgtgaggttactctatctacaccaatgtggcaggaacaaatacaagtgcataaaggtacattaaggaaagttgaaaggtaaatagataacagactaggaaggcgaataatattccacaagttcttgcaagctttattctatccttctctcttaaagaataaaattcatcaacttagagacaaagggagacaccggggatc

SEQ ID NO: 339429 - DNA, 715 bp, Homo sapiens
cctggtaactaactgaaatataatactgctttcaacaaatggtcgtcttttaaaactaaattatcattttattatgtctttattatttttcctgtttacgaacataacctgtactcatttggaaagttctaaatattctggaagtatacattatgaaatttcccccacaaactcaccctctaggggtaagtgtataatttccaaaactctttactcatgtttgagattttttttgacttatctggttaggtctagctgggttaggtctacctgggacctaacccagggtgagatgtgtgaacagaaagtagtacatttacagaaaggccactgcagctgcatcatagttctataactcttcaaagtccccaggcaccctaagtagatagcttgaagcttcacctttacaaagtccaatccattgcatcaaaagcctacattatcccatttcctgtggcctagagattacaaatcacctgaagtagataccaaaacccagtgagtaaagacggaagtaaatctagtgagtttccaaccacccaccgcccccgagatcttaaaggaagcagtaacaagcaactagaactcacatgagaatttataggccaagagattttaatgtaagcattcttataattaaatacctcttacaaaaaatgccatttaatcagacaaggggaaaaaagtagcatcaaaagagatgctgacaaggaga

SEQ ID NO: 339430 - DNA, 296 bp, Homo sapiens
ccaaaacttaacaaccaaagatccaaacttctttcaccagcagctttcctgagtagagaaacagtaattgtcagcctcataaccattaggctaaatattatgatgttaggtgtaagcagttttcaatttcagcaggcaacttttttgttcagaataattttctcaaaagttttgagctattttttctttttaaaaataaatatcagcaactaaactgtctaaactgatctcatatcatttgctgtttaatattacagcagaatttttattgtgtataaatgttatttaaaatgtac

SEQ ID NO: 339431 - DNA, 343 bp, Homo sapiens
ctccaatgactggcatattcctagttctattactaaaagaaagaaagcaggatgggtatttgtgcacttagactctgccacacatcccatctccaccacgtcctgctctctgacatagccttcatgcgtgcagatcagggcagaaattccccagacatccatcctaggctaccctggcagccaatgtgactatttccctgaaggcccttctcccatctactgcaagtcacctaccatggagtttgcctactcttctgtgatatagttttgtttactcaaaatggaaaagacatgtcctgacttagtgtgatgtctcctttagcctgtacctaatgtcctggcc

SEQ ID NO: 339432 - DNA, 433 bp, Homo sapiens
tgtggagtctggtagttttggcccatgaccataccttaaagtttcatcacctatcctctgggaccatttctttccttaatatatttaaatcaccaaagtagcttggcacaaaacaggtgaggcctgtctgaaatatgctgaagcccgtgctgctttgtattaactcattaaaacaaggaacctggatcacctgcacctgatctgcattctagtctggctttagaaacacattagacttaaattcaaacgcaccagaaatgaaaataattgatatataattgtttttgtatagtgaagtagaactttctgagtttttgaaatttccttgtttctcaattattcaggcattattcatgcattttattatagcgtaagttaaactgaaataggcagttagatactccattctgtaactctgaacacaatgggtttg

SEQ ID NO: 339433 - DNA, 633 bp, Homo sapiens
acgtcactgactctttgggcaggagactttcatttcttcccctcacagtctctgtctttttgggttttctatatcttgcctcagtgtcgccttagggcttcggatatctttgctagattctgactgcacagttcagtgagaccttgtataagatgtgcttagagggttcagatgaaagtagttgattgtgaattattccagctcaagaactgaagtggtggtgcagagcttcctaaagtaatttctgttgggtctgaaatgccttgtgcattttataaaaagatttgtcttcctaattctgttttacttaaattaataaagatgtatataatctcggagaatgtctaagttggaaggtgacagatttgtggcagggaggagctggctgagcattaagatgaactcttaagtaatgcacatggggatagttgagctgatgttattacagattgagctgtggccacaggggatacctgtggggtacgcttgtccctcattgcacctgaaggcattctacaggatgtcactgttgctgagtgcagtgctatgatgagatcctggtcccagacagaaggaaagtgaataagtatgggcctttcccagctctgccaccatgtaaccggagaatgtccc

SEQ ID NO: 339434 - DNA, 434 bp, Homo sapiens
gtgagccactgtgcccggactacatttattttaattattttatgtagttctgttagaaagttggacatgcaggtatttgtactattgctgggaaaaggtgtaatttttttagatatcttagtaaaatatcttttaataattttttagtagcacttatgtacaaacctttataatgtttttttggcattgtgcttttttgtacttaacatttaaatgttctcatgagttctgagaaaatgccttaatttactgttgttttgctgtatcttttaaagtaacactgttccttctatttctctagatatctatgcatttatgtaggacctatcatcatagtgcctaggcactatgtttgatgtcaaccataagaggaaacttgccaagaaatcttggtttaatatctgtcacttaagacaacaattaatctgttttcc

SEQ ID NO: 339435 - DNA, 4758 bp, Homo sapiens
cgcctaagcggcggaactctggagagtgcggaacctaggatcctaggaaactgaaggcaacggaacctgggggcgatggaatccgggagcggtggaacccggagcctgtagaacttgaatctagaggaacctgacagcggcgccgagggggccacccggactctgtttggaacggaagcacagtgtccgccgcttcctggttgcgggtcagcgcccaggtcctgggctggccgccgggatgttgccctacacagtgaacttcaaggtgtcggcgcgcaccctcacgggggccctcaacgcccacaacaaggcggcggtggactggtgaggacgccgagcttccaggtcgccaggatcggccagggctggcaaggtttaattgcttatggatgtcattcacttgtggtagtgattgattccattactgcccaaactcttcaagttttagaaaagcataaagctgatgttgtaaaggttaaatgggccagggaaaactatcaccataacattggctcaccatattgcttacggttagcttctgctgatgtcaatgggaagatcatcgtctgggatgtagcagcaggagtagctcagtgtgagatccaagagcatgccaagcctatccaggatgttcagtggttgtggaatcaagatgcttcccgcgatttactgcttgctatccacccgccaaattacattgtgctctggaatgccgacactggcaccaaactatggaagaagagctatgcagataacattctttctttttcttttgacccttttgatccctcacatttaactttgcttaccagcgagggtattgttttcatctcagacttctccccatccaagcctccctcaggccctgggaaaaaagtttacatatccagcccacactctagcccagctcataacaagctggccacagccacaggtgccaagaaagctctaaataaagtaaaaattttaatcactcaagagaaacctagtgctgaattcataactctcaatgattgccttcagttggcatacctgccttcaaaaaggaatcacatgttgttgctctatcctcgagagattttaatccttgaccttgaggtgaatcagacggtgggtgtgattgcaatagaacgcacaggagttccatttttacaggtaataccctgctttcagcgtgatggtttattttgtctacatgaaaatggttgtataactttacgtgttcgaagatcttataataacatttttaccacttcaaatgaggaaccagatccagatccagttcaggagcttacctatgatttacgaagccagtgtgatgcaatcagggtgacaaaaaccgtccgtcccttcagtatggtgtgctgtcctgtcaatgagaatgcagccgccctcgtagtgagtgatggcagggtcatgatatgggaactcaagtctgcagtttgtaatcgaaattcacggaacagtagttctggtgtgtcacctttatattcaccagtgtctttctgtggaattcctgtaggagtgctacagaataaactcccagacctttccttagataacatgattgggcaaagtgcaattgctggggaagaacatcccagaggttcaattctgcgggaagtgcacctcaagttcctgctgacgggactgctttcaggactgcccgcaccacagtttgctattcgtatgtgtccaccgttgaccacaaaaaacatcaagatgtatcagccactgctggctgttggtacaagtaatggttctgtcctggtgtaccatctcaccagtggtctgctacacaaagagttaagcatccactcatgtgaagtcaagggtattgaatggacaagtttgactagttttctttcttttgctacctcaacaccaaacaatatgggattagtgagaaatgaacttcaactggttgatcttccaacaggtaggagcattgcttttcgtggtgaaagaggcaatgatgaatctgccatcgaaatgattaaagtatctcatttgaagcagtatttggcagtcgtattcagagataaacccctggagctatgggatgttaggacttgtacccttcttagagagatgtccaaaaacttccctacaataactgctttggagtggtcaccatctcacaacttgaagagcctgagaaagaagcaacttgctactcgagaggccatggcccgccagaccgtagtctcagacacagagctgagtattgttgaatcatctgtgatcagcttgctgcaggaggcagaaagtaaatctgaacttagtcagaacatctctgcccgggaacattttgtatttaccgatattgatggccaagtgtatcatctcactgttgaaggaaactcagtaaaagacagtgctcggattccaccagatggaagtatgggtagtattacctgcatcgcttggaaaggtgatacattagtgcttggagatatggatggaaatttaaatttctgggacttgaaaggcagagtatccagaggaatacccacacaccgaagttgggtgaggaagattcgttttgctcctggtaaaggaaatcaaaaattaatagcaatgtacaatgatggagctgaagtgtgggatactaaagaggttcagatggtgagcagtttaagaagtggcagaaatgtgacctttcgtatattggatgtggactggtgtacgtcagataaagtgatcttggcctcagatgatgggtgcatcagagtcctagagatgtctatgaagtctgcgtgctttagaatggatgaacaagagttaaccgagcctgtgtggtgcccctatctccttgttccaagggcctctcttgccttgaaagccttcttattacaccagccttggaatggacagtattctttggacatttctcatgttgactatccagaaaatgaagaaataaagaatctcctccaagaacagttgaattcattgtctaatgacataaagaaactgttgcttgatccagaattcactctcttgcagaggtgcctgcttgtttcaaggctctatggtgatgaatcggagctgcacttctggactgtcgctgcccactacctgcacagcttatcccaggaaaagtcagccagcacaacagctcctaaagaagctgctcctcgagacaaactgagcaacccactggatatatgctatgacgtgctctgtgaaaatgcctactttcagaaatttcagctagaaagggttaatctacaggaagtgaaacggtcaacttatgatcatacaaggaaatgtacagaccagctactgctcttgggtcaaacagacagagctgtgcagttgctgttggaaacaagtgcagataaccagcattattactgtgattcactgaaagcctgtttagtcactactgtcacctcgtcaggcccctctcagagcaccattaagttggtggcaacgaatatgattgccaatggcaaattggcagagggcgttcagttgctctgcctgatagataaggctgcagacgcctgccgctacctgcagacatacggcgagtggaatcgggctgcatggctggcaaaagtccgtttgaatcctgaggagtgtgccgatgttttaaggcggtgggttgaccacctttgttctccacaagtcaatcagaaatcaaaggctctcctggttctcctctctctgggctgcttttttagcgtggcagagacgcttcacagcatgagatactttgatagagcagccttatttgtggaagcttgcctcaagtatggagcatttgaagtcactgaggacacagagaaactcatcactgctatatatgcagattatgcccggagtttgaagaacctcggttttaagcagggagcagttctctttgcttcaaaagccggagcagctggcaaagacttattgaatgagcttgagtcccccaaggaagaacccattgaagagtgacagcttaataaatgccagggaatctgacctggaaggcagatgggagggggctggtctggctgtggccaccgtcacagtccaggatgaagaggagtacagggtcctgtgagctgtttgaccactgttctaagactatgtgtgcccaaaagcacataagcatctatgttgagagtaagtttgtatcctgcgttggtctcagaaagaacgtgaatgcttaagattttgaaagtacataatattttatactttgggagagagctttaagagtccctggaaatactttttaatttttttaacttaaaattcaagagactgaatcacttttctcattgattaaatgtaaagattattgagaaacctatagtaaatgaaatttgtgagatgttttctcaaatatatgctgtgcctgtacttatatacagtctttcaagagagatacaaacaaggcagaaacatttaaactagtattaaaggtagtttaccaaagcattttttgttttcttaccttgaaaacacagaaccgttaattccttggtttaagcagttgctaagttttgtaattttaggctcagaggaccataggaggttttaagatttatgtttagtccgataggtgaggtctttgatattttgaattttaactccttttatgatacatcacagtaacctcatttttgaagtctttctttgtactttaatgttctctctgttctaatagttgaagtatgagatgtaactattataaactgttgctgaaaacataaatgtctgtaacttacaaacatgataaataaattaaaaattcca

SEQ ID NO: 339436 - DNA, 4123 bp, Homo sapiens
tgtttctcttcaacttagagaacattcccattatgttatgaatgcataacattgccagttatatattattaaaattatcactatattgctctcaaaattgtattggaataaaactgtatgctaaacttcattaaactttaatcagagttttgcttttctcaatatagtgcttaccagcgagggtattgttttcatctcagacttctccccatccaagcctccctcaggccctgggaaaaaagtttacatatccagcccacactctagcccagctcataacaagctggccacagccacaggtgccaagaaagctctaaataaagtaaaaattttaatcactcaagagaaacctagtgctgaattcataactctcaatgattgccttcagttggcatacctgccttcaaaaaggaatcacatgttgttgctctatcctcgagagattttaatccttgaccttgaggtgaatcagacggtgggtgtgattgcaatagaacgcacaggagttccatttttacaggtaataccctgctttcagcgtgatggtttattttgtctacatgaaaatggttgtataactttacgtgttcgaagatcttataataacatttttaccacttcaaatgaggaaccagatccagatccagttcaggagcttacctatgatttacgaagccagtgtgatgcaatcagggtgacaaaaaccgtccgtcccttcagtatggtgtgctgtcctgtcaatgagaatgcagccgccctcgtagtgagtgatggcagggtcatgatatgggaactcaagtctgcagtttgtaatcgaaattcacggaacagtagttctggtgtgtcacctttatattcaccagtgtctttctgtggaattcctgtaggagtgctacagaataaactcccagacctttccttagataacatgattgggcaaagtgcaattgctggggaagaacatcccagaggttcaattctgcgggaagtgcacctcaagttcctgctgacgggactgctttcaggactgcccgcaccacagtttgctattcgtatgtgtccaccgttgaccacaaaaaacatcaagatgtatcagccactgctggctgttggtacaagtaatggttctgtcctggtgtaccatctcaccagtggtctgctacacaaagagttaagcatccactcatgtgaagtcaagggtattgaatggacaagtttgactagttttctttcttttgctacctcaacaccaaacaatatgggattagtgagaaatgaacttcaactggttgatcttccaacaggtaggagcattgcttttcgtggtgaaagaggcaatgatgaatctgccatcgaaatgattaaagtatctcatttgaagcagtatttggcagtcgtattcagagataaacccctggagctatgggatgttaggacttgtacccttcttagagagatgtccaaaaacttccctacaataactgctttggagtggtcaccatctcacaacttgaagagcctgagaaagaagcaacttgctactcgagaggccatggcccgccagaccgtagtctcagacacagagctgagtattgttgaatcatctgtgatcagcttgctgcaggaggcagaaagtaaatctgaacttagtcagaacatctctgcccgggaacattttgtatttaccgatattgatggccaagtgtatcatctcactgttgaaggaaactcagtaaaagacagtgctcggattccaccagatggaagtatgggtagtattacctgcatcgcttggaaaggtgatacattagtgcttggagatatggatggaaatttaaatttctgggacttgaaaggcagagtatccagaggaatacccacacaccgaagttgggtgaggaagattcgttttgctcctggtaaaggaaatcaaaaattaatagcaatgtacaatgatggagctgaagtgtgggatactaaagaggttcagatggtgagcagtttaagaagtggcagaaatgtgacctttcgtatattggatgtggactggtgtacgtcagataaagtgatcttggcctcagatgatgggtgcatcagagtcctagagatgtctatgaagtctgcgtgctttagaatggatgaacaagagttaaccgagcctgtgtggtgcccctatctccttgttccaagggcctctcttgccttgaaagccttcttattacaccagccttggaatggacagtattctttggacatttctcatgttgactatccagaaaatgaagaaataaagaatctcctccaagaacagttgaattcattgtctaatgacataaagaaactgttgcttgatccagaattcactctcttgcagaggtgcctgcttgtttcaaggctctatggtgatgaatcggagctgcacttctggactgtcgctgcccactacctgcacagcttatcccaggaaaagtcagccagcacaacagctcctaaagaagctgctcctcgagacaaactgagcaacccactggatatatgctatgacgtgctctgtgaaaatgcctactttcagaaatttcagctagaaagggttaatctacaggaagtgaaacggtcaacttatgatcatacaaggaaatgtacagaccagctactgctcttgggtcaaacagacagagctgtgcagttgctgttggaaacaagtgcagataaccagcattattactgtgattcactgaaagcctgtttagtcactactgtcacctcgtcaggcccctctcagagcaccattaagttggtggcaacgaatatgattgccaatggcaaattggcagagggcgttcagttgctctgcctgatagataaggctgcagacgcctgccgctacctgcagacatacggcgagtggaatcgggctgcatggctggcaaaagtccgtttgaatcctgaggagtgtgccgatgttttaaggcggtgggttgaccacctttgttctccacaagtcaatcagaaatcaaaggctctcctggttctcctctctctgggctgcttttttagcgtggcagagacgcttcacagcatgagatactttgatagagcagccttatttgtggaagcttgcctcaagtatggagcatttgaagtcactgaggacacagagaaactcatcactgctatatatgcagattatgcccggagtttgaagaacctcggttttaagcagggagcagttctctttgcttcaaaagccggagcagctggcaaagacttattgaatgagcttgagtcccccaaggaagaacccattgaagagtgacagcttaataaatgccagggaatctgacctggaaggcagatgggagggggctggtctggctgtggccaccgtcacagtccaggatgaagaggagtacagggtcctgtgagctgtttgaccactgttctaagactatgtgtgcccaaaagcacataagcatctatgttgagagtaagtttgtatcctgcgttggtctcagaaagaacgtgaatgcttaagattttgaaagtacataatattttatactttgggagagagctttaagagtccctggaaatactttttaatttttttaacttaaaattcaagagactgaatcacttttctcattgattaaatgtaaagattattgagaaacctatagtaaatgaaatttgtgagatgttttctcaaatatatgctgtgcctgtacttatatacagtctttcaagagagatacaaacaaggcagaaacatttaaactagtattaaaggtagtttaccaaagcattttttgttttcttaccttgaaaacacagaaccgttaattccttggtttaagcagttgctaagttttgtaattttaggctcagaggaccataggaggttttaagatttatgtttagtccgataggtgaggtctttgatattttgaattttaactccttttatgatacatcacagtaacctcatttttgaagtctttctttgtactttaatgttctctctgttctaatagttgaagtatgagatgtaactattataaactgttgctgaaaacataaatgtctgtaacttacaaacatgataaataaattaaaaattcca

SEQ ID NO: 339437 - DNA, 3467 bp, Homo sapiens
attcagaggtatattttttaacttcaaactatttgggtgttttgccaggtatctttctgtaaatttctactttctgttggggtcacacatggtcctgagtggaagaatctcagtcctttgatacagggagtacagggatcttcctactctgtcacatttcctctatgtcagccatcatttgctgataatattttagttcctcataatgcttattgagtaatcagtgctcaaattatatttgttgaattgcactcgttgatgtcattcagtacttctttcaggcttaacagaaagtgaataaagtggcatttgttgaataccaactgtagtagaatgatagaaactttacatactttttcattgaatgtttaccataatctgtatatcaattaattgaggtacatgatgagattctcctgtcatgtgtgagaagttgagcctcaggagggttaacataagttgtggcatcagggtttgaatctatgccactctttcttccaagttggactccttgcctaattgtgtgagactgtatgttctcttacaggtcacttagagctttaccttcttatgactgttaatcatggtgctaaatggtagtttaaattgtctatatttagaatgcgtcagctgagtttttcaatttactgaactttttatttgctctaattcatggtgaaatttttgcaaaaaggggcttatttagtaattttgtttattttaggcagtatttggcagtcgtattcagagataaacccctggagctatgggatgttaggacttgtacccttcttagagagatgtccaaaaacttccctacaataactgctttggagtggtcaccatctcacaacttgaagagcctgagaaagaagcaacttgctactcgagaggccatggcccgccagaccgtagtctcagacacagagctgagtattgttgaatcatctgtgatcagcttgctgcaggaggcagaaagtaaatctgaacttagtcagaacatctctgcccgggaacattttgtatttaccgatattgatggccaagtgtatcatctcactgttgaaggaaactcagtaaaagacagtgctcggattccaccagatggaagtatgggtagtattacctgcatcgcttggaaaggtgatacattagtgcttggagatatggatggaaatttaaatttctgggacttgaaaggcagagtatccagaggaatacccacacaccgaagttgggtgaggaagattcgttttgctcctggtaaaggaaatcaaaaattaatagcaatgtacaatgatggagctgaagtgtgggatactaaagaggttcagatggtgagcagtttaagaagtggcagaaatgtgacctttcgtatattggatgtggactggtgtacgtcagataaagtgatcttggcctcagatgatgggtgcatcagagtcctagagatgtctatgaagtctgcgtgctttagaatggatgaacaagagttaaccgagcctgtgtggtgcccctatctccttgttccaagggcctctcttgccttgaaagccttcttattacaccagccttggaatggacagtattctttggacatttctcatgttgactatccagaaaatgaagaaataaagaatctcctccaagaacagttgaattcattgtctaatgacataaagaaactgttgcttgatccagaattcactctcttgcagaggtgcctgcttgtttcaaggctctatggtgatgaatcggagctgcacttctggactgtcgctgcccactacctgcacagcttatcccaggaaaagtcagccagcacaacagctcctaaagaagctgctcctcgagacaaactgagcaacccactggatatatgctatgacgtgctctgtgaaaatgcctactttcagaaatttcagctagaaagggttaatctacaggaagtgaaacggtcaacttatgatcatacaaggaaatgtacagaccagctactgctcttgggtcaaacagacagagctgtgcagttgctgttggaaacaagtgcagataaccagcattattactgtgattcactgaaagcctgtttagtcactactgtcacctcgtcaggcccctctcagagcaccattaagttggtggcaacgaatatgattgccaatggcaaattggcagagggcgttcagttgctctgcctgatagataaggctgcagacgcctgccgctacctgcagacatacggcgagtggaatcgggctgcatggctggcaaaagtccgtttgaatcctgaggagtgtgccgatgttttaaggcggtgggttgaccacctttgttctccacaagtcaatcagaaatcaaaggctctcctggttctcctctctctgggctgcttttttagcgtggcagagacgcttcacagcatgagatactttgatagagcagccttatttgtggaagcttgcctcaagtatggagcatttgaagtcactgaggacacagagaaactcatcactgctatatatgcagattatgcccggagtttgaagaacctcggttttaagcagggagcagttctctttgcttcaaaagccggagcagctggcaaagacttattgaatgagcttgagtcccccaaggaagaacccattgaagagtgacagcttaataaatgccagggaatctgacctggaaggcagatgggagggggctggtctggctgtggccaccgtcacagtccaggatgaagaggagtacagggtcctgtgagctgtttgaccactgttctaagactatgtgtgcccaaaagcacataagcatctatgttgagagtaagtttgtatcctgcgttggtctcagaaagaacgtgaatgcttaagattttgaaagtacataatattttatactttgggagagagctttaagagtccctggaaatactttttaatttttttaacttaaaattcaagagactgaatcacttttctcattgattaaatgtaaagattattgagaaacctatagtaaatgaaatttgtgagatgttttctcaaatatatgctgtgcctgtacttatatacagtctttcaagagagatacaaacaaggcagaaacatttaaactagtattaaaggtagtttaccaaagcattttttgttttcttaccttgaaaacacagaaccgttaattccttggtttaagcagttgctaagttttgtaattttaggctcagaggaccataggaggttttaagatttatgtttagtccgataggtgaggtctttgatattttgaattttaactccttttatgatacatcacagtaacctcatttttgaagtctttctttgtactttaatgttctctctgttctaatagttgaagtatgagatgtaactattataaactgttgctgaaaacataaatgtctgtaacttacaaacatgataaataaattaaaaattcca

SEQ ID NO: 339438 - DNA, 4666 bp, Homo sapiens
cgcctaagcggcggaactctggagagtgcggaacctaggatcctaggaaactgaaggcaacggaacctgggggcgatggaatccgggagcggtggaacccggagcctgtagaacttgaatctagaggaacctgacagcggcgccgagggggccacccggactctgtttggaacggaagcacagtgtccgccgcttcctggttgcgggtcagcgcccaggtcctgggctggccgccgggatgttgccctacacagtgaacttcaaggtgtcggcgcgcaccctcacgggggccctcaacgcccacaacaaggcggcggtggactggggctggcaaggtttaattgcttatggatgtcattcacttgtggtagtgattgattccattactgcccaaactcttcaagttttagaaaagcataaagctgatgttgtaaaggttaaatgggccagggaaaactatcaccataacattggctcaccatattgcttacggttagcttctgctgatgtcaatgggaagatcatcgtctgggatgtagcagcaggagtagctcagtgtgagatccaagagcatgccaagcctatccaggatgttcagtggttgtggaatcaagatgcttcccgcgatttactgcttgctatccacccgccaaattacattgtgctctggaatgccgacactggcaccaaactatggaagaagagctatgcagataacattctttctttttcttttgacccttttgatccctcacatttaactttgcttaccagcgagggtattgttttcatctcagacttctccccatccaagcctccctcaggccctgggaaaaaagtttacatatccagcccacactctagcccagctcataacaagctggccacagccacaggtgccaagaaagctctaaataaagtaaaaattttaatcactcaagagaaacctagtgctgaattcataactctcaatgattgccttcagttggcatacctgccttcaaaaaggaatcacatgttgttgctctatcctcgagagattttaatccttgaccttgaggtgaatcagacggtgggtgtgattgcaatagaacgcacaggagttccatttttacaggtaataccctgctttcagcgtgatggtttattttgtctacatgaaaatggttgtataactttacgtgttcgaagatcttataataacatttttaccacttcaaatgaggaaccagatccagatccagttcaggagcttacctatgatttacgaagccagtgtgatgcaatcagggtgacaaaaaccgtccgtcccttcagtatggtgtgctgtcctgtcaatgagaatgcagccgccctcgtagtgagtgatggcagggtcatgatatgggaactcaagtctgcagtttgtaatcgaaattcacggaacagtagttctggtgtgtcacctttatattcaccagtgtctttctgtggaattcctgtaggagtgctacagaataaactcccagacctttccttagataacatgattgggcaaagtgcaattgctggggaagaacatcccagaggttcaattctgcgggaagtgcacctcaagttcctgctgacgggactgctttcaggactgcccgcaccacagtttgctattcgtatgtgtccaccgttgaccacaaaaaacatcaagatgtatcagccactgctggctgttggtacaagtaatggttctgtcctggtgtaccatctcaccagtggtctgctacacaaagagttaagcatccactcatgtgaagtcaagggtattgaatggacaagtttgactagttttctttcttttgctacctcaacaccaaacaatatgggattagtgagaaatgaacttcaactggttgatcttccaacaggtaggagcattgcttttcgtggtgaaagaggcaatgatgaatctgccatcgaaatgattaaagtatctcatttgaagcagtatttggcagtcgtattcagagataaacccctggagctatgggatgttaggacttgtacccttcttagagagatgtccaaaaacttccctacaataactgctttggagtggtcaccatctcacaacttgaagagcctgagaaagaagcaacttgctactcgagaggccatggcccgccagaccgtagtctcagacacagagctgagtattgttgaatcatctgtgatcagcttgctgcaggaggcagaaagtaaatctgaacttagtcagaacatctctgcccgggaacattttgtatttaccgatattgatggccaagtgtatcatctcactgttgaaggaaactcagtaaaagacagtgctcggattccaccagatggaagtatgggtagtattacctgcatcgcttggaaaggtgatacattagtgcttggagatatggatggaaatttaaatttctgggacttgaaaggcagagtatccagaggaatacccacacaccgaagttgggtgaggaagattcgttttgctcctggtaaaggaaatcaaaaattaatagcaatgtacaatgatggagctgaagtgtgggatactaaagaggttcagatggtgagcagtttaagaagtggcagaaatgtgacctttcgtatattggatgtggactggtgtacgtcagataaagtgatcttggcctcagatgatgggtgcatcagagtcctagagatgtctatgaagtctgcgtgctttagaatggatgaacaagagttaaccgagcctgtgtggtgcccctatctccttgttccaagggcctctcttgccttgaaagccttcttattacaccagccttggaatggacagtattctttggacatttctcatgttgactatccagaaaatgaagaaataaagaatctcctccaagaacagttgaattcattgtctaatgacataaagaaactgttgcttgatccagaattcactctcttgcagaggtgcctgcttgtttcaaggctctatggtgatgaatcggagctgcacttctggactgtcgctgcccactacctgcacagcttatcccaggaaaagtcagccagcacaacagctcctaaagaagctgctcctcgagacaaactgagcaacccactggatatatgctatgacgtgctcttgaaacggtcaacttatgatcatacaaggaaatgtacagaccagctactgctcttgggtcaaacagacagagctgtgcagttgctgttggaaacaagtgcagataaccagcattattactgtgattcactgaaagcctgtttagtcactactgtcacctcgtcaggcccctctcagagcaccattaagttggtggcaacgaatatgattgccaatggcaaattggcagagggcgttcagttgctctgcctgatagataaggctgcagacgcctgccgctacctgcagacatacggcgagtggaatcgggctgcatggctggcaaaagtccgtttgaatcctgaggagtgtgccgatgttttaaggcggtgggttgaccacctttgttctccacaagtcaatcagaaatcaaaggctctcctggttctcctctctctgggctgcttttttagcgtggcagagacgcttcacagcatgagatactttgatagagcagccttatttgtggaagcttgcctcaagtatggagcatttgaagtcactgaggacacagagaaactcatcactgctatatatgcagattatgcccggagtttgaagaacctcggttttaagcagggagcagttctctttgcttcaaaagccggagcagctggcaaagacttattgaatgagcttgagtcccccaaggaagaacccattgaagagtgacagcttaataaatgccagggaatctgacctggaaggcagatgggagggggctggtctggctgtggccaccgtcacagtccaggatgaagaggagtacagggtcctgtgagctgtttgaccactgttctaagactatgtgtgcccaaaagcacataagcatctatgttgagagtaagtttgtatcctgcgttggtctcagaaagaacgtgaatgcttaagattttgaaagtacataatattttatactttgggagagagctttaagagtccctggaaatactttttaatttttttaacttaaaattcaagagactgaatcacttttctcattgattaaatgtaaagattattgagaaacctatagtaaatgaaatttgtgagatgttttctcaaatatatgctgtgcctgtacttatatacagtctttcaagagagatacaaacaaggcagaaacatttaaactagtattaaaggtagtttaccaaagcattttttgttttcttaccttgaaaacacagaaccgttaattccttggtttaagcagttgctaagttttgtaattttaggctcagaggaccataggaggttttaagatttatgtttagtccgataggtgaggtctttgatattttgaattttaactccttttatgatacatcacagtaacctcatttttgaagtctttctttgtactttaatgttctctctgttctaatagttgaagtatgagatgtaactattataaactgttgctgaaaacataaatgtctgtaacttacaaacatgataaataaattaaaaattcca

SEQ ID NO: 339439 - DNA, 4494 bp, Homo sapiens
cgcctaagcggcggaactctggagagtgcggaacctaggatcctaggaaactgaaggcaacggaacctgggggcgatggaatccgggagcggtggaacccggagcctgtagaacttgaatctagaggaacctgacagcggcgccgagggggccacccggactctgtttggaacggaagcacagtgtccgccgcttcctggttgcgggtcagcgcccaggtcctgggctggccgccgggatgttgccctacacagtgaacttcaaggtgtcggcgcgcaccctcacgggggccctcaacgcccacaacaaggcggcggtggactggggctggcaaggtttaattgcttatggatgtcattcacttgtggtagtgattgattccattactgcccaaactcttcaagttttagaaaagcataaagctgatgttgtaaaggttaaatgggccagggaaaactatcaccataacattggctcaccatattgcttacggttagcttctgctgatgtcaatgggaagatcatcgtctgggatgtagcagcaggagtagctcagtgtgagatccaagagcatgccaagcctatccaggatgttcagtggttgtggaatcaagatgcttcccgcgatttactgcttgctatccacccgccaaattacattgtgctctggaatgccgacactggcaccaaactatggaagaagagctatgcagataacattctttctttttcttttgacccttttgatccctcacatttaactttgcttaccagcgagggtattgttttcatctcagacttctccccatccaagcctccctcaggccctgggaaaaaagtttacatatccagcccacactctagcccagctcataacaagctggccacagccacaggtgccaagaaagctctaaataaagtaaaaattttaatcactcaagagaaacctagtgctgaattcataactctcaatgattgccttcagttggcatacctgccttcaaaaaggaatcacatgttgttgctctatcctcgagagattttaatccttgaccttgaggtgaatcagacggtgggtgtgattgcaatagaacgcacaggagttccatttttacaggtaataccctgctttcagcgtgatggtttattttgtctacatgaaaatggttgtataactttacgtgttcgaagatcttataataacatttttaccacttcaaatgaggaaccagatccagatccagttcaggagcttacctatgatttacgaagccagtgtgatgcaatcagggtgacaaaaaccgtccgtcccttcagtatggtgtgctgtcctgtcaatgagaatgcagccgccctcgtagtgagtgatggcagggtcatgatatgggaactcaagtctgcagtttgtaatcgaaattcacggaacagtagttctggtgtgtcacctttatattcaccagtgtctttctgtggaattcctgtaggagtgctacagaataaactcccagacctttccttagataacatgattgggcaaagtgcaattgctggggaagaacatcccagaggttcaattctgcgggaagtgcacctcaagttcctgctgacgggactgctttcaggactgcccgcaccacagtttgctattcgtatgtgtccaccgttgaccacaaaaaacatcaagatgtatcagccactgctggctgttggtacaagtaatggttctgtcctggtgtaccatctcaccagtggtctgctacacaaagagttaagcatccactcatgtgaagtcaagggtattgaatggacaagtttgactagttttctttcttttgctacctcaacaccaaacaatatgggattagtgagaaatgaacttcaactggttgatcttccaacaggtaggagcattgcttttcgtggtgaaagaggcaatgatgaatctgccatcgaaatgattaaagtatctcatttgaagcagtatttggcagtcgtattcagagataaacccctggagctatgggatgttaggacttgtacccttcttagagagatgtccaaaaacttccctacaataactgctttggagtggtcaccatctcacaacttgaagagcctgagaaagaagcaacttgctactcgagaggccatggcccgccagaccgtagtctcagacacagagctgagtattgttgaatcatctgtgatcagcttgctgcaggaggcagaaagtaaatctgaacttagtcagaacatctctgcccgggaacattttgtatttaccgatattgatggccaagtgtatcatctcactgttgaaggaaactcagtaaaagacagtgctcggattccaccagatggaagtatgggtagtattacctgcatcgcttggaaaggtgatacattagtgcttggagatatggatggaaatttaaatttctgggacttgaaaggcagagtatccagaggaatacccacacaccgaagttgggtgaggaagattcgttttgctcctggtaaaggaaatcaaaaattaatagcaatgtacaatgatggagctgaagtgtgggatactaaagagagcctgtgtggtgcccctatctccttgttccaagggcctctcttgccttgaaagccttcttattacaccagccttggaatggacagtattctttggacatttctcatgttgactatccagaaaatgaagaaataaagaatctcctccaagaacagttgaattcattgtctaatgacataaagaaactgttgcttgatccagaattcactctcttgcagaggtgcctgcttgtttcaaggctctatggtgatgaatcggagctgcacttctggactgtcgctgcccactacctgcacagcttatcccaggaaaagtcagccagcacaacagctcctaaagaagctgctcctcgagacaaactgagcaacccactggatatatgctatgacgtgctcttgaaacggtcaacttatgatcatacaaggaaatgtacagaccagctactgctcttgggtcaaacagacagagctgtgcagttgctgttggaaacaagtgcagataaccagcattattactgtgattcactgaaagcctgtttagtcactactgtcacctcgtcaggcccctctcagagcaccattaagttggtggcaacgaatatgattgccaatggcaaattggcagagggcgttcagttgctctgcctgatagataaggctgcagacgcctgccgctacctgcagacatacggcgagtggaatcgggctgcatggctggcaaaagtccgtttgaatcctgaggagtgtgccgatgttttaaggcggtgggttgaccacctttgttctccacaagtcaatcagaaatcaaaggctctcctggttctcctctctctgggctgcttttttagcgtggcagagacgcttcacagcatgagatactttgatagagcagccttatttgtggaagcttgcctcaagtatggagcatttgaagtcactgaggacacagagaaactcatcactgctatatatgcagattatgcccggagtttgaagaacctcggttttaagcagggagcagttctctttgcttcaaaagccggagcagctggcaaagacttattgaatgagcttgagtcccccaaggaagaacccattgaagagtgacagcttaataaatgccagggaatctgacctggaaggcagatgggagggggctggtctggctgtggccaccgtcacagtccaggatgaagaggagtacagggtcctgtgagctgtttgaccactgttctaagactatgtgtgcccaaaagcacataagcatctatgttgagagtaagtttgtatcctgcgttggtctcagaaagaacgtgaatgcttaagattttgaaagtacataatattttatactttgggagagagctttaagagtccctggaaatactttttaatttttttaacttaaaattcaagagactgaatcacttttctcattgattaaatgtaaagattattgagaaacctatagtaaatgaaatttgtgagatgttttctcaaatatatgctgtgcctgtacttatatacagtctttcaagagagatacaaacaaggcagaaacatttaaactagtattaaaggtagtttaccaaagcattttttgttttcttaccttgaaaacacagaaccgttaattccttggtttaagcagttgctaagttttgtaattttaggctcagaggaccataggaggttttaagatttatgtttagtccgataggtgaggtctttgatattttgaattttaactccttttatgatacatcacagtaacctcatttttgaagtctttctttgtactttaatgttctctctgttctaatagttgaagtatgagatgtaactattataaactgttgctgaaaacataaatgtctgtaacttacaaacatgataaataaattaaaaattcca

SEQ ID NO: 339440 - DNA, 4768 bp, Homo sapiens
cgcctaagcggcggaactctggagagtgcggaacctaggatcctaggaaactgaaggcaacggaacctgggggcgatggaatccgggagcggtggaacccggagcctgtagaacttgaatctagaggaacctgacagcggcgccgagggggccacccggactctgtttggaacggaagcacagtgtccgccgcttcctggttgcgggtcagcgcccaggtcctgggctggccgccgggatgttgccctacacagtgaacttcaaggtgtcggcgcgcaccctcacgggggccctcaacgcccacaacaaggcggcggtggactggggctggcaaggtttaattgcttatggatgtcattcacttgtggtagtgattgattccattactgcccaaactcttcaagttttagaaaagcataaagctgatgttgtaaaggttaaatgggccagggaaaactatcaccataacattggctcaccatattgcttacggttagcttctgctgatgtcaatgggaagatcatcgtctgggatgtagcagcaggagtagctcagtgtgagatccaagagcatgccaagcctatccaggatgttcagtggttgtggaatcaagatgcttcccgcgatttactgcttgctatccacccgccaaattacattgtgctctggaatgccgacactggcaccaaactatggaagaagagctatgcagataacattctttctttttcttttgacccttttgatccctcacatttaactttgcttaccagcgagggtattgttttcatctcagacttctccccatccaagcctccctcaggccctgggaaaaaagtttacatatccagcccacactctagcccagctcataacaagctggccacagccacaggtgccaagaaagctctaaataaagtaaaaattttaatcactcaagagaaacctagtgctgaattcataactctcaatgattgccttcagttggcatacctgccttcaaaaaggaatcacatgttgttgctctatcctcgagagattttaatccttgaccttgaggtgaatcagacggtgggtgtgattgcaatagaacgcacaggagttccatttttacaggtaataccctgctttcagcgtgatggtttattttgtctacatgaaaatggttgtataactttacgtgttcgaagatcttataataacatttttaccacttcaaatgaggaaccagatccagatccagttcaggagcttacctatgatttacgaagccagtgtgatgcaatcagggtgacaaaaaccgtccgtcccttcagtatggtgtgctgtcctgtcaatgagaatgcagccgccctcgtagtgagtgatggcagggtcatgatatgggaactcaagtctgcagtttgtaatcgaaattcacggaacagtagttctggtgtgtcacctttatattcaccagtgtctttctgtggaattcctgtaggagtgctacagaataaactcccagacctttccttagataacatgattgggcaaagtgcaattgctggggaagaacatcccagaggttcaattctgcgggaagtgcacctcaagttcctgctgacgggactgctttcaggactgcccgcaccacagtttgctattcgtatgtgtccaccgttgaccacaaaaaacatcaagatgtatcagccactgctggctgttggtacaagtaatggttctgtcctggtgtaccatctcaccagtggtctgctacacaaagagttaagcatccactcatgtgaagtcaagggtattgaatggacaagtttgactagttttctttcttttgctacctcaacaccaaacaatatgggattagtgagaaatgaacttcaactggttgatcttccaacaggtaggagcattgcttttcgtggtgaaagaggcaatgatgaatctgccatcgaaatgattaaagtatctcatttgaagcagtatttggcagtcgtattcagagataaacccctggagctatgggatgttaggacttgtacccttcttagagagatgtccaaaaacttccctacaataactgctttggagtggtcaccatctcacaacttgaagagcctgagaaagaagcaacttgctactcgagaggccatggcccgccagaccgtagtctcagacacagagctgagtattgttgaatcatctgtgatcagcttgctgcaggaggcagaaagtaaatctgaacttagtcagaacatctctgcccgggaacattttgtatttaccgatattgatggccaagtgtatcatctcactgttgaaggaaactcagtaaaagacagtgctcggattccaccagatggaagtatgggtagtattacctgcatcgcttggaaaggtgatacattagtgcttggagatatggatggaaatttaaatttctgggacttgaaaggcagagtatccagaggaatacccacacaccgaagttgggtgaggaagattcgttttgctcctggtaaaggaaatcaaaaattaatagcaatgtacaatgatggagctgaagtgtgggatactaaagaggttcagatggtgagcagtttaagaagtggcagaaatgtgacctttcgtatattggatgtggactggtgtacgtcagataaagtgatcttggcctcagatgatgggtgcatcagagtcctagagatgtctatgaagtctgcgtgctttagaatggatgaacaagagttaaccgagcctgtgtggtgcccctatctccttgttccaagggcctctcttgccttgaaagccttcttattacaccagccttggaatggacagtattctttggacatttctcatgttgactatccagaaaatgaagaaataaagaatctcctccaagaacagttgaattcattgtctaatgacataaagaaactgttgcttgatccagaattcactctcttgcagaggtgcctgcttgtttcaaggctctatggtgatgaatcggagctgcacttctggactgtcgctgcccactacctgcacagcttatcccaggaaaagtcagccagcacaacagctcctaaagaagctgctcctcgagacaaactgagcaacccactggatatatgctatgacgtgctctgtgaaaatgcctactttcagaaatttcagctagaaagggttaatctacaggaagtgaaacggtcaacttatgatcatacaaggaaatgtacagaccagctactgctcttgggtcaaacagacagagctgtgcagttgctgttggaaacaagtgcagataaccagcattattactgtgattcactgaaagcctgtttagtcactactgtcacctcgtcaggcccctctcagagcaccattaagttggtggcaacgaatatgattgccaatggcaaattggcagagggcgttcagttgctctgcctgatagataaggctgcagacgcctgccgctacctgcagacatacggcgagtggaatcgggctgcatggctggcaaaagtccgtttgaatcctgaggagtgtgccgatgttttaaggcggtgggttgaccacctttgttctccacaagtcaatcagaaatcaaaggctctcctggttctcctctctctgggctgcttttttagcgtggcagagacgcttcacagcatgagatactttgatagagcagccttatttgtggaagcttgcctcaagtatggagcatttgaagtcactgaggacacagagaaactcatcactgctatatatgcagattatgcccggagtttgaagaacctcggttttaagcagggagcagttctctttgcttcaaaagccggagcagctggcaaagacttattgaatgagcttgagtcccccaaggaagaacccattgaagagtgacagcttaataaatgccagggaatctgacctggaaggcagatgggagggggctggtctggctgtggccaccgtcacagtccaggatgaagaggagtacagggtcctgtgagctgtttgaccactgttctaagactatgtgtgcccaaaagcacataagcatctatgttgagagtaagtttgtatcctgcgttggtctcagaaagaacgtgaatgcttaagattttgaaagtacataatattttatactttgggagagagctttaagagtccctggaaatactttttaatttttttaacttaaaattcaagagactgaatcacttttctcattgattaaatgtaaagattattgagaaacctatagtaaatgaaatttgtgagatgttttctcaaatatatgctgtgcctgtacttatatacagtctttcaagagagatacaaacaaggcagaaacatttaaactagtattaaaggtagtttaccaaagcattttttgttttcttaccttgaaaacacagaaccgttaattccttggtttaagcagttgctaagttttgtaattttaggctcagaggaccataggaggttttaagatttatgtttagtccgataggtgaggtctttgatattttgaattttaactccttttatgatacatcacagtaacctcatttttgaagtctttctttgtactttaatgttctctctgttctaatagttgaagtatgagatgtaactattataaactgttgctgaaaacataaatgtctgtaacttacaaacatgataaataaattaaaaattccaacaaaaaaaaaaaaccccccacccttggagttgaagtttactttagag

SEQ ID NO: 339441 - DNA, 4899 bp, Homo sapiens
cgcctaagcggcggaactctggagagtgcggaacctaggatcctaggaaactgaaggcaacggaacctgggggcgatggaatccgggagcggtggaacccggagcctgtagaacttgaatctagaggaacctgacagcggcgccgagggggccacccggactctgtttggaacggaagcacagtgtccgccgcttcctggttgcgggtcagcgcccaggtcctgggctggccgccgggatgttgccctacacagtgaacttcaaggtgtcggcgcgcaccctcacgggggccctcaacgcccacaacaaggcggcggtggactggggctggcaaggtttaattgcttatggatgtcattcacttgtggtagtgattgattccattactgcccaaactcttcaagttttagaaaagcataaagctgatgttgtaaaggttaaatgggccagggaaaactatcaccataacattggctcaccatattgcttacggttagcttctgctgatgtcaatgggaagatcatcgtctgggatgtagcagcaggagtagctcagtgtgagatccaagagcatgccaagcctatccaggatgttcagtggttgtggaatcaagatgcttcccgcgatttactgcttgctatccacccgccaaattacattgtgctctggaatgccgacactggcaccaaactatggaagaagagctatgcagataacattctttctttttcttttgacccttttgatccctcacatttaactttgcttaccagcgagggtattgttttcatctcagacttctccccatccaagcctccctcaggccctgggaaaaaagtttacatatccagcccacactctagcccagctcataacaagctggccacagccacaggtgccaagaaagctctaaataaagtaaaaattttaatcactcaagagaaacctagtgctgaattcataactctcaatgattgccttcagttggcatacctgccttcaaaaaggaatcacatgttgttgctctatcctcgagagattttaatccttgaccttgaggtgaatcagacggtgggtgtgattgcaatagaacgcacaggagttccatttttacaggtaataccctgctttcagcgtgatggtttattttgtctacatgaaaatggttgtataactttacgtgttcgaagatcttataataacatttttaccacttcaaatgaggaaccagatccagatccagttcaggagcttacctatgatttacgaagccagtgtgatgcaatcagggtgacaaaaaccgtccgtcccttcagtatggtgtgctgtcctgtcaatgagaatgcagccgccctcgtagtgagtgatggcagggtcatgatatgggaactcaagtctgcagtttgtaatcgaaattcacggaacagtagttctggtgtgtcacctttatattcaccagtgtctttctgtggaattcctgtaggagtgctacagaataaactcccagacctttccttagataacatgattgggcaaagtgcaattgctggggaagaacatcccagaggttcaattctgcgggaagtgcacctcaagttcctgctgacgggactgctttcaggactgcccgcaccacagtttgctattcgtatgtgtccaccgttgaccacaaaaaacatcaagatgtatcagccactgctggctgttggtacaagtaatggttctgtcctggtgtaccatctcaccagtggtctgctacacaaagagttaagcatccactcatgtgaagtcaagggtattgaatggacaagtttgactagttttctttcttttgctacctcaacaccaaacaatatgggattagtgagaaatgaacttcaactggttgatcttccaacaggtaggagcattgcttttcgtggtgaaagaggcaatgatgaatctgccatcgaaatgattaaagtatctcatttgaagcagtatttggcagtcgtattcagagataaacccctggagctatgggatgttaggacttgtacccttcttagagagatgtccaaaaacttccctacaataactgctttggagtggtcaccatctcacaacttgaagagcctgagaaagaagcaacttgctactcgagaggccatggcccgccagaccgtagtctcagacacagagctgagtattgttgaatcatctgtgatcagcttgctgcaggaggcagaaagtaaatctgaacttagtcagaacatctctgcccgggaacattttgtatttaccgatattgatggccaagtgtatcatctcactgttgaaggaaactcagtaaaagacagtgctcggattccaccagatggaagtatgggtagtattacctgcatcgcttggaaaggtgatacattagtgcttggagatatggatggaaatttaaatttctgggacttgaaaggcagagtatccagaggaatacccacacaccgaagttgggtgaggaagattcgttttgctcctggtaaaggaaatcaaaaattaatagcaatgtacaatgatggagctgaagtgtgggatactaaagaggttcagatggtgagcagtttaagaagtggcagaaatgtgacctttcgtatattggatgtggactggtgtacgtcagataaagtgatcttggcctcagatgatgggtgcatcagagtcctagagatgtctatgaagtctgcgtgctttagaatggatgaacaagagttaaccgagcctgtgtggtgcccctatctccttgttccaagggcctctcttgccttgaaagccttcttattacaccagccttggaatggacagtattctttggacatttctcatgttgactatccagaaaatgaagaaataaagaatctcctccaagaacagttgaattcattgtctaatgacataaagaaactgttgcttgatccagaattcactctcttgcagaggtgcctgcttgtttcaaggctctatggtgatgaatcggagctgcacttctggactgtcgctgcccactacctgcacagcttatcccaggaaaagtcagccagcacaacagctcctaaagaagctgctcctcgagacaaactgagcaacccactggatatatgctatgacgtgctctgtgaaaatgcctactttcagaaatttcagctagaaagggttaatctacaggaagtgaaacggtcaacttatgatcatacaaggaaatgtacagaccagctactgctcttgggtcaaacagacagagctgtgcagttgctgttggaaacaagtgcagataaccagcattattactgtgattcactgaaagcctgtttagtcactactgtcacctcgtcaggcccctctcagagcaccattaagttggtggcaacgaatatgattgccaatggcaaattggcagagggcgttcagttgctctgcctgatagataaggctgcagacgcctgccgctacctgcagacatacggcgagtggaatcgggctgcatggctggcaaaagtccgtttgaatcctgaggagtgtgccgatgttttaaggcggtgggttgaccacctttgttctccacaagtcaatcagaaatcaaaggctctcctggttctcctctctctgggctgcttttttagcgtggcagagacgcttcacagcatgagatactttgatagagcagccttatttgtggaagcttgcctcaagtatggagcatttgaagtcactgaggacacagagaaactcatcactgctatatatgcagattatgcccggagtttgaagaacctcggttttaagcagggagcagttctctttgcttcaaaagccggagcagctggcaaagacttattgaatgagcttgagtcccccaaggaagaacccattgaagagtgacagcttaataaatgccagggaatctgacctggaaggcagatgggagggggctggtctggctgtggccaccgtcacagtccaggatgaagaggagtacagggtcctgtgagctgtttgaccactgttctaagactatgtgtgcccaaaagcacataagcatctatgttgagagtaagtttgtatcctgcgttggtctcagaaagaacgtgaatgcttaagattttgaaagtacataatattttatactttgggagagagctttaagagtccctggaaatactttttaatttttttaacttaaaattcaagagactgaatcacttttctcattgattaaatgtaaagattattgagaaacctatagtaaatgaaatttgtgagatgttttctcaaatatatgctgtgcctgtacttatatacagtctttcaagagagatacaaacaaggcagaaacatttaaactagtattaaaggtagtttaccaaagcattttttgttttcttaccttgaaaacacagaaccgttaattccttggtttaagcagttgctaagttttgtaattttaggctcagaggaccataggaggttttaagatttatgtttagtccgataggtgaggtctttgatattttgaattttaactccttttatgatacatcacagtaacctcatttttgaagtctttctttgtactttaatgttctctctgttctaatagttgaagtatgagatgtaactattataaactgttgctgaaaacataaatgtctgtaacttacaaacatgataaataaattaaaaattccaatttccagggactcttaaagctctctcccaagtataaaatattatgtactttcaaaatcttaagcattcacgttctttctgagaccaacgccaggatacaaacttactctcaacatagatgcttatgtgcttttgggcacacatagtcttagaacagtggtcaaacagcttcacagacc

SEQ ID NO: 339442 - DNA, 1331 bp, Homo sapiens
cagactttcaaatggaatgaggatatgcaggttaagtttctcctctcttatcattcatcttccaatcttcagttgagtgtaggttaatgggaggatgttggttgggtcttctggaaggagaagctttggactcagctggtacgaaaggtaatgatggtacagactgagacatggcctactatggccgggaatcaccctctgcccgcgaaaagtctcctgtgttcatcctgtgctgcccgctgtggacaccaggtcccttccgagcagccagcagagcagacgcgactcacccttcctgcttctgggagcctgtgaagagtctcatcacagccctttttactcttcttttccttaactatggtttacagaaactcatcactgctatatatgcagattatgcccggagtttgaagaacctcggttttaagcagggagcagttctctttgcttcaaaagccggagcagctggcaaagacttattgaatgagcttgagtcccccaaggaagaacccattgaagagtgacagcttaataaatgccagggaatctgacctggaaggcagatgggagggggctggtctggctgtggccaccgtcacagtccaggatgaagaggagtacagggtcctgtgagctgtttgaccactgttctaagactatgtgtgcccaaaagcacataagcatctatgttgagagtaagtttgtatcctgcgttggtctcagaaagaacgtgaatgcttaagattttgaaagtacataatattttatactttgggagagagctttaagagtccctggaaatactttttaatttttttaacttaaaattcaagagactgaatcacttttctcattgattaaatgtaaagattattgagaaacctatagtaaatgaaatttgtgagatgttttctcaaatatatgctgtgcctgtacttatatacagtctttcaagagagatacaaacaaggcagaaacatttaaactagtattaaaggtagtttaccaaagcattttttgttttcttaccttgaaaacacagaaccgttaattccttggtttaagcagttgctaagttttgtaattttaggctcagaggaccataggaggttttaagatttatgtttagtccgataggtgaggtctttgatattttgaattttaactccttttatgatacatcacagtaacctcatttttgaagtctttctttgtactttaatgttctctctgttctaatagttgaagtatgagatgtaactattataaactgttgctgaaaacataaatgtctgtaacttacaaacatgataaataaattaaaaattcca

SEQ ID NO: 339443 - DNA, 3308 bp, Homo sapiens
cgcctaagcggcggaactctggagagtgcggaacctaggatcctaggaaactgaaggcaacggaacctgggggcgatggaatccgggagcggtggaacccggagcctgtagaacttgaatctagaggaacctgacagcggcgccgagggggccacccggactctgtttggaacggaagcacagtgtccgccgcttcctggttgcgggtcagcgcccaggtcctgggctggccgccgggatgttgccctacacagtgaacttcaaggtgtcggcgcgcaccctcacgggggccctcaacgcccacaacaaggcggcggtggactggggctggcaaggtttaattgcttatggatgtcattcacttgtggtagtgattgattccattactgcccaaactcttcaagttttagaaaagcataaagctgatgttgtaaaggttaaatgggccagggaaaactatcaccataacattggctcaccatattgcttacggttagcttctgctgatgtcaatgggaagatcatcgtctgggatgtagcagcaggagtagctcagtgtgagatccaagagcatgccaagcctatccaggatgttcagtggttgtggaatcaagatgcttcccgcgatttactgcttgctatccacccgccaaattacattgtgctctggaatgccgacactggcaccaaactatggaagaagagctatgcagataacattctttctttttcttttgacccttttgatccctcacatttaactttgcttaccagcgagggtattgttttcatctcagacttctccccatccaagcctccctcaggccctgggaaaaaagtttacatatccagcccacactctagcccagctcataacaagctggccacagccacaggtgccaagaaagctctaaataaagtaaaaattttaatcactcaagagaaacctagtgctgaattcataactctcaatgattgccttcagttggcatacctgccttcaaaaaggaatcacatgttgttgctctatcctcgagagattttaatccttgaccttgaggtgaatcagacggtgggtgtgattgcaatagaacgcacaggagttccatttttacaggtaataccctgctttcagcgtgatggtttattttgtctacatgaaaatggttgtataactttacgtgttcgaagatcttataataacatttttaccacttcaaatgaggaaccagatccagatccagttcaggagcttacctatgatttacgaagccagtgtgatgcaatcagggtgacaaaaaccgtccgtcccttcagtatggtgtgctgtcctgtcaatgagaatgcagccgccctcgtagtgagtgatggcagggtcatgatatgggaactcaagtctgcagtttgtaatcgaaattcacggaacagtagttctggtgtgtcacctttatattcaccagtgtctttctgtggaattcctgtaggagtgctacagaataaactcccagacctttccttagataacatgattgggcaaagtgcaattgctggggaagaacatcccagaggttcaattctgcgggaagtgcacctcaagttcctgctgacgggactgctttcaggactgcccgcaccacagtttgctattcgtatgtgtccaccgttgaccacaaaaaacatcaagatgtatcagccactgctggctgttggtacaagtaatggttctgtcctggtgtaccatctcaccagtggtctgctacacaaagagttaagcatccactcatgtgaagtcaagggtattgaatggacaagtttgactagttttctttcttttgctacctcaacaccaaacaatatgggattagtgagaaatgaacttcaactggttgatcttccaacaggtttgtttttaaagatccaaataggtttgtcatattgaataaacatgttgccatttataaaacatgtttgaaagtacttctttcaccttggaatttttttttatatttcatgcttatatatttattcttttattctctaataattgccctagaaaggcctcatcattgtttacatggaaatgttgttggcacaaatacatggtaaaatggaggaccattagcctgaacagacagattcattaaaaaataggataccggttctacttttaagtgcattgttatatgtaaccaactttaaaagatcgatttaaaaataactctgtcaatggactttattagagtctgtgctggaaattttggcttttataggaaacacttagaaaatttataggttaaggattgtttttaaatgctcaaatttaaaacttgtaatagtctctggctgaatgaatagagaaacttaatttgggattttgaagattctacagtaggaaacgtcccaataaggtaactttttcagaattgaaagcctaaacccagtgaatttcaaaataaagaatttgaaaatataataaggaaagagtttcaaattattttctggtgtatgcagtagtttcaaagaggtttttttaaaaataaaattgtgatgagtttctttaaaatggtatagcaacacgaatcatatgtagatgatcttaaccaatgagagcatgtgtatgtatgtgtaaaatgaattaaatcaaataaatggttgtaaatcaagtaagttgtaaataaatgaagtacatggttgcttttttatgttctccatatgtattttcaagctctcaaagatccagttgttcttacttctcagggtatgttgctgaacttccaggaatcattcccgtctttagtccagtgttgctgctctagtctcattggaagtgacctgtccactgactctcatccccaagttcctaatttgccagcagaatggtactggccctgtgtctagtgatcccagggataaaatgctgttgtctagtatcattgacttaaaaaaaagaaaaaaaatccctgttttatttgttttggtcagctcaagttcaggactgttagataacttaaaatctgctttgcacagatgtatttttaaggaacaaacatctacagtaacagttacagatttccttaagtgggatatttgagttcatagatggtagacttttatagcctggccaacatggtgaaaccccatctctactaggagtacaaaaatgagctggcgtggtggcgagcgcctgtaatcccagctactcgggatgctaaggcaagaaaatcacttgaacctgggaggcggaggttgcagtgagccaagattgcgccattgcactccagcctgggtaacaaagtgagaccatctca

SEQ ID NO: 339444 - DNA, 1960 bp, Homo sapiens
cgcctaagcggcggaactctggagagtgcggaacctaggatcctaggaaactgaaggcaacggaacctgggggcgatggaatccgggagcggtggaacccggagcctgtagaacttgaatctagaggaacctgacagcggcgccgagggggccacccggactctgtttggaacggaagcacagtgtccgccgcttcctggttgcgggtcagcgcccaggtcctgggctggccgccgggatgttgccctacacagtgaacttcaaggtgtcggcgcgcaccctcacgggggccctcaacgcccacaacaaggcggcggtggactggggctggcaaggtttaattgcttatggatgtcattcacttgtggtagtgattgattccattactgcccaaactcttcaagttttagaaaagcataaagctgatgttgtaaaggttaaatgggccagggaaaactatcaccataacattggctcaccatattgcttacggttagcttctgctgatgtcaatgggaagatcatcgtctgggatgtagcagcaggagtagctcagtgtgagatccaagagcatgccaagcctatccaggatgttcagtggttgtggaatcaagatgcttcccgcgatttactgcttgctatccacccgccaaattacattgtgctctggaatgccgacactggcaccaaactatggaagaagagctatgcagataacattctttctttttcttttgacccttttgatccctcacatttaactttgcttaccagcgagggtattgttttcatctcagacttctccccatccaagcctccctcaggccctgggaaaaaagtttacatatccagcccacactctagcccagctcataacaagctggccacagccacaggtgccaagaaagctctaaataaagtaaaaattttaatcactcaagagaaacctagtgctgaattcataactctcaatgattgccttcagttggcatacctgccttcaaaaaggaatcacatgttgttgctctatcctcgagagattttaatccttgaccttgaggtgaatcagacggtgggtgtgattgcaatagaacgcacaggagttccatttttacaggtaataccctgctttcagcgtgatggtttattttgtctacatgaaaatggttgtataactttacgtgttcgaagatcttataataacatttttaccacttcaaatgaggaaccagatccagatccagttcaggagcttacctatgatttacgaagccagtgtgatgcaatcagggtgacaaaaaccgtccgtcccttcagtatggtgtgctgtcctgtcaatgagaatgcagccgccctcgtagtgagtgatggcagggtcatgatatgggaactcaagtctgcagtttgtaatcgaaattcacggaacagtagttctggtgtgtcacctttatattcaccagtgtctttctgtggaattcctgtaggagtgctacagaataaactcccagacctttccttagataacatgattgggcaaagtgcaattgctggggaagaacatcccagaggttcaattctgcgggaagtgcacctcaagttcctgctgacgggactgctttcaggactgcccgcaccacagtttgctattcgtatgtgtccaccgttgaccacaaaaaacatcaagatgtatcagccactgctggctgttggtacaagtaatggttctgtcctggtgtaccatctcaccagtggtctgctacacaaagagttaagcatccactcatgtgaagtcaagggtattgaatggacaagtttgactagttttctttcttttgctacctcaacaccaaacaatatgggattagtgagaaatgaacttcaactggttgatcttccaacaggtttgtttttaaagatccaaataggtttgtcatattgaataaacatgttgccatttata

SEQ ID NO: 339445 - DNA, 422 bp, Homo sapiens
cttttttttttgaggtatttgttcctcaaaagacatcccctctctttaaatctagttccagtaactacttaatgtctatgaagttgaaatctcctatttcttcatagttgaaattgataggcaatgtagctctttgttagtgtctaaagtctgttttaggatttgatgactaaaagcatactaaagcacagccctttaaattaagttttattaaaatatttattataatgtcttatacagcatagtgaaatttatatttgtttgttgctgttgttttctagggaagtatgggtagtattacctgcatcgcttggaaaggtgatacattagtgcttggagatatggatggaaatttaaatttctgggacttgaaaggcagagtatccaggtataagccaagaatgaaatcttgttatttcatt

SEQ ID NO: 339446 - DNA, 4720 bp, Homo sapiens
cgcctaagcggcggaactctggagagtgcggaacctaggatcctaggaaactgaaggcaacggaacctgggggcgatggaatccgggagcggtggaacccggagcctgtagaacttgaatctagaggaacctgacagcggcgccgagggggccacccggactctgtttggaacggaagcacagtgtccgccgcttcctggttgcgggtcagcgcccaggtcctgggctggccgccgggatgttgccctacacagtgaacttcaaggtgtcggcgcgcaccctcacgggggccctcaacgcccacaacaaggcggcggtggactggggctggcaaggtttaattgcttatggatgtcattcacttgtggtagtgattgattccattactgcccaaactcttcaagttttagaaaagcataaagctgatgttgtaaaggttaaatgggccagggaaaactatcaccataacattggctcaccatattgcttacggttagcttctgctgatgtcaatgggaagatcatcgtctgggatgtagcagcaggagtagctcagtgtgagatccaagagcatgccaagcctatccaggatgttcagtggttgtggaatcaagatgcttcccgcgatttactgcttgctatccacccgccaaattacattgtgctctggaatgccgacactggcaccaaactatggaagaagagctatgcagataacattctttctttttcttttgacccttttgatccctcacatttaactttgcttaccagcgagggtattgttttcatctcagacttctccccatccaagcctccctcaggccctgggaaaaaagtttacatatccagcccacactctagcccagctcataacaagctggccacagccacaggtgccaagaaagctctaaataaagtaaaaattttaatcactcaagagaaacctagtgctgaattcataactctcaatgattgccttcagttggcatacctgccttcaaaaaggaatcacatgttgttgctctatcctcgagagattttaatccttgaccttgaggtgaatcagacggtgggtgtgattgcaatagaacgcacaggagttccatttttacaggtaataccctgctttcagcgtgatggtttattttgtctacatgaaaatggttgtataactttacgtgttcgaagatcttataataacatttttaccacttcaaatgaggaaccagatccagatccagttcaggagcttacctatgatttacgaagccagtgtgatgcaatcagggtgacaaaaaccgtccgtcccttcagtatggtgtgctgtcctgtcaatgagaatgcagccgccctcgtagtgagtgatggcagggtcatgatatgggaactcaagtctgcagtttgtaatcgaaattcacggaacagtagttctggtgtgtcacctttatattcaccagtgtctttctgtggaattcctgtaggagtgctacagaataaactcccagacctttccttagataacatgattgggcaaagtgcaattgctggggaagaacatcccagaggttcaattctgcgggaagtgcacctcaagttcctgctgacgggactgctttcaggactgcccgcaccacagtttgctattcgtatgtgtccaccgttgaccacaaaaaacatcaagatgtatcagccactgctggctgttggtacaagtaatggttctgtcctggtgtaccatctcaccagtggtctgctacacaaagagttaagcatccactcatgtgaagtcaagggtattgaatggacaagtttgactagttttctttcttttgctacctcaacaccaaacaatatgggattagtgagaaatgaacttcaactggttgatcttccaacaggtaggagcattgcttttcgtggtgaaagaggcaatgatgaatctgccatcgaaatgattaaagtatctcatttgaagcagtatttggcagtcgtattcagagataaacccctggagctatgggatgttaggacttgtacccttcttagagagatgtccaaaaacttccctacaataactgctttggagtggtcaccatctcacaacttgaagagcctgagaaagaagcaacttgctactcgagaggccatggcccgccagaccgtagtctcagacacagagctgagtattgttgaatcatctgtgatcagcttgctgcaggaggcagaaagtaaatctgaacttagtcagaacatctctgcccgggaacattttgtatttaccgatattgatggccaagtgtatcatctcactgttgaaggaaactcagtaaaagacagtgctcggattccaccagatggaagtatgggtagtattacctgcatcgcttggaaaggtgatacattagtgcttggagatatggatggaaatttaaatttctgggacttgaaaggcagagtatccagaggaatacccacacaccgaagttgggtgaggaagattcgttttgctcctggtaaaggaaatcaaaaattaatagcaatgtacaatgatggagctgaagtgtgggatactaaagaggttcagatggtgagcagtttaagaagtggcagaaatgtgacctttcgtatattggatgtggactggtgtacgtcagataaagtgatcttggcctcagatgatgggtgcatcagagtcctagagatgtctatgaagtctgcgtgctttagaatggatgaacaagagttaaccgagcctgtgtggtgcccctatctccttgttccaagggcctctcttgccttgaaagccttcttattacaccagccttggaatggacagtattctttggacatttctcatgttgactatccagaaaatgaagaaataaagaatctcctccaagaacagttgaattcattgtctaatgacataaagaaactgttgcttgatccagaattcactctcttgcagaggtgcctgcttgtttcaaggctctatggtgatgaatcggagctgcacttctggactgtcgctgcccactacctgcacagcttatcccaggaaaagtcagccagcacaacagctcctaaagaagctgctcctcgagacaaactgagcaacccactggatatatgctatgacgtgctctgtgaaaatgcctactttcagaaatttcagctagaaagggttaatctacaggaagtgaaacggtcaacttatgatcatacaaggaaatgtacagaccagctactgctcttgggtcaaacagacagagctgtgcagttgctgttggaaacaagtgcagataaccagcattattactgtgattcactgaaagcctgtttagtcactactgtcacctcgtcaggcccctctcagagcaccattaagttggtggcaacgaatatgattgccaatggcaaattggcagagggcgttcagttgctctgcctgatagataaggctgcagacgcctgccgctacctgcagacatacggcgagtggaatcgggctgcatggctggcaaaagtccgtttgaatcctgaggagtgtgccgatgttttaaggcggtgggttgaccacctttgttctccacaagtcaatcagaaatcaaaggctctcctggttctcctctctctgggctgcttttttagcgtggcagagacgcttcacagcatgagatactttgatagagcagccttatttgtggaagcttgcctcaagtatggagcatttgaagtcactgaggacacagagaaactcatcactgctatatatgcagattatgcccggagtttgaagaacctcggttttaagcagggagcagttctctttgcttcaaaagccggagcagctggcaaagacttattgaatgagcttgagtcccccaaggaagaacccattgaagagtgacagcttaataaatgccagggaatctgacctggaaggcagatgggagggggctggtctggctgtggccaccgtcacagtccaggatgaagaggagtacagggtcctgtgagctgtttgaccactgttctaagactatgtgtgcccaaaagcacataagcatctatgttgagagtaagtttgtatcctgcgttggtctcagaaagaacgtgaatgcttaagattttgaaagtacataatattttatactttgggagagagctttaagagtccctggaaatactttttaatttttttaacttaaaattcaagagactgaatcacttttctcattgattaaatgtaaagattattgagaaacctatagtaaatgaaatttgtgagatgttttctcaaatatatgctgtgcctgtacttatatacagtctttcaagagagatacaaacaaggcagaaacatttaaactagtattaaaggtagtttaccaaagcattttttgttttcttaccttgaaaacacagaaccgttaattccttggtttaagcagttgctaagttttgtaattttaggctcagaggaccataggaggttttaagatttatgtttagtccgataggtgaggtctttgatattttgaattttaactccttttatgatacatcacagtaacctcatttttgaagtctttctttgtactttaatgttctctctgttctaatagttgaagtatgagatgtaactattataaactgttgctgaaaacataaatgtctgtaacttacaaacatgataaataaattaaaaattcca

SEQ ID NO: 339447 - DNA, 5370 bp, Homo sapiens
  misc_feature (3796)..(3796): n is a, c, g, or t
cgcctaagcggcggaactctggagagtgcggaacctaggatcctaggaaactgaaggcaacggaacctgggggcgatggaatccgggagcggtggaacccggagcctgtagaacttgaatctagaggaacctgacagcggcgccgagggggccacccggactctgtttggaacggaagcacagtgtccgccgcttcctggttgcgggtcagcgcccaggtcctgggctggccgccgggatgttgccctacacagtgaacttcaaggtgtcggcgcgcaccctcacgggggccctcaacgcccacaacaaggcggcggtggactggggctggcaaggtttaattgcttatggatgtcattcacttgtggtagtgattgattccattactgcccaaactcttcaagttttagaaaagcataaagctgatgttgtaaaggttaaatgggccagggaaaactatcaccataacattggctcaccatattgcttacggttagcttctgctgatgtcaatgggaagatcatcgtctgggatgtagcagcaggagtagctcagtgtgagatccaagagcatgccaagcctatccaggatgttcagtggttgtggaatcaagatgcttcccgcgatttactgcttgctatccacccgccaaattacattgtgctctggaatgccgacactggcaccaaactatggaagaagagctatgcagataacattctttctttttcttttgacccttttgatccctcacatttaactttgcttaccagcgagggtattgttttcatctcagacttctccccatccaagcctccctcaggccctgggaaaaaagtttacatatccagcccacactctagcccagctcataacaagctggccacagccacaggtgccaagaaagctctaaataaagtaaaaattttaatcactcaagagaaacctagtgctgaattcataactctcaatgattgccttcagttggcatacctgccttcaaaaaggaatcacatgttgttgctctatcctcgagagattttaatccttgaccttgaggtgaatcagacggtgggtgtgattgcaatagaacgcacaggagttccatttttacaggtaataccctgctttcagcgtgatggtttattttgtctacatgaaaatggttgtataactttacgtgttcgaagatcttataataacatttttaccacttcaaatgaggaaccagatccagatccagttcaggagcttacctatgatttacgaagccagtgtgatgcaatcagggtgacaaaaaccgtccgtcccttcagtatggtgtgctgtcctgtcaatgagaatgcagccgccctcgtagtgagtgatggcagggtcatgatatgggaactcaagtctgcagtttgtaatcgaaattcacggaacagggcaaagtgcaattgctggggaagaacatcccagaggttcaattctgcgggaagtgcacctcaagttcctgctgacgggactgctttcaggactgcccgcaccacagtttgctattcgtatgtgtccaccgttgaccacaaaaaacatcaagatgtatcagccactgctggctgttggtacaagtaatggttctgtcctggtgtaccatctcaccagtggtctgctacacaaagagttaagcatccactcatgtgaagtcaagggtattgaatggacaagtttgactagttttctttcttttgctacctcaacaccaaacaatatgggattagtgagaaatgaacttcaactggttgatcttccaacaggtaggagcattgcttttcgtggtgaaagaggcaatgatgaatctgccatcgaaatgattaaagtatctcatttgaagcagtatttggcagtcgtattcagagataaacccctggagctatgggatgttaggacttgtacccttcttagagagatgtccaaaaacttccctacaataactgctttggagtggtcaccatctcacaacttgaagagcctgagaaagaagcaacttgctactcgagaggccatggcccgccagaccgtagtctcagacacagagctgagtattgttgaatcatctgtgatcagcttgctgcaggaggcagaaagtaaatctgaacttagtcagaacatctctgcccgggaacattttgtatttaccgatattgatggccaagtgtatcatctcactgttgaaggaaactcagtaaaagacagtgctcggattccaccagatggaagtatgggtagtattacctgcatcgcttggaaaggtgatacattagtgcttggagatatggatggaaatttaaatttctgggacttgaaaggcagagtatccagaggaatacccacacaccgaagttgggtgaggaagattcgttttgctcctggtaaaggaaatcaaaaattaatagcaatgtacaatgatggagctgaagtgtgggatactaaagaggttcagatggtgagcagtttaagaagtggcagaaatgtgacctttcgtatattggatgtggactggtgtacgtcagataaagtgatcttggcctcagatgatgggtgcatcagagtcctagagatgtctatgaagtctgcgtgctttagaatggatgaacaagagttaaccgagcctgtgtggtgcccctatctccttgttccaagggcctctcttgccttgaaagccttcttattacaccagccttggaatggacagtattctttggacatttctcatgttgactatccagaaaatgaagaaataaagaatctcctccaagaacagttgaattcattgtctaatgacataaagaaactgttgcttgatccagaattcactctcttgcagaggtgcctgcttgtttcaaggctctatggtgatgaatcggagctgcacttctggactgtcgctgcccactacctgcacagcttatcccaggaaaagtcagccagcacaacagctcctaaagaagctgctcctcgagacaaactgagcaacccactggatatatgctatgacgtgctctgtgaaaatgcctactttcagaaatttcagctagaaagggttaatctacaggaagtgaaacggtcaacttatgatcatacaaggaaatgtacagaccagctactgctcttgggtcaaacagacagagctgtgcagttgctgttggaaacaagtgcagataaccagcattattactgtgattcactgaaagcctgtttagtcactactgtcacctcgtcaggcccctctcagagcaccattaagttggtggcaacgaatatgattgccaatggcaaattggcagagggcgttcagttgctctgcctgatagataaggctgcagacgcctgccgctacctgcagacatacggcgagtggaatcgggctgcatggctggcaaaagtccgtttgaatcctgaggagtgtgccgatgttttaaggcggtgggttgaccacctttgttctccacaagtcaatcagaaatcaaaggctctcctggttctcctctctctgggctgcttttttagcgtggcagagacgcttcacaggtaaaccgagagttcacatgggctgctcaggcctgcccgtgagcagtcacttcatgttctctcgcggttctagcaggtcatggtactcgatgtgtaaagtgaaaggagaagtatacatttcaggtttgtcaaaaaacccaaaggagaatggaactgtccgtattcattacatcttcattcggtctaggagctatgctagtttcctactaatatgctgatcagacntaacaggcacctagtaaaagggaatttaaaagtcttcagagaattggggtccattcagctttgactagagcaactgagaggaggcccagagagcagggggagaggcgacagaaggcatggtgaggtggagacatcccgtctgaaaatctggaagaggaacaaccatcactaattgtggagcatttcatttattcaaaactaagggaggtagattacggaaatatgacaaaagattacttgtcaactctggacaggggtacatgggcacttgtcatatctctgtagatttttgtgtatttaaactatttcacaattttttaaagtattaattttaaaaagcttgtgtttggagatgtgagtattcttccctccttttttcaacaaactagggcttagaaaagtgcttgtatcttaatgcagtatgcaggtttccagggaaaatgtgtaaatgtctttatacccttcgatgctgctgcccaccagtgatgtaaatcacaaagcataactcttgttttgttctgttgagcagcatgagatactttgatagagcagccttatttgtggaagcttgcctcaagtatggagcatttgaagtcactgaggacacagagaaactcatcactgctatatatgcagattatgcccggagtttgaagaacctcggttttaagcagggagcagttctctttgcttcaaaagccggagcagctggcaaagacttattgaatgagcttgagtcccccaaggaagaacccattgaagagtgacagcttaataaatgccagggaatctgacctggaaggcagatgggagggggctggtctggctgtggccaccgtcacagtccaggatgaagaggagtacagggtcctgtgagctgtttgaccactgttctaagactatgtgtgcccaaaagcacataagcatctatgttgagagtaagtttgtatcctgcgttggtctcagaaagaacgtgaatgcttaagattttgaaagtacataatattttatactttgggagagagctttaagagtccctggaaatactttttaatttttttaacttaaaattcaagagactgaatcacttttctcattgattaaatgtaaagattattgagaaacctatagtaaatgaaatttgtgagatgttttctcaaatatatgctgtgcctgtacttatatacagtctttcaagagagatacaaacaaggcagaaacatttaaactagtattaaaggtagtttaccaaagcattttttgttttcttaccttgaaaacacagaaccgttaattccttggtttaagcagttgctaagttttgtaattttaggctcagaggaccataggaggttttaagatttatgtttagtccgataggtgaggtctttgatattttgaattttaactccttttatgatacatcacagtaacctcatttttgaagtctttctttgtactttaatgttctctctgttctaatagttgaagtatgagatgtaactattataaactgttgctgaaaacataaatgtctgtaacttacaaacatgataaataaattaaaaattcca

SEQ ID NO: 339448 - DNA, 2745 bp, Homo sapiens
agggatccggcttgttgacctcagctccctacgcagcagcagatctatagatccacgacttgtacccttcttagagagatgtccaaaaacttccctacaataactgctttggagtggtcaccatctcacaacttgaagagcctgagaaagaagcaacttgctactcgagaggccatggcccgccagaccgtagtctcagacacagagctgagtattgttgaatcatctgtgatcagcttgctgcaggaggcagaaagtaaatctgaacttagtcagaacatctctgcccgggaacattttgtatttaccgatattgatggccaagtgtatcatctcactgttgaaggaaactcagtaaaagacagtgctcggattccaccagatggaagtatgggtagtattacctgcatcgcttggaaaggtgatacattagtgcttggagatatggatggaaatttaaatttctgggacttgaaaggcagagtatccagaggaatacccacacaccgaagttgggtgaggaagattcgttttgctcctggtaaaggaaatcaaaaattaatagcaatgtacaatgatggagctgaagtgtgggatactaaagaggttcagatggtgagcagtttaagaagtggcagaaatgtgacctttcgtatattggatgtggactggtgtacgtcagataaagtgatcttggcctcagatgatgggtgcatcagagtcctagagatgtctatgaagtctgcgtgctttagaatggatgaacaagagttaaccgagcctgtgtggtgcccctatctccttgttccaagggcctctcttgccttgaaagccttcttattacaccagccttggaatggacagtattctttggacatttctcatgttgactatccagaaaatgaagaaataaagaatctcctccaagaacagttgaattcattgtctaatgacataaagaaactgttgcttgatccagaattcactctcttgcagaggtgcctgcttgtttcaaggctctatggtgatgaatcggagctgcacttctggactgtcgctgcccactacctgcacagcttatcccaggaaaagtcagccagcacaacagctcctaaagaagctgctcctcgagacaaactgagcaacccactggatatatgctatgacgtgctctgtgaaaatgcctactttcagaaatttcagctagaaagggttaatctacaggaagtgaaacggtcaacttatgatcatacaaggaaatgtacagaccagctactgctcttgggtcaaacagacagagctgtgcagttgctgttggaaacaagtgcagataaccagcattattactgtgattcactgaaagcctgtttagtcactactgtcacctcgtcaggcccctctcagagcaccattaagttggtggcaacgaatatgattgccaatggcaaattggcagagggcgttcagttgctctgcctgatagataaggctgcagacgcctgccgctacctgcagacatacggcgagtggaatcgggctgcatggctggcaaaagtccgtttgaatcctgaggagtgtgccgatgttttaaggcggtgggttgaccacctttgttctccacaagtcaatcagaaatcaaaggctctcctggttctcctctctctgggctgcttttttagcgtggcagagacgcttcacagcatgagatactttgatagagcagccttatttgtggaagcttgcctcaagtatggagcatttgaagtcactgaggacacagagaaactcatcactgctatatatgcagattatgcccggagtttgaagaacctcggttttaagcagggagcagttctctttgcttcaaaagccggagcagctggcaaagacttattgaatgagcttgagtcccccaaggaagaacccattgaagagtgacagcttaataaatgccagggaatctgacctggaaggcagatgggagggggctggtctggctgtggccaccgtcacagtccaggatgaagaggagtacagggtcctgtgagctgtttgaccactgttctaagactatgtgtgcccaaaagcacataagcatctatgttgagagtaagtttgtatcctgcgttggtctcagaaagaacgtgaatgcttaagattttgaaagtacataatattttatactttgggagagagctttaagagtccctggaaatactttttaatttttttaacttaaaattcaagagactgaatcacttttctcattgattaaatgtaaagattattgagaaacctatagtaaatgaaatttgtgagatgttttctcaaatatatgctgtgcctgtacttatatacagtctttcaagagagatacaaacaaggcagaaacatttaaactagtattaaaggtagtttaccaaagcattttttgttttcttaccttgaaaacacagaaccgttaattccttggtttaagcagttgctaagttttgtaattttaggctcagaggaccataggaggttttaagatttatgtttagtccgataggtgaggtctttgatattttgaattttaactccttttatgatacatcacagtaacctcatttttgaagtctttctttgtactttaatgttctctctgttctaatagttgaagtatgagatgtaactattataaactgttgctgaaaacataaatgtctgtaacttacaaacatgataaataaattaaaaattcca

SEQ ID NO: 339449 - DNA, 4548 bp, Homo sapiens
cgcctaagcggcggaactctggagagtgcggaacctaggatcctaggaaactgaaggcaacggaacctgggggcgatggaatccgggagcggtggaacccggagcctgtagaacttgaatctagaggaacctgacagcggcgccgagggggccacccggactctgtttggaacggaagcacagtgtccgccgcttcctggttgcgggtcagcgcccaggtcctgggctggccgccgggatgttgccctacacagtgaacttcaaggtgtcggcgcgcaccctcacgggggccctcaacgcccacaacaaggcggcggtggactggggctggcaaggtttaattgcttatggatgtcattcacttgtggtagtgattgattccattactgcccaaactcttcaagttttagaaaagcataaagctgatgttgtaaaggttaaatgggccagggaaaactatcaccataacattggctcaccatattgcttacggttagcttctgctgatgtcaatgggaagatcatcgtctgggatgtagcagcaggagtagctcagtgtgagatccaagagcatgccaagcctatccaggatgttcagtggttgtggaatcaagatgcttcccgcgatttactgcttgctatccacccgccaaattacattgtgctctggaatgccgacactggcaccaaactatggaagaagagctatgcagataacattctttctttttcttttgacccttttgatccctcacatttaactttgcttaccagcgagggtattgttttcatctcagacttctccccatccaagcctccctcaggccctgggaaaaaagtttacatatccagcccacactctagcccagctcataacaagctggccacagccacaggtgccaagaaagctctaaataaagtaaaaattttaatcactcaagagaaacctagtgctgaattcataactctcaatgattgccttcagttggcatacctgccttcaaaaaggaatcacatgttgttgctctatcctcgagagattttaatccttgaccttgaggtgaatcagacggtgggtgtgattgcaatagaacgcacaggagttccatttttacaggtaataccctgctttcagcgtgatggtttattttgtctacatgaaaatggttgtataactttacgtgttcgaagatcttataataacatttttaccacttcaaatgaggaaccagatccagatccagttcaggagcttacctatgatttacgaagccagtgtgatgcaatcagggtgacaaaaaccgtccgtcccttcagtatggtgtgctgtcctgtcaatgagaatgcagccgccctcgtagtgagtgatggcagggtcatgatatgggaactcaagtctgcagtttgtaatcgaaattcacggaacagtagttctggtgtgtcacctttatattcaccagtgtctttctgtggaattcctgtaggagtgctacagaataaactcccagacctttccttagataacatgattgggcaaagtgcaattgctggggaagaacatcccagaggttcaattctgcgggaagtgcacctcaagttcctgctgacgggactgctttcaggactgcccgcaccacagtttgctattcgtatgtgtccaccgttgaccacaaaaaacatcaagatgtatcagccactgctggctgttggtacaagtaatggttctgtcctggtgtaccatctcaccagtggtctgctacacaaagagttaagcatccactcatgtgaagtcaagggtattgaatggacaagtttgactagttttctttcttttgctacctcaacaccaaacaatatgggattagtgagaaatgaacttcaactggttgatcttccaacaggtaggagcattgcttttcgtggtgaaagaggcaatgatgaatctgccatcgaaatgattaaagtatctcatttgaagcagtatttggcagtcgtattcagagataaacccctggagctatgggatgttaggacttgtacccttcttagagagatgtccaaaaacttccctacaataactgctttggagtggtcaccatctcacaacttgaagagcctgagaaagaagcaacttgctactcgagaggccatggcccgccagaccgtagtctcagacacagagctgagtattgttgaatcatctgtgatcagcttgctgcaggaggcagaaagtaaatctgaacttagtcagaacatctctgcccgggaacattttgtatttaccgatattgatggccaagtgtatcatctcactgttgaaggaaactcagtaaaagacagtgctcggattccaccagatggaagtatgggtagtattacctgcatcgcttggaaaggtgatacattagtgcttggagatatggatggaaatttaaatttctgggacttgaaaggcagagtatccagaggaatacccacacaccgaagttgggtgaggaagattcgttttgctcctggtaaaggaaatcaaaaattaatagcaatgtacaatgatggagctgaagtgtgggatactaaagagagcctgtgtggtgcccctatctccttgttccaagggcctctcttgccttgaaagccttcttattacaccagccttggaatggacagtattctttggacatttctcatgttgactatccagaaaatgaagaaataaagaatctcctccaagaacagttgaattcattgtctaatgacataaagaaactgttgcttgatccagaattcactctcttgcagaggtgcctgcttgtttcaaggctctatggtgatgaatcggagctgcacttctggactgtcgctgcccactacctgcacagcttatcccaggaaaagtcagccagcacaacagctcctaaagaagctgctcctcgagacaaactgagcaacccactggatatatgctatgacgtgctctgtgaaaatgcctactttcagaaatttcagctagaaagggttaatctacaggaagtgaaacggtcaacttatgatcatacaaggaaatgtacagaccagctactgctcttgggtcaaacagacagagctgtgcagttgctgttggaaacaagtgcagataaccagcattattactgtgattcactgaaagcctgtttagtcactactgtcacctcgtcaggcccctctcagagcaccattaagttggtggcaacgaatatgattgccaatggcaaattggcagagggcgttcagttgctctgcctgatagataaggctgcagacgcctgccgctacctgcagacatacggcgagtggaatcgggctgcatggctggcaaaagtccgtttgaatcctgaggagtgtgccgatgttttaaggcggtgggttgaccacctttgttctccacaagtcaatcagaaatcaaaggctctcctggttctcctctctctgggctgcttttttagcgtggcagagacgcttcacagcatgagatactttgatagagcagccttatttgtggaagcttgcctcaagtatggagcatttgaagtcactgaggacacagagaaactcatcactgctatatatgcagattatgcccggagtttgaagaacctcggttttaagcagggagcagttctctttgcttcaaaagccggagcagctggcaaagacttattgaatgagcttgagtcccccaaggaagaacccattgaagagtgacagcttaataaatgccagggaatctgacctggaaggcagatgggagggggctggtctggctgtggccaccgtcacagtccaggatgaagaggagtacagggtcctgtgagctgtttgaccactgttctaagactatgtgtgcccaaaagcacataagcatctatgttgagagtaagtttgtatcctgcgttggtctcagaaagaacgtgaatgcttaagattttgaaagtacataatattttatactttgggagagagctttaagagtccctggaaatactttttaatttttttaacttaaaattcaagagactgaatcacttttctcattgattaaatgtaaagattattgagaaacctatagtaaatgaaatttgtgagatgttttctcaaatatatgctgtgcctgtacttatatacagtctttcaagagagatacaaacaaggcagaaacatttaaactagtattaaaggtagtttaccaaagcattttttgttttcttaccttgaaaacacagaaccgttaattccttggtttaagcagttgctaagttttgtaattttaggctcagaggaccataggaggttttaagatttatgtttagtccgataggtgaggtctttgatattttgaattttaactccttttatgatacatcacagtaacctcatttttgaagtctttctttgtactttaatgttctctctgttctaatagttgaagtatgagatgtaactattataaactgttgctgaaaacataaatgtctgtaacttacaaacatgataaataaattaaaaattcca

SEQ ID NO: 339450 - DNA, 1665 bp, Homo sapiens
cacgaggtttgtctcgaggagcagcttctttaggagctgttgtgctggctgacttttcctgggataagctgtgcaggtagtgggcagcgacagtccagaagtgcctactttcagaaatttcagctagaaagggttaatctacaggaagtgaaacggtcaacttatgatcatacaaggaaatgtacagaccagctactgctcttgggtcaaacagacagagctgtgcagttgctgttggaaacaagtgcagataaccagcattattactgtgattcactgaaagcctgtttagtcactactgtcacctcgtcaggcccctctcagagcaccattaagttggtggcaacgaatatgattgccaatggcaaattggcagagggcgttcagttgctctgcctgatagataaggctgcagacgcctgccgctacctgcagacatacggcgagtggaatcgggctgcatggctggcaaaagtccgtttgaatcctgaggagtgtgccgatgttttaaggcggtgggttgaccacctttgttctccacaagtcaatcagaaatcaaaggctctcctggttctcctctctctgggctgcttttttagcgtggcagagacgcttcacagcatgagatactttgatagagcagccttatttgtggaagcttgcctcaagtatggagcatttgaagtcactgaggacacagagaaactcatcactgctatatatgcagattatgcccggagtttgaagaacctcggttttaagcagggagcagttctctttgcttcaaaagccggagcagctggcaaagacttattgaatgagcttgagtcccccaaggaagaacccattgaagagtgacagcttaataaatgccagggaatctgacctggaaggcagatgggagggggctggtctggctgtggccaccgtcacagtccaggatgaagaggagtacagggtcctgtgagctgtttgaccactgttctaagactatgtgtgcccaaaagcacataagcatctatgttgagagtaagtttgtatcctgcgttggtctcagaaagaacgtgaatgcttaagattttgaaagtacataatattttatactttgggagagagctttaagagtccctggaaatactttttaatttttttaacttaaaattcaagagactgaatcacttttctcattgattaaatgtaaagattattgagaaacctatagtaaatgaaatttgtgagatgttttctcaaatatatgctgtgcctgtacttatatacagtctttcaagagagatacaaacaaggcagaaacatttaaactagtattaaaggtagtttaccaaagcattttttgttttcttaccttgaaaacacagaaccgttaattccttggtttaagcagttgctaagttttgtaattttaggctcagaggaccataggaggttttaagatttatgtttagtccgataggtgaggtctttgatattttgaattttaactccttttatgatacatcacagtaacctcatttttgaagtctttctttgtactttaatgttctctctgttctaatagttgaagtatgagatgtaactattataaactgttgctgaaaacataaatgtctgtaacttacaaacatgataaataaattaaaaattcca

SEQ ID NO: 339451 - DNA, 4702 bp, Homo sapiens
cgcctaagcggcggaactctggagagtgcggaacctaggatcctaggaaactgaaggcaacggaacctgggggcgatggaatccgggagcggtggaacccggagcctgtagaacttgaatctagaggaacctgacagcggcgccgagggggccacccggactctgtttggaacggaagcacagtgtccgccgcttcctggttgcgggtcagcgcccaggtcctgggctggccgccgggatgttgccctacacagtgaacttcaaggtgtcggcgcgcaccctcacgggggccctcaacgcccacaacaaggcggcggtggactggggctggcaaggtttaattgcttatggatgtcattcacttgtggtagtgattgattccattactgcccaaactcttcaagttttagaaaagcataaagctgatgttgtaaaggttaaatgggccagggaaaactatcaccataacattggctcaccatattgcttacggttagcttctgctgatgtcaatgggaagatcatcgtctgggatgtagcagcaggagtagctcagtgtgagatccaagagcatgccaagcctatccaggatgttcagtggttgtggaatcaagatgcttcccgcgatttactgcttgctatccacccgccaaattacattgtgctctggaatgccgacactggcaccaaactatggaagaagagctatgcagataacattctttctttttcttttgacccttttgatccctcacatttaactttgcttaccagcgagggtattgttttcatctcagacttctccccatccaagcctccctcaggccctgggaaaaaagtttacatatccagcccacactctagcccagctcataacaagctggccacagccacaggtgccaagaaagctctaaataaagtaaaaattttaatcactcaagagaaacctagtgctgaattcataactctcaatgattgccttcagttggcatacctgccttcaaaaaggaatcacatgttgttgctctatcctcgagagattttaatccttgaccttgaggtgaatcagacggtgggtgtgattgcaatagaacgcacaggagttccatttttacaggtaataccctgctttcagcgtgatggtttattttgtctacatgaaaatggttgtataactttacgtgttcgaagatcttataataacatttttaccacttcaaatgaggaaccagatccagatccagttcaggagcttacctatgatttacgaagccagtgtgatgcaatcagggtgacaaaaaccgtccgtcccttcagtatggtgtgctgtcctgtcaatgagaatgcagccgccctcgtagtgagtgatggcagggtcatgatatgggaactcaagtctgcagtttgtaatcgaaattcacggaacagtagttctggtgtgtcacctttatattcaccagtgtctttctgtggaattcctgtaggagtgctacagaataaactcccagacctttccttagataacatgattgggcaaagtgcaattgctggggaagaacatcccagaggttcaattctgcgggaagtgcacctcaagttcctgctgacgggactgctttcaggactgcccgcaccacagtttgctattcgtatgtgtccaccgttgaccacaaaaaacatcaagatgtatcagccactgctggctgttggtacaagtaatggttctgtcctggtgtaccatctcaccagtggtctgctacacaaagagttaagcatccactcatgtgaagtcaagggtattgaatggacaagtttgactagttttctttcttttgctacctcaacaccaaacaatatgggattagtgagaaatgaacttcaactggttgatcttccaacaggtaggagcattgcttttcgtggtgaaagaggcaatgatgaatctgccatcgaaatgattaaagtatctcatttgaagcagtatttggcagtcgtattcagagataaacccctggagctatgggatgttaggacttgtacccttcttagagagatgtccaaaaacttccctacaataactgctttggagtggtcaccatctcacaacttgaagagcctgagaaagaagcaacttgctactcgagaggccatggcccgccagaccgtagtctcagacacagagctgagtattgttgaatcatctgtgatcagcttgctgcaggaggcagaaagtaaatctgaacttagtcagaacatctctgcccgggaacattttgtatttaccgatattgatggccaagtgtatcatctcactgttgaaggaaactcagtaaaagacagtgctcggattccaccagatggaagtatgggtagtattacctgcatcgcttggaaaggtgatacattagtgcttggagatatggatggaaatttaaatttctgggacttgaaaggcagagtatccagaggaatacccacacaccgaagttgggtgaggaagattcgttttgctcctggtaaaggaaatcaaaaattaatagcaatgtacaatgatggagctgaagtgtgggatactaaagaggttcagatggtgagcagtttaagaagtggcagaaatgtgacctttcgtatattggatgtggactggtgtacgtcagataaagtgatcttggcctcagatgatgggtgcatcagagtcctagagatgtctatgaagtctgcgtgctttagaatggatgaacaagagttaaccgagcctgtgtggtgcccctatctccttgttccaagggcctctcttgccttgaaagccttcttattacaccagccttggaatggacagtattctttggacatttctcatgttgactatccagaaaatgaagaaataaagaatctcctccaagaacagttgaattcattgtctaatgacataaagaaactgttgcttgatccagaattcactctcttgcagaggtgcctgcttgtttcaaggctctatggtgatgaatcggagctgcacttctggactgtcgctgcccactacctgcacagcttatcccaggaaaagtcagccagcacaacagctcctaaagaagctgctcctcgagacaaactgagcaacccactggatatatgctatgacgtgctctgtgaaaatgcctactttcagaaatttcagctagaaagggttaatctacaggaagtgaaacggtcaacttatgatcatacaaggaaatgtacagaccagctactgctcttgggtcaaacagacagagctgtgcagttgctgttggaaacaagtgcagataaccagcattattactgtgattcactgaaagcctgtttagtcactactgtcacctcgtcaggcccctctcagagcaccattaagttggtggcaacgaatatgattgccaatggcaaattggcagagggcgttcagttgctctgcctgatagataaggctgcagacgcctgccgctacctgcagacatacggcgagtggaatcgggctgcatggctggcaaaagtccgtttgaatcctgaggagtgtgccgatgttttaaggcggtgggttgaccacctttgttctccacaagtcaatcagaaatcaaaggctctcctggttctcctctctctgggctgcttttttagcgtggcagagacgcttcacagcatgagatactttgatagagcagccttatttgtggaagcttgcctcaagtatggagcatttgaagtcactgaggacacagagaaactcatcactgctatatatgcagattatgcccggagtttgaagaacctcggttttaagcagggagcagttctctttgcttcaaaagccggagcagctggcaaagacttattgaatgagcttgagtcccccaaggaagaacccattgaagagtgacagcttaataaatgccagggaatctgacctggaaggcagatgggagggggctggtctggctgtggccaccgtcacagtccaggatgaagaggagtacagggtcctgtgagctgtttgaccactgttctaagactatgtgtgcccaaaagcacataagcatctatgttgagagtaagtttgtatcctgcgttggtctcagaaagaacgtgaatgcttaagattttgaaagtacataatattttatactttgggagagagctttaagagtccctggaaatactttttaatttttttaacttaaaattcaagagactgaatcacttttctcattgattaaatgtaaagattattgagaaacctatagtaaatgaaatttgtgagatgttttctcaaatatatgctgtgcctgtacttatatacagtctttcaagagagatacaaacaaggcagaaacatttaaactagtattaaaggtagtttaccaaagcattttttgttttcttaccttgaaaacacagaaccgttaattccttggtttaagcagttgctaagttttgtaattttaggctcagaggaccataggaggttttaagatttatgtttagtccgataggtgaggtctttgatattttgaattttaactccttttatgatacatcacagtaacctcatttttgaagtctttctttgtactttaatgttctctctgttctaatagttgaagtatgagatgtaactcagctccagttacaacagctccagttacaacagcttttttaacttctgcat

SEQ ID NO: 339452 - DNA, 2941 bp, Homo sapiens
cgcctaagcggcggaactctggagagtgcggaacctaggatcctaggaaactgaaggcaacggaacctgggggcgatggaatccgggagcggtggaacccggagcctgtagaacttgaatctagaggaacctgacagcggcgccgagggggccacccggactctgtttggaacggaagcacagtgtccgccgcttcctggttgcgggtcagcgcccaggtcctgggctggccgccgggatgttgccctacacagtgaacttcaaggtgtcggcgcgcaccctcacgggggccctcaacgcccacaacaaggcggcggtggactggggctggcaaggtttaattgcttatggatgtcattcacttgtggtagtgattgattccattactgcccaaactcttcaagttttagaaaagcataaagctgatgttgtaaaggttaaatgggccagggaaaactatcaccataacattggctcaccatattgcttacggttagcttctgctgatgtcaatgggaagatcatcgtctgggatgtagcagcaggagtagctcagtgtgagatccaagagcatgccaagcctatccaggatgttcagtggttgtggaatcaagatgcttcccgcgatttactgcttgctatccacccgccaaattacattgtgctctggaatgccgacactggcaccaaactatggaagaagagctatgcagataacattctttctttttcttttgacccttttgatccctcacatttaactttgcttaccagcgagggtattgttttcatctcagacttctccccatccaagcctccctcaggccctgggaaaaaagtttacatatccagcccacactctagcccagctcataacaagctggccacagccacaggtgccaagaaagctctaaataaagtaaaaattttaatcactcaagagaaacctagtgctgaattcataactctcaatgattgccttcagttggcatacctgccttcaaaaaggaatcacatgttgttgctctatcctcgagagattttaatccttgaccttgaggtgaatcagacggtgggtgtgattgcaatagaacgcacaggagttccatttttacaggtaataccctgctttcagcgtgatggtttattttgtctacatgaaaatggttgtataactttacgtgttcgaagatcttataataacatttttaccacttcaaatgaggaaccagatccagatccagttcaggagcttacctatgatttacgaagccagtgtgatgcaatcagggtgacaaaaaccgtccgtcccttcagtatggtgtgctgtcctgtcaatgagaatgcagccgccctcgtagtgagtgatggcagggtcatgatatgggaactcaagtctgcagtttgtaatcgaaattcacggaacagtagttctggtgtgtcacctttatattcaccagtgtctttctgtggaattcctgtaggagtgctacagaataaactcccagacctttccttagataacatgattgggcaaagtgcaattgctggggaagaacatcccagaggttcaattctgcgggaagtgcacctcaagttcctgctgacgggactgctttcaggactgcccgcaccacagtttgctattcgtatgtgtccaccgttgaccacaaaaaacatcaagatgtatcagccactgctggctgttggtacaagtaatggttctgtcctggtgtaccatctcaccagtggtctgctacacaaagagttaagcatccactcatgtgaagtcaagggtattgaatggacaagtttgactagttttctttcttttgctacctcaacaccaaacaatatgggattagtgagaaatgaacttcaactggttgatcttccaacaggtttgtttttaaagatccaaataggtttgtcatattgaataaacatgttgccatttataaaacatgtttgaaagtacttctttcaccttggaatttttttttatatttcatgcttatatatttattcttttattctctaataattgccctagaaaggcctcatcattgtttacatggaaatgttgttggcacaaatacatggtaaaatggaggaccattagcctgaacagacagattcattaaaaaataggataccggttctacttttaagtgcattgttatatgtaaccaactttaaaagatcgatttaaaaataactctgtcaatggactttattagagtctgtgctggaaattttggcttttataggaaacacttagaaaatttataggttaaggattgtttttaaatgctcaaatttaaaacttgtaatagtctctggctgaatgaatagagaaacttaatttgggattttgaagattctacagtaggaaacgtcccaataaggtaactttttcagaattgaaagcctaaacccagtgaatttcaaaataaagaatttgaaaatataataaggaaagagtttcaaattattttctggtgtatgcagtagtttcaaagaggtttttttaaaaataaaattgtgatgagtttctttaaaatggtatagcaacacgaatcatatgtagatgatcttaaccaatgagagcatgtgtatgtatgtgtaaaatgaattaaatcaaataaatggttgtaaatcaagtaagttgtaaataaatgaagtacatggttgcttttttatgttctccatatgtattttcaagctctcaaagatccagttgttcttacttctcagggtatgttgctgaacttccaggaatcattcccgtctttagtccagtgttgctgctctagtctcattggaagtgacctgtccactgactctcatccccaagttcctaatttgccagcagaatggtactggccctgtgtctagtgatcccagggataaaatgctgttgtctagtatcattgactta

SEQ ID NO: 339453 - DNA, 378 bp, Homo sapiens
tcagcgcccaggtcctgggctggccgccgggatgttgccctacacagtgaacttcaaggtgtcggcgcgcaccctcacgggggccctcaacgcccacaacaaggcggcggtggactggtgaggacgccgagcttccaggtcgccaggatcggccaggaatgtgtgagggggaagggggaaggacaagaggtttcaccccctggttagtttggcctcgctaaggcagggagccgccctcacgcaatgagcttgctttcagttggtggatttttgttgttacaaaagtgataatagccccgtgtgggaaattcccccatgcaaatacatttcccctctttctcgcgtatttctctgctgttttctctgcacctcgccctt

SEQ ID NO: 339454 - DNA, 259 bp, Homo sapiens
acttgtctctcttgctcttatcatacactgaaggtattccatacatactccactgctccccagccccaaggctgcaggtgaatgtcaactcggaaggactcttgttgcagcagaggccttcaaggcaggtgttttttttttttttggaaggcctttttggagacagagtcttgctctatcatccagcctggagtgcagtggcgcaatctcggctctcagctcactgcaacctctgcctcctgggttcaagtgattctcc

SEQ ID NO: 339455 - DNA, 417 bp, Homo sapiens
ggcagtaagtccactggcagctaatatgtacgggtccgacccctacgttataattattgtatatgagtgtagagatgatgattcttcttctctgaatagctgtattgaagcagtcaccatttgacttggtggtatggttaaataatcttaattgtgcacaggggtaagcaacaactgctcaaaattttttttttcttttgagacagttttgctcttgtcacctaggctggagtgcagtggcgtgatctcggctcactgcaacctccacctcctgggttcaagcgattctcctgcctcagcctcccaagtagctgggattacaggcatctgccaccacacacagctaatttttgtagttttagtagagatgcggtttcaccatattggccaggctggtcttgaactcctgacctcagg

SEQ ID NO: 339456 - DNA, 1008 bp, Homo sapiens
tggccgggttaatactatttgcattctacacttcagtatcaagtttacataatattgctaaatttccgtgtttgctcagaagcagtttacagtactaaaaccaaccagccatataacataactacataacaataaacacaatcttttctctcatgttctttccccctatttgaactcctgtttttctccttttgatatcttccaagaaaaataacttttaaattcctctatcatcacagtgctatagagaaacaaaaccaattttttcccaactgatgctgtcatctaagatcagctgtcttacttgcccattcttattacacaagcaaatttagaagtcctataagtacctacattattaccttttgctaaaaaatgcatctctgttcttctttactgtctcagcaaacagcctcaccattcgtggcagatactcatagctgccctctaaaaatctgttactcctcccttctatggcagctgtccagctctgctacatttcccatcctcactgcagttaggtgtggccacatgaccaagtgctctccagtggaacataagcacgtgtgataagtgccatttctaggcctggctcattactctcctccctcctcttttctcacctctggcaccagcattggaaggcatgtgtagaagatgacagatcttccagtcttcttctctgaatagctgtattgaagcagtcaccatttgacttggtggtatggttaaataatcttaattgtgcacaggggtaagcaacaactgctcaaaattttttttttcttttgagacagttttgctcttgtcacctaggctggagtgcagtggcgtgatctcggctcactgcaacctccacctcctgggttcaagcgattctcctgcctcagcctcccaagtagctgggattacaggcatctgccaccacacacagctaatttttgtagttttagtagagatgcggtttcaccatattggccaggctggtcttgaactcctgacctcagg

SEQ ID NO: 339457 - DNA, 975 bp, Homo sapiens
ttttatttgctttgtagcactcagctattttaaattcctcaccctacatatgcattgcctaacttattaatactttcatataacataactacataacaataaacacaatcttttctctcatgttctttccccctatttgaactcctgtttttctccttttgatatcttccaagaaaaataacttttaaattcctctatcatcacagtgctatagagaaacaaaaccaattttttcccaactgatgctgtcatctaagatcagctgtcttacttgcccattcttattacacaagcaaatttagaagtcctataagtacctacattattaccttttgctaaaaaatgcatctctgttcttctttactgtctcagcaaacagcctcaccattcgtggcagatactcatagctgccctctaaaaatctgttactcctcccttctatggcagctgtccagctctgctacatttcccatcctcactgcagttaggtgtggccacatgaccaagtgctctccagtggaacataagcacgtgtgataagtgccatttctaggcctggctcattactctcctccctcctcttttctcacctctggcaccagcattggaaggcatgtgtagaagatgacagatcttccagtcttcttctctgaatagctgtattgaagcagtcaccatttgacttggtggtatggttaaataatcttaattgtgcacaggggtaagcaacaactgctcaaaattttttttttcttttgagacagttttgctcttgtcacctaggctggagtgcagtggcgtgatctcggctcactgcaacctccacctcctgggttcaagcgattctcctgcctcagcctcccaagtagctgggattacaggcatctgccaccacacacagctaatttttgtagttttagtagagatgcggtttcaccatattggccaggctggtcttgaactcctgacctcagg

SEQ ID NO: 339458 - DNA, 160 bp, Homo sapiens
cccccaaaaaaaattagctgagtctatcagatttcttctcttgggagttgagaccagaaaaaaataccatcagggtatttagctctgagaacttaaggtgaaatgagactatgagagcaagtctgagctgtgaagtaatgaggcagcagtggctatgagg

SEQ ID NO: 339459 - DNA, 1317 bp, Homo sapiens
cttgccggttccagcaaaacttcatggagcatgggggtggcagatggggtgcctggtcccagccactcctctcccaacttcccactagccatgtgggcaagctcacattagcaatgagctcaggcctgctttgctcatttaaggaaaagcagtgatcccattatcccaggggtgattctttgccccagacgcagctccttttttctaacttccttcagccctgctggcttctcctcagcagtagctaatgtgggatgatgatcagcagcagttgagctatttttaagtcaacaaactaccaatgctaagagttcctcagaaagccaggaaattcggagcctcagaagcaaatgctaaacatgattgatgggcatggaagggaatgttttggactgctgttcacaaaaggaatcccttgaatttaatcctaaaaatggccaagctagaagagtccttagaaaccatctagtctgctttttccctccctagaaaatttctacagatgagaaagtaaagtggatgatggtttagggctgaggcacttagctgatctagaggtggaagccaactcttcctgattcctatgtgaatgctctttccacaaagatcagtagaatgtttctggatttctttgtttcaatgagcttcgattatcacactttatttttcttagcatgggctccataaaactaaattattgtacaaaatctaaataagttaattaaacaagcaccagacacagagtaacttaaatgacatcagggtgctaaatctcagtttatagtcagtggacagataactctgaaatatcagctggtggcatatccaaatcagtaaggaaggaccatttggtttttatgccacctgaacagtggcggcattccagctggtgagtcttcctggcctcttgatgcagtactccccttcagctgatgctttgctctctggggttaattcaatatccaggggcagggagccagacttggaaggtcctctccccacatctaactcctgcttcaacacccagctccaacgtcttctctgtgaagccttcctacatcttcccccattcctcagagtagcctaaatcctctcctaatgcccctctttataatacccctacagtcacactgtaaggttactgtgttaggcccccatcaggcctagggtgtgtgtgtgtgtgtgtgtgtgtgtgtgtgtgtgtgtgtgtgtgtgtgtgtcatgcctacagtgaatctctccagaaacaccaatgaacaggtttgactacaaggagactacaatgagaattttattgccaatataggagatttggga

SEQ ID NO: 339460 - DNA, 315 bp, Homo sapiens
cagtgatagtattgggaatagcttcagtgggtttctgatttttttttgaaagtctagacagacattaacaataatagaggcagtttcctctaggtagaggataatgctaatctaaagataatttctctttctctattctataaagatgaaaacacacatcaaaagatttcaacatgtgtgttagtcccagctgactcactctgtcttcactctctggacctgagttatcagaatattttaccacagtcctttcaaatgttgatgagttctcgagaagtttatttccaaatttgagtagtccttttatattccagc

SEQ ID NO: 339461 - DNA, 478 bp, Homo sapiens
ggggaaaattcgagctctttcaaagtgtgctggggttttttgctgaggatataatagtgcacaatatcaatatggtccttacaactacagaactatagaactaagattctagagggaatgacaggtggaaaaccaggaaacagacaaatgaataaacaactgctggctgtaatgagagccataaacgaagcactcaggactgagacaaaatcactattgaggggaacttgctttaagtagtggtcagccttagagcttgtttaaggagttgacattaagctgacacctaaaacctaaaggaagaaacagaggtagtgaaacaaagtctgagaaggtagcctggacagtttgcactaagccttgaggtgggatgtggcctgttggggaacctggcagaagaggttagttagcacagaggtagaaggggagtggtaattcgatttttactctaggctcaatggaaagccgttaaaggctt

SEQ ID NO: 339462 - DNA, 683 bp, Homo sapiens
gaaagtaacaccagccaagaactcactctcagcttttaactttccatgtatttacctcactctgtacccgttttactcatttatctcagaggaagtaatatttctctttcctacttgaagcagattccctcaagttcctaggtactttcaccatgttagccaggatggtctcgtgatccgcccgcctcggcctcccaaagtgctgagattacaggcgtgagccaccacgcccggccctggattgatctcttaatactaaaactgctggagaagaatcattacagccatctaggttattttcttctcagatttatggtcaacaaagataggatttcagggctaccaaagtatccttttatttgtccttagtcagctctgtcttccattctgcaaagcaaagattcttgttcaacttctatttcttttctcttaaatagaagatattgcttcattttctgcagggaaagtaacaccagccaagaactcactctcagcttttaactttccatgtatttacctcactctgtacccgttttactcatttatctcagaggaagtaatatttctctttcctacttgaagcagattccctcaagttcctaggtactttgacgtgtgtgtgttacctcttctgtattttcaactgcttccctctccactcactccttaccttcagcgctaac

SEQ ID NO: 339463 - DNA, 221 bp, Homo sapiens
gcagtggatcaatcacctacagggtccatttttaccacatctggccctaatgtgttcttgctctaaatctaatattgtttcctggcttttgtgactcaaattttctgttgctcacctgagttattctcctacctctactgactggtttccttgcattagctgcaattctctcaagattcagtctttaaacagctgtgcctctctaggctttccctcaggtc

SEQ ID NO: 339464 - DNA, 1504 bp, Homo sapiens
cgtgtcgcctctcgcctgctccacgggagcaagggctttctctcttattccactaggtcccagccaggcacgcagcagcccctcacacaagcatggcatgagtcagggaggaagggacagagggaatggccgtgtgaccttgggcagtaacttgggctggtttttcatgtacagaatgaggcgacgacccacttagattgctgaacacatcgagtggccatagccgtgagaagtgagagctgcccctgccctactgatggggagacaggtacaggtgacgggagcgttagccgagatgtccacccatccaccacacgcctatgggcacccttgtgccatgagggctcagcctgggccctggtggaagcaggtaccgggtcgatgctacctgcagcctcatcagagcctagctcttgggcagcgggcgtggttctggcctcttcacagccgaagtgcagacaggggctgtgggccaagctcctgaaatttccgccgacaagggcatctttcatgagtcttccttctgggccccctgttttgaaaccaaacaaggatgcagatttctgccaatcccgatgagctcggcatgagcacaggctctgttcccacgcggaggtgatgtcagccccgagcagagacaggcgcttggcattccacgagcctgggcggccgcgtcagggacagacacagtgtctgacagctggctttgagaaatactgacaccagttcacagactccattcctaccttcagggacccccagaaaggtgaaaggaccccaggttgtgtgaccagtcacctgatccagccccttcttgtcctggttctcccatcacagaggggccagggcagggcaggagtgggcctgagagcccatggctggtttccacatgcgccatgattaagctcctgcactcggcatttcagtaaagccatcttgtggtacagacagtgctgacatcagaaccttccgtggatccagcctcctacctccgggtacctgctgtgtgggagtcactcccctcccccagccctggatgctcctccagtcatcccagtagctcagggccagcccctgggatgtgtctaagaacatgagtggacaaatagatggactgcccagagcagggtttctgagacttcgctgcaggatatgtcatcgccctgcagaaaactacccccaccctaggaccccccgagttttggggtttgtaagaaattacatgtctcatttattttgaacaggtgaattttgcagtcaaattcttgtgttccattttagtacaaaaatagcattatcttttcaaaagtaacattttgaaattactcgtcaaataaattgatgcttcaggaagagctgtgtcaatcctgtaggtttatagatctgcgcttcacaggttaccccagcaggtccccggctgccgggcccaggtgatcctatatgaaactctcccctgctcagggccaggtgccttgctgggagcttgcaaagccttcactcccgc

SEQ ID NO: 339465 - DNA, 684 bp, Homo sapiens
ctggacttttcttcatgtgtcatgaagtttcctcctgattttcagagacccttccaggcctgcaagcgatttgacagccatccctcagtgccaactaaacctcctgggcagcctgaccccagggtaggaaggaagcgcctacaccaaggggccctctgggagctgagatcatcctggggttttgtcgcctggtctgacttgtgcactgggatcttctcgtgccaggccaggccccgccccctccccgggactgggcagaccccctccctcatgcatctgtgtccactgaggcttccctcacctagaatggcccatccttcaggacccagctcactctcatcttctttccagggacttatcccccaaggctgtcctctgttctggtgagctcagggctcttggaacttggtctgcagtgactctggggttcctggttaggacccatgttctctaggtcccagcaccctgcacggggcagtgtttgtgacactgggcccagctattctgagagaaggactccaaccttccatcaggtgtggcccgagatgtgggtggccctgggcatggggcatggatgcattgtgactttcatgggcctcttctgcaaaaaaaaaattaaaattatactttatgactattggtagaaagataaatatattaatacattaaaatttctctttgagt

SEQ ID NO: 339466 - DNA, 1884 bp, Homo sapiens
ctctggcccatggccagtggcagggttgtggtgccaactccactctgctgagagtgagcctagggtcttggtgtgtgagtggtgctgtggccacccggtgctcaggtcaccagggcggaggccttgccctcttgccagctagtttgctttactgggttttgctttggggaaggatcttctataaataccagtccatagagcacttcatcctgctttctgggacgtaagaactcatccctctaagaagagcctctgcaacagaaaccgaaacagtgcatctgcttaggaacaaagccactctctgtctggtgtggtcagagggtcccggatgtccccccctccactctgctgggcaggggctgtgcctgcggagcttccttccaggatctgtccttctcagcttccccagccgagccgccaggggtcctgaggaccaccatggcccctgaacactcctggagctttggtgtcagccctgccacccgagagagagagagagacatgccttggtgttacttactgcacttgagcctgtctcctggagggaaatgaagaatgaggcgacgacccacttagattgctgaacacatcgagtggccatagccgtgagaagtgagagctgcccctgccctactgatggggagacaggtacaggtgacgggagcgttagccgagatgtccacccatccaccacacgcctatgggcacccttgtgccatgagggctcagcctgggccctggtggaagcaggtaccgggtcgatgctacctgcagcctcatcagagcctagctcttgggcagcgggcgtggttctggcctcttcacagccgaagtgcagacaggggctgtgggccaagctcctgaaatttccgccgacaagggcatctttcatgagtcttccttctgggccccctgttttgaaaccaaacaaggatgcagatttctgccaatcccgatgagctcggcatgagcacaggctctgttcccacgcggaggtgatgtcagccccgagcagagacaggcgcttggcattccacgagcctgggcggccgcgtcagggacagacacagtgtctgacagctggctttgagaaatactgacaccagttcacagactccattcctaccttcagggacccccagaaaggtgaaaggaccccaggttgtgtgaccagtcacctgatccagccccttcttgtcctggttctcccatcacagaggggccagggcagggcaggagtgggcctgagagcccatggctggtttccacatgcgccatgattaagctcctgcactcggcatttcagtaaagccatcttgtggtacagacagtgctgacatcagaaccttccgtggatccagcctcctacctccgggtacctgctgtgtgggagtcactcccctcccccagccctggatgctcctccagtcatcccagtagctcagggccagcccctgggatgtgtctaagaacatgagtggacaaatagatggactgcccagagcagggtttctgagacttcgctgcaggatatgtcatcgccctgcagaaaactacccccaccctaggaccccccgagttttggggtttgtaagaaattacatgtctcatttattttgaacaggtgaattttgcagtcaaattcttgtgttccattttagtacaaaaatagcattatcttttcaaaagtaacattttgaaattactcgtcaaataaattgatgcttcaggaagagctgtgtcaatcctgtaggtttatagatctgcgcttcacaggttaccccagcaggtccccggctgccgggcccaggtgatcctatatgaaactctcccctgctcagggccaggtgccttgctgggagcttgcaaagccttcactcccgc

SEQ ID NO: 339467 - DNA, 1697 bp, Homo sapiens
ctctggcccatggccagtggcagggttgtggtgccaactccactctgctgagagtgagcctagggtcttggtgtgtgagtggtgctgtggccacccggtgctcaggtcaccagggcggaggccttgccctcttgccagctagtttgctttactgggttttgctttggggaaggatcttctataaataccagtccatagagcacttcatcctgctttctgggacgtaagaactcatccctctaagaagagcctctgcaacagaaaccgaaacagtgcatctgcttaggaacaaagccactctctgtctggtgtggtcagagggtcccggatgtccccccctccactctgctgggcaggggctgtgcctgcggagcttccttccaggatctgtccttctcagcttccccagccgagccgccaggggtcctgaggaccaccatggcccctgaacactcctggagctttggtgtcagccctgccacccgagagagagagagagacatggtgagtaactgaggcacagacaggttcaggcacagtcctggtcacaagtggccaccatgcaactctgggccccaggtctctcccagcacctgctctgccctaagcgtgtggggccgggcgctgcactgttgactttatgtcccctgtccccagccttggtgttacttactgcacttgagcctgtctcctggagggaaatgaaggtgagagggacactgtttcatctaagaggggaagctcgggaatgggtttgaggacttaaggggccaggagtcaaggtaaggaaagtgaatggcacagcgaggcgaagctgtgcagccctggtgggtcactgccaccgtccacgtccccaggtggcgtctgacacaaggtgggccaaagtggccctctccagcctgtctgcctcccatagcctccgtggggaaagcactgaggcaggatcagatggaaccagagaagcccatcccccacctcctgcccactcattccttaaagacatcagtctcggccgggcgcggtggctcaggcctgtaatcccagcactttcagaggccaaggcaggcagatcatgaggtcaggagatcgagaccatcctggctaacacggtgaaaccctgtctctactaaaaataaaaaaagttagccggatgtggtggtgggcacctgtagtcccagctactctggaggctgaggcaggagaatagcgtgaacctgggaggcggagcttgcagtgagccaagatagcaccactgcactccagagcctgggcgacagagcgagaccctgtctcaagaaaaaaaaaaaagacatcagtctctcccaaaacccagctaggttgctggcttgacggaggtcctggccctcagaaatcccgttgtcccaggacgggggcaggtggtctgagggcgccgcagcacccgtgagccatcctcactaggagttgtaccgtcctggtctggtcgtctcattctctcatgagctgggagctggcagcagagccaggagcggagctgcagagcaggctccccacgatgcccgtgtcgggatgttcctgccagtggcagtgggggcagccgggcctgtctggagcgactccaggctgctcagacatcaaagggaaaagcacccgattgtgttgtttgcggggctagttccttcttgtccctcaggtcttagcacagatgccccctctgg

SEQ ID NO: 339468 - DNA, 1143 bp, Homo sapiens
ctctggcccatggccagtggcagggttgtggtgccaactccactctgctgagagtgagcctagggtcttggtgtgtgagtggtgctgtggccacccggtgctcaggtcaccagggcggaggccttgccctcttgccagctagtttgctttactgggttttgctttggggaaggatcttctataaataccagtccatagagcacttcatcctgctttctgggacgtaagaactcatccctctaagaagagcctctgcaacagaaaccgaaacagtgcatctgcttaggaacaaagccactctctgtctggtgtggtcagagggtcccggatgtccccccctccactctgctgggcaggggctgtgcctgcggagcttccttccaggatctgtccttctcagcttccccagccgagccgccaggggtcctgaggaccaccatggcccctgaacactcctggagctttggtgtcagccctgccacccgagagagagagagagacatgagacccttccaggcctgcaagcgatttgacagccatccctcagtgccaactaaacctcctgggcagcctgaccccagggtaggaaggaagcgcctacaccaaggggccctctgggagctgagatcatcctggggttttgtcgcctggtctgacttgtgcactgggatcttctcgtgccaggccaggccccgccccctccccgggactgggcagaccccctccctcatgcatctgtgtccactgaggcttccctcacctagaatggcccatccttcaggacccagctcactctcatcttctttccagggacttatcccccaaggctgtcctctgttctggtgagctcagggctcttggaacttggtctgcagtgactctggggttcctggttaggacccatgttctctaggtcccagcaccctgcacggggcagtgtttgtgacactgggcccagctattctgagagaaggactccaaccttccatcaggtgtggcccgagatgtgggtggccctgggcatggggcatggatgcattgtgactttcatgggcctcttctgcaaaaaaaaaattaaaattatactttatgactattggtagaaagataaatatattaatacattaaaatttctctttgagt

SEQ ID NO: 339469 - DNA, 409 bp, Homo sapiens
gtaatagcagcccaagtagactcatacaatggtgaataccattctaagcactttagagacatcaactattctaatgtataactacgacgaagatattatcacctgtatattacaaacgagaagccaaaagcttagagaggccatatgccttaggggtgaaaagttgttcaagtaatacacaaaaaatatgagcaccagcagaaggagatcaggagttgcccagtgccaaggatgacagagattgaatgcaaaggggaacaaggaaagttttggggtggtggaaatattctgtatctcattttatatcttggtggtgtcacatgggtgtatatatttgtcaaaacttactgagctaggcagttaaaatggttatattttattgtatgtaatttatgacccaaagatgatt

SEQ ID NO: 339470 - DNA, 185 bp, Homo sapiens
ccttcaacaggtgtggtgtttacacaagcctctgaggagacaatcaggaatggaaagaagtcaggaatggaaagtccttcaaattccttgattctgagcaggtttcagctgttagctagcctttcccatggatgtttaaagctatctgtggccgggcgcgggggctcacacctgtaatcccagca

SEQ ID NO: 339471 - DNA, 334 bp, Homo sapiens
tagtattctgttttgtgatctggatgctgactactcagttgcgttcattctgtgaaagtccatcactctgtacaattataaattgtgcacttctctatatgttacacatcattaaaaagattatttttagaacatgtgaatagaaaaagatgaaactttagtctggaaagatgacaactccagggaatttatgagctcaaaatatataaaatcaggaaagttcactatctcttgtcatacattgtaccagtaggaaaataaaataataaaaagaaagacaaacagtgagagaaaacaataagataatacaaatcaatgtactctgcagggggag

SEQ ID NO: 339472 - DNA, 411 bp, Homo sapiens
ctcaagggaaaccgtgtagctgggtgttgtgataacagcaaggtaagggactggatggggttactttcttttttgatgccctttcctgaagtttccctctggcagaagcgtcacctttggctgacgtggaaataggaaattcaccctgtctccctcttctgttttcttcctaaggttcttgtctgtttagaataccattaagctgggcgtggtagctcacaccgtaatcctagcactttgggaggccaaggtgggaagatcgcatgagccaaggattttgagaccaacctagtgagatgccatctctgcaaataataataataataaaaactatccatggtggtgcatgcctgtggtcccagctacttgggaggttaaggtgggaggatcacttgagcccaagaggtcgag

SEQ ID NO: 339473 - DNA, 543 bp, Homo sapiens
ggtgtggtgggagagaaggctggatagatgatttgtggttatattttggagggtttttcacacacaagtgttcagactatattctcatggccaatggggaaccaaagcaggtgtttggtgtgagctgtgtttcgcaataatgttttgaaagatgtattagagaggcaggagtccaattacaaggatgtttcagaaattcaggtgagtgatgaagacatttggagaacagagtcagaggggattaaaaggagatagaagacagacaattcgaaactaggtgccaaagacaatgttcatgctattacttgagagagagaaaatacaggaggagaaggtatgggataaattggatattccagcaatggggtgggctaatgggtcttgtgaactcaaagattagtgcgagatctatccggcagttggaaattcagttctgaaagaaggaagctaacattttattgtgtacccactgtgtctcaggttttatgctaagcacctttgcaaattatttattgggagcagttttttttttttttttttttt

SEQ ID NO: 339474 - DNA, 189 bp, Homo sapiens
atataaaattacataagatgtacacacgcaccccccaaaaaccatatatttattaaagtacatccacaaggagactttaaaaaaaatacatctacaaccaaacatgtatttcttttttgttttgttttgttttttcaagacggaatctcgctctgtcgcccaggctgtagtgcagtggcacaatctcgg

SEQ ID NO: 339475 - DNA, 134 bp, Homo sapiens
ctgtttcttttcaattgtggagatcactttttgaaactgagtacaaaatgttaacatttatatcaattaaatttcattctgctttatacaattcaaaatggaatatacactggtggagctgggagggagaaaag

SEQ ID NO: 339476 - DNA, 360 bp, Homo sapiens
cttacttcctctacttagaaaggtttttgccttcttaatgactgccaaacattaccccttactcaaagccttctcagaatctccaggcacagcaaatccttccttcttttgcatttcagtaacaactgtatagacctctattagaacttcattatgacttttgtttacaaggtcagaagctgttaaattgagcacaaaatctgcagacaagccaacaagtaactggttaacttttgtttgccttgggtttagtttgctttactttttctatcgtctaaggtagaaagttaggtttttcagatcttcatttttagtgtaggtgtttacagctatacatttccctgtaagcactgctttaag

SEQ ID NO: 339477 - DNA, 183 bp, Homo sapiens
ccgagttttttctttctatcactgtttgattggaaataaacctaaattttaaaacagtcaaaagccacactatgatatttcttacatatagcttagcaaaaattgaaaagttcacggcactgttggagatgcagtggagaaagaggctctatcatacattactggtagatatacatctgttag

SEQ ID NO: 339478 - DNA, 476 bp, Homo sapiens
ccattgtggttgcaccatttacattcccaccaagagtgcacaagggttcttatttctccacattctcaccaacacttgtgatttactgtttcttttggtttttattttttattttttggataatagccatcctagtgagtataaggtgataactcattgtggttttgatttgcatttccctaatgattagtgacgttgagcatcttttcctgtgcgtgttggccacttgtatatcttctttggagaaatgtctattcaagtcatttgcccgttttttcactgagttatttgtgtttctttgttgttgagttgtagaaattctttatatattctggatattagcccctgatcaggtttatgatttgtgaatattttctcctgttccttaggttgccttttcactctgttgattatgttctttgatgaggctcctctcttttatcattctgaagttttgttggggcgagattgtattt

SEQ ID NO: 339479 - DNA, 701 bp, Homo sapiens
cctgggcgtgatggtaggcacctgtaatcccagatacttgggagcctgaggcaggagaatcacttgaacctgggagttggaggttgcagtgagccgagattgtgccattgcactccagcctggatgacaagagcaccactccgtttcaaaaataaataaaaaaataaaaataaaaatgttttccaggaggccaggtgtgaaggttcatacctgtaatcccagaactttgaaagccaaggtgggcagagcagtgagccaagattgcaccactgtacttcagcctgggtgacacagggaaactttgtctcaaaaaaaaaaaagtgtcgtgctatcactatgctttagaattgattgccacaatttgaataatattaatctaattctgattaaatacctttcaattaatatcttagagagttgtttagatttactgagcacaacctcattaatacatgtgaaaatgtgtctgaaattcattccttccggtgggttcttggtcttgctgactttcaagaatgaagccaccgaccctcccagtgagcgttacagttctgaaagatggtgcgtccacattttgatccttcagatgtgtccggagtttcttccttctggtgggttcgtggtcttgcggactgcaagagtaaagccgcagacctttgcagtgaatgttacagctcttaaaggtggtgcgtccagagttg

SEQ ID NO: 339480 - DNA, 518 bp, Homo sapiens
ttttcttatctgtcaattagggcagtttttccaaatggaaaaaaaaaattttagcacaatgtctggcacataataagcacttaataatgttagctaacaataataataataataatataatagcagcaaggaagtcacacaaccaaaagaagacggcactgtgtggtcagggccataccaaagtgcagacaaagttctctgagcgcttacagcagggtgtggtcacctcgggagaagtgtgtttgagccagcactgggagcccagaaaacatcttcactcagagatggtgcaggaggggcaacagacaagaagggctacagaggcctacgcagcagtaaaaggcttcccccccacccccacgagagcctctgtgcaggagggaaaggggacaaagataacagaacctttctctccagcttagcaagtggggtcaagggaagggcagggaaaaggagggagcgtcaggagaaaagacttctctgcgctctctgaagagcatgaagagggaggtgtgggt

SEQ ID NO: 339481 - DNA, 636 bp, Homo sapiens
attatttcccactgatagttttttaaaatgccaaatatcaatttctctaacctatatttctattttctcctgctcaaaattgttttaaaattagtttagattaagcatacaataaatattaaaaccaaaacaaattcaattttatgaatagactactcttcccttacatatcacgaccagctaagcaataaggcctacccgttatattttgtaaatataccttgaatctctgctttcctgtatctccacagcattcagtagttcagctcttcaatagctatttactgatatccttccctaatctatcccctatactactgttagagatactcctctacaatgtcaagtataactgtattaacttccctgtttaaaactctcaatagattcccatgacccacagaccaaactatttagaatggcatccaaaacccttcattgtttttctggacccacttacctctttgtatcttgtcactcccactatttacccattacactctagcaatattcaattctcttccatactcttattctttttacaatgagtgtattaatacataaagtatgcatatctttacatacatacttctggcctagaacgccttttcttgtacatcttcctgaagaacatga

SEQ ID NO: 339482 - DNA, 259 bp, Homo sapiens
tgcaggggctgtaataataataacaataataactaccagtgttagtgtatgccgactactctgtgctgagcactgtacgtggattcctttagggaagcctcacagcctccctgtaaagtggaatctgttgttagtcacatttcacagatgagagaactgaggctcagagaggagatgttacttacctaggtcatgtagttgttagggctctaagagctgggatttgaacctaggtctccccaacggtgaccggcgactt

SEQ ID NO: 339483 - DNA, 290 bp, Homo sapiens
gtcagctatgtcataattttcacaataggaaaataaccaatttctaactcaatttaaactaatttttaagtaaacaaaaatgggttagccataatatacataatgatactgtttatctccagattggccctatgtgctatctttgggctgatagttctttttctaaataaatttactaagaaatttattaatcaaatttcactttggccgggtgaaatggccagcaggaaggtagtaatcaacaactctcgaaggcccaaggagctgtggctcacgcctgtaatcccaac

SEQ ID NO: 339484 - DNA, 516 bp, Homo sapiens
tataaatgcatatttcttcttctcaactgatttaaaaaacaactgtataaaataatatgtataaaattatattttaggcctataacctgtagaagtatatttgataattatagcataaaggagatagatgggatcaaagttgtgttagaataagaaaatgataccagatcacaactcaaacctacaggaacaaatgagggaagccataagtggtaaattttgtataagaggggggctaggcgcagtgactcacacctgtaatcccagctctttgggaggccaaggtgggcagatcacttgatgtcaggagtttgagaccagcctgaccaacatggtgaaactccgtttctactaaaaatacaaaaattagtgtggtgtggtggcatatgcctgtgatcccagctactcaggaggctgaggcacaaaaattgtttgaattcaggaggcagaggctgcagtgagccaagatcatgccactgcacttcagcctgggcaacagagcaagcctctgtcttt

SEQ ID NO: 339485 - DNA, 373 bp, Homo sapiens
tgagagacagtctcactctgttgcccaggctggagtgcagtggcacaatctcagctcactgcaacctccacctcccaggtttaagcaattctcctgcctcagcctccagagtagctggaactacaagtgcccaccaccacggccggctaatttcttttgtattttagtagagaaggggttccaccatgttgtccaggctggtctcaaactcctgagctcaggcaatctgcccgcctcagcctcccaaagagctgggattacaggcatgagccactgtgcccagcacagtctgtcttttgaagcagctcaatccacccagctactaagctgatttgtggcaaagttgcagtttttacaagtttctatctctggc

SEQ ID NO: 339486 - DNA, 647 bp, Homo sapiens
ggagagcttggccatgtgacttgctttggctagaagaatgttggcagaaatgtcaatgtgccagctttgggcccaggtccctttcacttctgcattttcttgagaaaagcttcccttgcatatttgctgacctaagtacaatcagcaatgaggaataaagtccagctggacttgtggcttgaaacagagctgtccagctcaccccagcagagactggccaaccccaagacaacctgcaacagcaacatgataaatagaatgttcattgtggtatactgctgggactttggttgtatgttacatggtgccaatttaatgacagtaactgatacgtaatcacttcagactcaggatcgtcaatcttatgatagcccctaagtctgtctggcatcaacatacatttccctagtccatctgtctctatctgcaaatctttaacatgtactattccttcctcatttttggccgatgtcctttgcttataatttcactgagaaaaatgggaaaaactggaaaagaacatgtttcctcaaccactgtcctactggccagcatctgtgcctgtacactctgccatttcttccaaatgaactatctgttcatgctcctatcaaaagtgacttctccctttgagctttaaatcacat

SEQ ID NO: 339487 - DNA, 269 bp, Homo sapiens
cacctcttcttggtgtatctaatcattggaatcttccatttctgtctccttctgagcaaacggaggacatgggtgctggaattccttagttctggaatggcttatcaggacaccatcttctcatttgccaaaccatctgaacaactgattgatgggtgagataaaggacactctgaaaaggaattattccttcatgccagagtcctttctaaacctcatccattttcctttataaagagatcctttagatctctttataaatgtcatct

SEQ ID NO: 339488 - DNA, 755 bp, Homo sapiens
ggaacaatcacttgaataggtcatgtgcttatgagcctttttcctattttctggtttcctatatggcatttataaagcctttatcattggaatcctattaaaagtattcactcaaagtcagcagttggaacattttcaattccaagcagcatgtacaaggcaacgcaagacgaaagtgtctgcatgcgagtttccccttcgaagtagcatcacttcccccatgagcagatggcatcctctcaactcactgatgaactgcagcttcctcacaacaaaatgtgatagagaatgagacacaaggctctaggactgggagatagacatctaagaataaacagcaagcaaatgtaataaaaattggcattgaacagatctggaatggtaaacttttaaagtcagagttggagacaccattctttagagctttgggtcaaacaatggtctgtttaagaacaagttgaaaaaggtgagggtctatgattccaattacttctccaattttgctgacactgatgtgttcttagttggaattgattgatttcctgcatctcagtttctccagatgctcacaagtgatgccaatgtcaactcatgagatggggtaagaagggggtcgcttagcacttagaaagaggaccgagtacagagattgttcctctttaatctcaactggaaaagaaaagaacaaacctttaggccaggcacagtggctcatgtctataatcccagcactttgggaggccgaggcaggcaga

SEQ ID NO: 339489 - DNA, 496 bp, Homo sapiens
catatgaaaatgacagtaaccttgatcaggccaggccagcagagtgccgaaccttgatcaggccaggccagcagagtgccggctgccacaaagtgcagctcttgggccaccccttatggccctgtgttgcctgaggaccctccttggcatttttcaatgccaaggaccctccttggcatttttcagagtacgtgttagaagtttgtattttgcataggaaataactccttaagtatgcagacaaacagtgtgtttaagaataccctgacaattttttggcttcacattagtatctttaaagcctccattttcatgtttagttaaagagggaaaattgtaaatttgagttagatacacctagtgggtgtgaaagtttgcatatgatttaaagatataaagacttactaataatattatcagctgaatttgaggcatgaatgcaaatccagcctgactgggtattgactgccctttgtacaccggaataccttgtagt

SEQ ID NO: 339490 - DNA, 375 bp, Homo sapiens
gtgtgtgttgtgtagctgttggtttggataagaaatcatctttccatcatttatgaatgctgcgtgataactaccagtgtaggttataaataaaatagaatataaagactcagttctctattaatattcatttaatagaacataccagtcctatttctcatgtaaaaatcctatttgcaatgaaataaaatgcctttttagcaattataaatctaaacaccatactgtttaaacattacagaattattgtcaaactaaatgaagtgattaaaaattgaaaaaatgagaatgatcccttatcaggtagaacttatattttaaaagaaagactaaaaataaaataagaattatgatataaggttaattatgagagga

SEQ ID NO: 339491 - DNA, 404 bp, Homo sapiens
ggtgggaggtgataggaggtaaagtcagaggggtggggggcctgcgtaaagtctggcttttactctgtgtgagatggaagccactggagggttctgagcagaggacaaggtggtctgactcatgttttgaaaaggatcccgctggctgccctcaggggtcaagagtggaggcagagagaccagtcaggaaaccattgtgatagccttggtgactaatgatggcagcttggactagggtggtatcttgaactaggatggtatcagaggttgggggaatttgtccatttcctctctagctggcactctagacgttcttgctggtcaccagctttgggatcttgggcaagccatcttccccgctctgggccgtattagtctggattctctagagaaacagaaccaag

SEQ ID NO: 339492 - DNA, 3127 bp, Homo sapiens
  misc_feature (695)..(695): n is a, c, g, or t
  misc_feature (701)..(701): n is a, c, g, or t
tatttccatgcaagtggaagacggtaccgtctccccacatttgagaagactgttttgcatcactctttgctattgaaggaagcagtgatggtgaatttccttctgtttgggttccttgtgtctataacttcctttgtggtaaagccatcaggaagaatagtgggagtggggtatatggtcagggtgctcatatcctgctttagcctagctgcttcttacggagtgcaagggagaactctgagaagcagtatgtaaataccagggagctgattgctgaatattgtggtctcatctgaatattgtggtctcatctaaatattgacaccaggcaatgaagcagaaatagagtatgtgtccctttatgcgtgggtaacttaagcttctgtcatgtgggaagggggaccgaatcttccctgggaggaaggctccaaattctcactacttctgtgttacttgaagggggaagcataaggaacccagtttgaaggcaacattgtgtgccatgaatctgcttattaatcaacatgccttgttaatgtcctctgccctgaacagcccttactcagttctcatttggaaagttattttttggggttacatcctgtttgtttcagaatttaaaaccctccatggtgggtcacttgaggtcaggagttcaagattagcctggccaacttagtgaaactccggctctnctgaanatgcaaaaattagccaggtgtggcacacgcctgtaatcccagttacttgggaggccgaggcaggagaatcgcttgaacctgggaggcagaggttgtagcgagccaagatcacaccattgcactccagcctgggcaacagagtgagactctgtcaaaatcaaaaaaaccaaaatacaaaaaactccattgttctgagagtttcccctaaattatcggaagacactcacattgaattggtaggacctatagtatagaggagaatggtatgtatgtcagcagtagagttccaatccaaattgcgctatcgcattagaaatacattaccctcccactccccaagttcagcaaattagaagagaatctgaagtttgtaggaagggaataaagctgctataaacatttatgtgcaggtttttgtgtagactcgttttcagctcctttgggtaaataccaaggaaccaggttgctggattgtaagttaagagtatgtttagttttggaagaaactgccaaactgttccaacatgactattttgaattcccattgacaatgaataagagttcctgtagctcctcaccctcattagtatttggtgatgtcactcttgcattttagctaatgggtgaatagtggtctcatcgttttaattcccaatcccatagtgatgtggagcaccttttcatatacttaatctgccatccttatatcatcattggtgaggtgtctggattttctgtccagaattttagttctagtggttttcttatttttagaaaggaagtataggaaggaaggtttaatctgtcttaagcctgattatatgaaaatcaagaataggctaggtgtggtggctgacatctgtaatccccgcactttgtgaggctgaagtgggaggactgcttgagcctgggaagtcaagcctgcagtgagccatgactgttgctgcactccagcctgagtgacagagtgagaccctgtctcagaaaaaaaaaaagcaggctcattttaaagttgtttatattttattttttgaaggaaataaagttgaagagatacaaagggtagtgaagattctccttcccctcctgtaattcagctgtttagtttctattctcgcacagccctgttatcagtttctagtgtaagcttgcagtgacttttactttatttataagcaagtgttagtgggtgttgtcatttcttttaaaaatataaattatactgtacatgctattttgtattttggcttttctcccacctaaacaccctaaagatcattttctgtcagtatataaaatcttggtgatgccaatacccatcccttagattgtacaagcagcattttgccatgctttatcccatagcctgcctcctgcagtctcatctttttttctatatgcgtgtccaagtaagttgtagacatttttcacttttaatcctttcagcatacatgtcatgggaatttgtttttgtttttgttttttgtgtttgagacagtcgctctgtcacccaggctggagttacagtgacgtgatcccagctcattacagcctccacctcccagtttcaagcaattctcatgcctcagattcccgagtagctgggattacagatgtgcaccaccacgcctgactaatttttgtatttttagtagagatggggtttcatcatgttggccaggctggtctggaactcctggcctccagtcatttgcctgcctcggcctcccaaagtgctgggattacaggcatcagccaccacacccagccgtcattggagtttttttgagggagatttgcagtaaggtgaataaatgttaagtgtatcatttgatgaggttttttctttttttttttttttttgagatggagtcttgtatcgcccaggctagagtgcagtggcctggtcttggctcactgcaacctccacctcctgggttcaagggagtctcctgcctcagcctcccgagtagctgggattacaggtgtgagccaccatacccagactcatttgatgagttttgatgtaaaagcatgtaactcaaacccctatgtctggaacatctgtattacatctgaattttttcacctagtcaattcctgcacctctctctcctgtcccttcttccctcccctggcagtcagctactgttaggattttgttcactgtagattaattttgcctattctagaacttcatataacggactcacttatgcagtatgtattctgtaagttccttttactcagcatgtttgtatgttcatcagtgtgtttaagctttgttcctttttatggctgagcagtgttctatgtatgaatgccacattttaacgtttcacctgttaggtgaacaactaactggtgaacaatgggctgtttctagtttggggctatcatgaataaagttggtatgaacatgtaca

SEQ ID NO: 339493 - DNA, 679 bp, Homo sapiens
aataagtgccaagaagtagccacacacacattaaaaaaaaattctgagcccctgtaccccacctttgcatttagtggagtcataggactagctcacacccatgtgaacagagctgatgtgtctcatttctgggccaaggagtttaagaagtggggtttgtctcctttacattctctttttcctcttctgccagctctaatacctcaaggaatgtcagaatatgggacagaaggagccaggacatccaccttgcactgttctgggaggaagaaatacattttctggcctgcgcagggtggctcacgcctgtaatcccaggactttgggaggctgaggtgggcagattgcctgagctcaggagtttgtgaccagccttggcaacacaaggaaaccccatctctactaaaatacaaaaaattagccaagtgtggcagcgcgagcctgtaatcccagctacttgggaggctgaggcaggagaattgcttgaacccaggaggcagaggttgcagtgagctgagatcatgccactgcacttcagcctgggcgacagagtaagaatctgtctcaaaaaaaaaaaaagaagaaatacattttctgtatacttaaaaataattaaaatgaggagatcgagaccatcccggctaaaacggtgaaaccccgtctctactaaaaatacaaa

SEQ ID NO: 339494 - DNA, 410 bp, Homo sapiens
caaggccacccacttagtaaaatgtatagcctggatatcagccattcaatgcccacatcaatattcccaacaacgttaggcattaactaccagacgattttcagtgataccgagaaaggtgttgcgagctccataaatacagcactttccactagcaaacccagtgggattcttcaatacgtagcaagcctcgccccagttaacgttcccgttttgcagatgaggaaatggagacttctagaagaagtcagagagatctgagtttgagttcctgctttttcactcaccagctgcacaggtctctgcaaatcacgtaattccttggaggttcacccgtcctcaccagcaacatagggacaatatctgatctcaaagggctggtgtggggtaaatagaaggacagagcttgg

SEQ ID NO: 339495 - DNA, 246 bp, Homo sapiens
gtgtgttcactttgtgaaaattaattgaactgtacccttaacatacctgtacttttttgtatgtgtgtttttggatacttagataaaaatttacccaattaacaaaaatgcaatagaagctaatttaaccaagttattgcagtatttaagaatttgaggatgagggagtgtatatggaatggctatcttatactccaggcacataaacaaattcaagaaatttacctttttttttttttttttttt

SEQ ID NO: 339496 - DNA, 313 bp, Homo sapiens
atttctggtaagaaaagtagcagtaaatatatgcatactcgttttttttagacctttgcttttagactgtatttccttaaatctagaattcttttattgtacctttatattttaatgtgctgttttaatttggtgaatactggcgtagctcaccaaattagagggtttattgtatcatttaatttggaaatgtaaagggatgatttcttagaaatcctgatgtgagtggattgataggagagataaatatatatatatatatatatttttttttttttttaattttttgaaacggaatctagctctgtggcca

SEQ ID NO: 339497 - DNA, 375 bp, Homo sapiens
tcgaaaaaccatcacactagaaaacccatcccacatggttttaaatgcggggcactatggcagcctatttgtctgcctctaatgaaatctgcccctggcccatagagaggagcctagaggtagaagaaacagcattcaaaaggaggcttttaaatcccaaaagaaaaagatgccggccgggtgcaatggctcacacctgtaatctcagcactttgggaggccaaggcaggcgatcacttcaggtcaggagttcgaaaccagcctggccaacatggtgaaaccccatctctactaaaaatacaaaaatcagccaggcatggtggcgggcgcctataatcccagctactcggggaggctgagacacgagaatcactt

SEQ ID NO: 339498 - DNA, 520 bp, Homo sapiens
aacttaatgtagtatttcatgaaaaattgttgggttatctttggtcggagattatttttaaatgttcttaacagcacaaactaaaggctgtgctttttttttgtacttttttattgatatagttgtacgaggctgtactttttattgaatattcttaatattgactagagtttttttaaaaataatacagtacaaaaatattttcatgtaattgatattgtgcaaatttgtaccttatagctaatactgaaaattttaaagtgaacactttggcttccttaaactcttgacacaccacatctgattaaggactgatgattaatataaaagggaaatgttaaagtaaaactgaaagtggaaaagcatgttcataaagcagtattgccattagtatcatttaacatagatcaagtctttgccctagtgccttttagaatcacctgggcagatttttgaaagtcttaacacttacataataatgcctaagcaattaggttgggcccaggcataggtatttcag

SEQ ID NO: 339499 - DNA, 535 bp, Homo sapiens
cctggctcagaaaaaaaataaagtgacacaagctcctggaaatccaaagcagacctggtctgttactgactgaattgaaaagtgttcaagctatctgggatggttctgtttcttatcaagtgttacaaacatgctacacatggaatactcagcaagaaaaaaagaaaaaagcagcagcagatacacagggcaccatgtctgtcctcaacagggaaacccaataggagtcccactttcaccgttgcatctgagggctagggtgcagaacagtccataggtgtgaagctcagaggagtgacatagctgggctgggggaggaggtagggacacttcacggaagccactctgattctggctctcctggcctctaaccattcacggcatcttgccatctgctcagttcacctccacattactttcctttgtttacctcattctgttttcctctttaacccagaaacttaaaagtatgtgtgtgcatgtattcagtcatccactcttcaaaaatcacttcctgagcaccccccctccaccc

SEQ ID NO: 339500 - DNA, 675 bp, Homo sapiens
cacaaccaccacatgcttacccacaacctgcaacacctccctgacaccaggaacctggttacagccctcatacctgtgcatgcacggacgatagcctgtggcacatctctgatatcagagacccattcttcccttcccacgtatggagggacctcaggtctctaacgcctccccagacccttgcaggtacccaattaaaatcccaataacctttccagagacactccccagctcctccccaaaaccacagtgcatcctccaccaaccacaacacctttccaggcacatgttcacagccctagtacttaaccaaaacccacatttttatgaccccccaatacatccctaaacaccccaacacacacacaatcacacacacacacacacacagctatcacaccctcagcatatcaaccccctatccaaccccaacactgccagatacacccaggacccagctacagccctgctaccttcccactgactcataccctcaaagccctgacacctccccagacacacacactctgcccacagcccccaacgtttctcccagctatagctcagcacttccccaaacaccggtatcatcccctatacctttccaaacatacagcctccccctacaacacacatacactcactgcttcaaacacccactcaaacaagaacacc

SEQ ID NO: 339501 - DNA, 760 bp, Homo sapiens
taaggttcagcagtgtgtccctgtgtgctcaagggctggctgagtcctcctgggtggagtggcgccagttaggaggtatgggttcttgtctcaactctgtcagcctggaggtgctccatggtggccaaccctgtcatccacctgattcttgcttctacctccaggccagcagccctgccaacctccccatctgtcctctgcccctgtcacgccccacgtatctcggcccaatctctgctcagcctctcagagctgtttgttgtctcctgtttatgaccttctgttctcagctcttggcctttgctcatgcctcctcccacttggaaatctccctggagcagctgcgtgttgccctcatgcaggaaatccacatgggagccatccaggctgcccagctgtgggtccactgggctcctgcagcacccacctgagtggtcctgcatgttctgaagtgccccattggtgtgggaatcacctgctacttcttaaaggctaggacggtcttttgttcatttcgagggaagccgatggcacagctcccaagaactggattctggattccgacccagctgcacctctatggcctttccctgagcataacccctagctcccctgggccttgagtgtgcggtgggagaagcacctacccttagaagcacctaagaacatgatgagtaagcatgctttttaaactgtaacatgttctacagtatgtaagggcttgtcttcattgtggacccctaccactgccttcaaacaa

SEQ ID NO: 339502 - DNA, 284 bp, Homo sapiens
aattttcagcagtgtcaatatcatcatcatcaataagcatttttaagtacggtcatacatagcttaatgataggggcgcactctgagaaatgtatccttaagggacttcatccttgggtgaacatcacagaatgtacccaacacatacctacatggtagagcctactacacacctagctgtatgctgtagcctattgttcctgggctgcaaacctgtgcggcatgttactgtgctgaacactgtaggcaagtgtaacacaatagtaagcatttgtatgtctcaa

SEQ ID NO: 339503 - DNA, 236 bp, Homo sapiens
ccagcccataacagaactttaaaatgcagtaggatttgatagggtgtagaggattttttgtttgtttgtttttgagacagggtctcggtctcttacccaggctggagtgcagttgtgtgatcacagctcactgtagcctcaaccttccaggctcaaatgatcctcccacttcagcttcccaagttagctggaactacaggaggcatgtagtttgggtattttttgtagaaatgggg

SEQ ID NO: 339504 - DNA, 478 bp, Homo sapiens
tcaataccaagaagaatttcagaaaacatacaagtacacagaaattaacaacatgcctctgaatgaccattgggtcaaagaataaattaagtcagagattaaaaaaaaaaatttttgaaacaaatgaaaatggaaacacaacatactgaaacttgcgagatacagcaaaaacagtgctaggagggaagtttatgacatcaagtgactacatgaaagatactgaaagatacaaattaacaacctaatgtcatacctcaaggaactacaaaagtaacaaaccaaatccaaaatcagtagaagaaaagaaataacaaagatcagagcagaaccaaaaaaaaaacaataaaataaaaaccaaaaaacagtacaaaggatcaggaaaatgaaaagttggttcttcgagaaaataaataaaactgataaaccaattgctagagtaacaagggaaaaaaaagagacaacacaaagaaaatcagaa

SEQ ID NO: 339505 - DNA, 673 bp, Homo sapiens
aatgagttgcttactgaacaggtccataaagctcgggtgaagttcaataccttaaaaggtaagctccgtgagacaagagatgctctcagggaaaagacattggctttagaaagtgtacagctggacctaaagcaagcgcagcatcgaataaaggaaatgaagcagatgcatccaaatggggaagctaaagaaagtcaatccattggaaagcagaactcttcagaggagagaatacgtcaacgagaacttgaaaatctcttgcttgaacgacaactagaggatgctcgtaaggaaggtgataataaagagatagtcattaatatccacagagactgtcttgagaatggaaaggaagatcttctagaagaaagaaataaggaattaatgaatgaatataattatttaaaagaaaaactgcttcagtatgaaaaagaaaaagcagaaagagaagtgattgtgagagaatttcaagaagaactggtcgatcatcttaaaaaattttcaatgtcagagtctccactggaaggtacatcacattgtcatattaatttggatgagacatggacttcaaagaagaaattatttcaagtagaaattcaacctgaagaaaaacatgaagaattcagaaaagtttttgaattaatatcattactgaactatactgcggatcaaa

SEQ ID NO: 339506 - DNA, 434 bp, Homo sapiens
tgagaagaacagaaccgagagaaactttcagatttaaaggctgggaggaggatgagcctgcaaaggaggctaagcagctgtggtcaaagatcaaagaggtagtagtaaaaccatgaaagtagaatcagacgccaatggaagagtatcaatgataagaaactagaaaattataccaaatgctactgagaagtgaggtagtgaggactgggaaataaccaccggattgaaggataggaaggtgatcaccaaggtgaccttggcaagaaccatttcaacagaatgatggttgcagaagtcaaaatggactcggttgaggaatgaaaatgggaaatgacttgtaaaatggagaggcccaaactatccaactgttttgagaagtttaactgtaaagtagaaaagatagaagtgtaactggaggggaaatgaggtatgaa

SEQ ID NO: 339507 - DNA, 191 bp, Homo sapiens
aatagctttccactgtgctttcagttctcttctgtgtctccatcgtgaccacacaaaccctttgtgatctggccctgcctgcctttcctcctcactcacagcacaccagcgcccccagatcagaaacctcctttctgactccacctcacagcctttgcacttactggtcccctgcctagccacaagccacg

SEQ ID NO: 339508 - DNA, 353 bp, Homo sapiens
ctctgaaactcacctttctcttccccatggatgtggaaggagttatctgtcaccagtcagataactgtcaccagtcagttaactcctttcacacccatggggaagagaaaagatcggctcaaggtgtcaagaaatccctccttctagaaaccggagaagtaggggaaagcatcctcccactaataactaacttctaggttgaatgaagcccaggagcctgtgcttttagcaagaatctcaggggtttctgaaacagatagtcctcagaccacacttacagctgctgtgacttcacatgctggaatgacttcatacatgttaagttcttagaacagaagctggaactctaagca

SEQ ID NO: 339509 - DNA, 434 bp, Homo sapiens
agtctcgctgtgtcgcccaggctggagggcagtggcactatctcgactcactgcaacctccacctcccaagttcaagtgattctcctttctcagccttctaagtagctgggataacaggcgcgcaccaccacgccaggctaatgcccagctaatttttgtatttttagtagagacgaggtttcaacatgttggtcaggctggtctcaaactcctgacctcgtgatctgcctgcctcggcctcccaaattgctgggattatgggtgtgagccaccacgcctggccaggattccagaagtttttaaggaaggacatacaggtagggttgctataattaaataaaaaatagtagtgacttaaacaagatagaagtttctcatgttaacagtccatacttaacagtcctaggctagtatgacccaagctccttctatc

SEQ ID NO: 339510 - DNA, 537 bp, Homo sapiens
ccaacatccaggtttgagaactaccaactcatatctcatcttgtattttctatatttcatctatttcctctcccacatatgatctcatccatatttctcacacagaaatacttctgtatgaatccctaaaccataatgactccaaaaatcctcagaccccaccaaaacccgcacagcagtattatcacacttaaatgaatgtataacagttcactaatatcaaatatcctgtcagtgtttacattttaagaggcccaacttttgtagggaagccgtaaatacatttgtcagattaaaaacacacaatgggaaatagaaatcatcatatatgtctggttctttggcaaaaggtagttttgttggctgtgtgctatcacattgtgtccatgctggatggtcagaacatatgtgttagtgattgttaaattaaaacctctggtggtccactctattcagtctggaagatttattgaactatcaccaagaaatgtgagggcttattgggaacaggcaactaaactatgagcttggacaaaa

SEQ ID NO: 339511 - DNA, 486 bp, Homo sapiens
tttgtttgaaataggtattttccagtgtcccattttaatcccttgaagtttcttaaagttattttcttagtagttgtctttgggggataaacttaacatgttagtataatcatctattagggattaatgccagtttagttatttttaatttaaaaaaaatttgtgtggctaatgccattttaattatattatacaaagactttgcccctttataattccgttccttctcctctcccttgtgctcctgtcatacaattacctctcagtacattgtatgtccatcaacacatttagaattactgcttttgcagttgtcttttagagaaaaaagttagaaatggaaaagacttctgtactattttttctatttgcctatgcaatcacttttaccagcaccctttatttcctcatgtgggttcatgttactgtctagtatcttttcatttcagcctgaagaactgtctttagtgtttcttgcatggcagg

SEQ ID NO: 339512 - DNA, 486 bp, Homo sapiens
atcatgttcttccactcaccaacatctcgacactgatttggacacctctcccccttcagaatcctttatgtcctgggtgtttcttcttagcagcttcttccattctgcctaagaactcttgaatatcttcaataaactggagcataaactgactgcccttaaactccttcagctactcaagcaagaagaccttcaaaattctcaaaattggtgatggttttgaggaagggagaaaaacagccccacccaaccctctcaacagtacctaacagtcctcaggatgagccaggtttctcccatgaaatttcagatctctgtgaagcttgccaataccttcatgccagaaggtaaacaaatgacctgcctatccacagtgggacatcaagttctagcctctgggctctaatttctcgtggctcctagggtcccattacttaaacaagcacgtgtacttccctaagcagctaagccttttcccccagggta

SEQ ID NO: 339513 - DNA, 862 bp, Homo sapiens
tacaggcgtgagccaccactcctggttcaccctgctaatttttaaatttttgtgtagagatggggtcgcactgcatttcccagacttttctctaactcctggcctcaagcaatcctcctgccttggcgtcccaaagtgttgagacttacaggcatgagctaccatggtttgccccacaatgccttttattaagtacagaccatggtgtatatcgccttgtgaaaatgattcttttcctccctcttcaaattgaggatgctgccttgaagctccagcatgttgcagccccttaagtatttctcaggatgaaggagagaccattcagggcaattgcatcttccctggaggggctgttttcactgtgatgcccgcaacataccaagagcggaatcctgtctgaggagtgcagctccggtctcaccatgtgggcagggcaatcaccattaaccccagcccacaggccttcttaattgttaacagacattctgagaagtgcatgccctccacaaagcctacacacatgtgttcgagtgtgactctaggaaatgagcagatgtaatggaaacctcagtattgactcatcccgattgttatatatgagtggaatttgcatctcatttagtgtttatttcagtagattccagttgaggtcatggagtgctaaatttatatgcatcatagcacctttctcaaaggaattgggagctcttttgcaaaacaaaagatgtcttcttttcccttagcccttggttttgtttggaccagatggtgtaggtgaagagaacattagttgtggaagaggtatgtatgactcccttgggtacagtcattgatatttgttaaagacagcctgagagtctgt

SEQ ID NO: 339514 - DNA, 479 bp, Homo sapiens
gtacttgccaaggcatccagaatagtgtgcttacattgagtttttaccttgaattttataaagtattctttacatttcaaaatagttttatctgttctctgactcatatcttagagttaaacaggttaaattctcactgttacttgaggcatgaagaaaatgagacatggagaaatgtttttgttcaaggcagcactgctagcgaatggtaaaactgggattctgtgctgtttctgcctcttgatagaactccatgttcattgtaggtgggtctgcctctatccctactgtgattagaaaaggaggtcagaacacttagggtggaaaagcttttgggggtaagagctgtgagagaaatgaacagatcagtcagtagtatagaatcttgtatatgccaagcattctgtatatttatcaagaagagctcagtgtcggtacaaggggaagtatttcactttgaaaagtttgtttatttagag

SEQ ID NO: 339515 - DNA, 399 bp, Homo sapiens
ggaaaaagtgttggcttttgaagcaggcccaactgagtcactgtgaaaccttgtataagtccaacctctctgtgccttagtttcctcatctttaatgggactaataacatcttcgctctagagttgctataaagagagaagttgaatatgtaaagtatcttgcacatagttggaacttaataaatattctttattctgtaagttccttgaggctgaaaagtatcttctctaggcacaattcctggcacagtgcttgctacgtagtggggtcttactatagataatgaatgaataagtgaatgagtaaatgagtgaataagaagggagagcattctaggcagtgaggagtaatagaaatagcaggaaagttggaaatgaactgttgtgtgggaaaggact

SEQ ID NO: 339516 - DNA, 216 bp, Homo sapiens
gttgaattgctcattgctaacatatagcaatgtgatttttatatgttaatcatgcattctatattttaactgtgctaattagttctagcagtttttttgcagattccttcaaatcttctacataaacactcacattgtttgtgaatagagaaagttctgttttattttctccaatctgtatgcctcttacttctgtttcttgcctcatcacagtgg

SEQ ID NO: 339517 - DNA, 370 bp, Homo sapiens
cccaccaaggcccaccaggggtctacaccagcccagtcggcagggggaggcttcaatgggactgggctgtagcatgagggtcagggaagctgggagggtctcgatcttgaggaaagactgaccaatgaggcaaggtgtctggactctcgacaacttgacaacttggaataataaaaaagcatgcattggggtctctgtccctagttcctggcacagaactcttaaaacctcttgaatttcctgtcttttatatgttaatgagatgatacttaggggaggcggaggctagatagcttcaggatggcaggggctggtcaccagaaaaaccaaccacatgattctagaggtgcagaaggctcaggaagagggg

SEQ ID NO: 339518 - DNA, 1762 bp, Homo sapiens
  misc_feature (4)..(4): n is a, c, g, or t
  misc_feature (6)..(6): n is a, c, g, or t
  misc_feature (8)..(10): n is a, c, g, or t
gcgncngnnnagggacgcgggcggggacggagctcggcgtgcttgctgctggagggtgatggccctgcaaggctgtgggctccgacctcaccgggagtcgacagcgagaggttcgccgaagagcgaggttctgggcgagcgctgaacgccggccccaagcaccccgggtctttacacagtccgcgtccacagactctgacgaagacgtggatctgctctcgctttagctgctcgcggtcctccagatcatgtccgcgactcctgcgactccgcgcggaaaaaaaagtttgccaggcgtggactcaatgacctttccaagctgtgcgcctcgctgcctggaccgggtctgagcgcggctgcccaggttgacctttctgcgggagggctttctctacgtgctgttgtctcactgggtttttgtcggagccccacgccctccggcctctgattcctggaagaaagggttggtcccctcagcacccccagcatcccggaaaatggggagcaaggctctgccagcgcccatcccgctccacccgtcgctgcagctcaccaattactccttcctgcaggccgtgaacaccttcccggccacggtggaccacctgcagggcctgtacggtctcagcgcggtacagaccatgcacatgaaccactggacgctggggtatcccaatgtgcacgagatcacccgctccaccatcacggagatggcggcggcgcagggcctcgtggacgcgcgcttccccttcccggccctgccttttaccacccacctattccaccccaagcagggggccattgcccacgtcctcccagccctgcacaaggaccggccccgttttgactttgccaatttggcggtggctgccacgcaagaggatccgcctaagatgggagacctgagcaagctgagcccaggactgggtagccccatctcgggcctcagtaaattgactccggacagaaagccctctcgaggaaggttgccctccaaaacgaaaaaagagtttatctgcaagttttgcggcagacactttaccaaatcctacaatttgctcatccatgagaggacccacacggacgagaggccgtacacgtgtgacatctgccacaaggccttccggaggcaagatcacctgcgggatcacagatacatccattccaaagaaaaacccttcaaatgtcaggagtgtgggaaaggattttgtcagtctagaactctagcagttcacaaaactttacacatgcaggacatcaagccctacagctgcgagcagtgcggcaaagtgttcaggcgaaactgtgatctgcggcggcacagcctgactcacaccccgcggcaggacttctagagaagcccaggatctgtcccgtgccgccgctgctcccctccccagacacctctccacgtctcctacccagggggtcgcatccctagcccttcactgaccccagctcttcccttgctgcagccgcacctgcagctccagggagttaactcttcttctgggggactgagaactgtagaaagccacacactactacatcccttcacaaagagtatatgctagtttcttgtagatattcacagctcattttagagctctgtacataatgttgtgggtctttgttttgttgttttgtttgctttgggatcttgttggatgcacttagatatggaaaatggaagccaaattttatctttaaagactgtattttcaaaataaaactttttcttgtttgtttcaaaaaaaaaaaa

SEQ ID NO: 339519 - DNA, 566 bp, Homo sapiens
ttagaggatcctaagctccaacaagaactctagcagttcacaaaactttacacatgcgacatcaagccctacagctgcgagcagtgcggcaaagtgttcaggcgaaactgtgatctgcggcggcacagcctgactcacaccccgcggcaggacttctagagaagcccaggatctgtcccgtgccgccgctgctcccctccccagacacctctccacgtctcctacccagggggtcgcatccctagcccttcactgaccccagctcttcccttgctgcagccgcacctgcagctccagggagttaactcttcttctgggggactgagaactgtagaaagccacacactactacatcccttcacaaagagtatatgctagtttcttgtagatattcacagctcattttagagctctgtacataatgttgtgggtctttgttttgttgttttgtttgctttgggatcttgttggatgcacttagatatggaaaatggaagccaaattttatctttaaagactgtattttcaaaataaaactttttcttgtttgtttcaaaaaaaaaaaa

SEQ ID NO: 339520 - DNA, 410 bp, Homo sapiens
ccagttacaagttgtatatgaacacagatcaagattagagaaatccttgcaaaaagaaagacttgaacataaaaaagcaaaggaagattttcttgtttataagttagaagcacaagaaacattaaataaaggaaggcaagattccaatagcagatacagtgcactgaatgtccaacatcagatgttgaaaagccaacacgaggagctaaagaaacagcacagtgacttggaagaggaacatcgcaaacaaggggaagacttcagtagaacatttaatgaccataagcaaaaatacttgctttgggatcttgttggatgcacttagatatggaaaatggaagccaaattttatctttaaagactgtattttcaaaataaaactttttcttgtttgtttcaaaaaaaaaaaa

SEQ ID NO: 339521 - DNA, 1573 bp, Homo sapiens
  misc_feature (4)..(4): n is a, c, g, or t
  misc_feature (6)..(6): n is a, c, g, or t
  misc_feature (8)..(10): n is a, c, g, or t
gcgncngnnnagggacgcgggcggggacggagctcggcgtgcttgctgctggagggtgatggccctgcaaggctgtgggctccgacctcaccgggagtcgacagcgagaggttcgccgaagagcgaggttctgggcgagcgctgaacgccggccccaagcaccccgggtctttacacagtccgcgtccacagactctgacgaagacgtggatctgctctcgctttagctgctcgcggtcctccagatcatgtccgcgactcctgcgactccgcgcggaaaaaaaagtttgccaggcgtggactcaatgacctttccaagctgtgcgcctcgctgcctggaccgggtctgagcgcggctgcccaggttgacctttctgcgggaggccgtgaacaccttcccggccacggtggaccacctgcagggcctgtacggtctcagcgcggtacagaccatgcacatgaaccactggacgctggggtatcccaatgtgcacgagatcacccgctccaccatcacggagatggcggcggcgcagggcctcgtggacgcgcgcttccccttcccggccctgccttttaccacccacctattccaccccaagcagggggccattgcccacgtcctcccagccctgcacaaggaccggccccgttttgactttgccaatttggcggtggctgccacgcaagaggatccgcctaagatgggagacctgagcaagctgagcccaggactgggtagccccatctcgggcctcagtaaattgactccggacagaaagccctctcgaggaaggttgccctccaaaacgaaaaaagagtttatctgcaagttttgcggcagacactttaccaaatcctacaatttgctcatccatgagaggacccacacggacgagaggccgtacacgtgtgacatctgccacaaggccttccggaggcaagatcacctgcgggatcacagatacatccattccaaagaaaaacccttcaaatgtcaggagtgtgggaaaggattttgtcagtctagaactctagcagttcacaaaactttacacatgcaggacatcaagccctacagctgcgagcagtgcggcaaagtgttcaggcgaaactgtgatctgcggcggcacagcctgactcacaccccgcggcaggacttctagagaagcccaggatctgtcccgtgccgccgctgctcccctccccagacacctctccacgtctcctacccagggggtcgcatccctagcccttcactgaccccagctcttcccttgctgcagccgcacctgcagctccagggagttaactcttcttctgggggactgagaactgtagaaagccacacactactacatcccttcacaaagagtatatgctagtttcttgtagatattcacagctcattttagagctctgtacataatgttgtgggtctttgttttgttgttttgtttgctttgggatcttgttggatgcacttagatatggaaaatggaagccaaattttatctttaaagactgtattttcaaaataaaactttttcttgtttgtttcaaaaaaaaaaaa

SEQ ID NO: 339522 - DNA, 1542 bp, Homo sapiens
  misc_feature (4)..(4): n is a, c, g, or t
  misc_feature (6)..(6): n is a, c, g, or t
  misc_feature (8)..(10): n is a, c, g, or t
gcgncngnnnagggacgcgggcggggacggagctcggcgtgcttgctgctggagggtgatggccctgcaaggctgtgggctccgacctcaccgggagtcgacagcgagaggttcgccgaagagcgaggttctgggcgagcgctgaacgccggccccaagcaccccgggtctttacacagtccgcgtccacagactctgacgaagacgtggatctgctctcgctttagctgctcgcggtcctccagatcatgtccgcgactcctgcgactccgcgcggaaaaaaaagtttgccaggcgtggactcaatgacctttccaagctgtgcgcctcgctgcctggaccgggtctgagcgcggctgcccaggttgacctttctgcgggagggctttctctacgtgctgttgtctcactgggtttttgtcggagccccacgccctccggcctctgattcctggaagaaagggttggtcccctcagcacccccagcatcccggaaaatggggagcaaggctctgccagcgcccatcccgctccacccgtcgctgcagctcaccaattactccttcctgcaggccgtgaacaccttcccggccacggtggaccacctgcagggcctgtacggtctcagcgcggtacagaccatgcacatgaaccactggacgctggggtatcccaatgtgcacgagatcacccgctccaccatcacggagatggcggcggcgcagggcctcgtggacgcgcgcttccccttcccggccctgccttttaccacccacctattccaccccaagcagggggccattgcccacgtcctcccagccctgcacaaggaccggccccgttttgactttgccaatttggcggtggctgccacgcaagaggatccgcctaagatgggagacctgagcaagctgagcccaggactgggtagccccatctcgggcctcagtaaattgactccggacagaaagccctctcgaggaaggttgccctccaaaacgaaaaaagagtttatctgcaagttttgcggcagacactttaccaaatcctacaatttgctcatccatgagaggacccacacggacgagaggccgtacacgtgtgacatctgccacaaggccttccggaggcaagatcacctgcgggatcacagatacatccattccaaagaaaaacccttcaaatgtcaggagtgtgggaaaggattttgtcagtctagaactctagcagttcacaaaactttacacatgcagagccgcacctgcagctccagggagttaactcttcttctgggggactgagaactgtagaaagccacacactactacatcccttcacaaagagtatatgctagtttcttgtagatattcacagctcattttagagctctgtacataatgttgtgggtctttgttttgttgttttgtttgctttgggatcttgttggatgcacttagatatggaaaatggaagccaaattttatctttaaagactgtattttcaaaataaaactttttcttgtttgtttcaaaaaaaaaaaa

SEQ ID NO: 339523 - DNA, 1843 bp, Homo sapiens
  misc_feature (4)..(4): n is a, c, g, or t
  misc_feature (6)..(6): n is a, c, g, or t
  misc_feature (8)..(10): n is a, c, g, or t
gcgncngnnnagggacgcgggcggggacggagctcggcgtgcttgctgctggagggtgatggccctgcaaggctgtgggctccgacctcaccgggagtcgacagcgagaggttcgccgaagagcgaggttctgggcgagcgctgaacgccggccccaagcaccccgggtctttacacagtccgcgtccacagactctgacgaagacgtggatctgctctcgctttagctgctcgcggtcctccagatcatgtccgcgactcctgcgactccgcgcggaaaaaaaagtttgccaggcgtggactcaatgacctttccaagctgtgcgcctcgctgcctggaccgggtctgagcgcggctgcccaggttgacctttctgcgggagggctttctctacgtgctgttgtctcactgggtttttgtcggagccccacgccctccggcctctgattcctggaagaaagggttggtcccctcagcacccccagcatcccggaaaatggggagcaaggctctgccagcgcccatcccgctccacccgtcgctgcagctcaccaattactccttcctgcaggccgtgaacaccttcccggccacggtggaccacctgcagggcctgtacggtctcagcgcggtacagaccatgcacatgaaccactggacgctggggtatcccaatgtgcacgagatcacccgctccaccatcacggagatggcggcggcgcagggcctcgtggacgcgcgcttccccttcccggccctgccttttaccacccacctattccaccccaagcagggggccattgcccacgtcctcccagccctgcacaaggaccggccccgttttgactttgccaatttggcggtggctgccacgcaagaggatccgcctaagatgggagacctgagcaagctgagcccaggactgggtagccccatctcgggcctcagtaaattgactccggacagaaagccctctcgaggaaggttgccctccaaaacgaaaaaagagtttatctgcaagttttgcggcagacactttaccaaatcctacaatttgctcatccatgagaggacccacacggacgagaggccgtacacgtgtgacatctgccacaaggccttccggaggcaagatcacctgcgggatcacagatacatccattccaaagaaaaacccttcaaatgtcaggagtgtgggaaaggattttgtcagtctagaactctagcagttcacaaaactttacacatgcaggaatctccacacaaatgtcccacatgtggaagaacctttaatcagagaagtaatctgaaaactcaccttctcacccatacagacatcaagccctacagctgcgagcagtgcggcaaagtgttcaggcgaaactgtgatctgcggcggcacagcctgactcacaccccgcggcaggacttctagagaagcccaggatctgtcccgtgccgccgctgctcccctccccagacacctctccacgtctcctacccagggggtcgcatccctagcccttcactgaccccagctcttcccttgctgcagccgcacctgcagctccagggagttaactcttcttctgggggactgagaactgtagaaagccacacactactacatcccttcacaaagagtatatgctagtttcttgtagatattcacagctcattttagagctctgtacataatgttgtgggtctttgttttgttgttttgtttgctttgggatcttgttggatgcacttagatatggaaaatggaagccaaattttatctttaaagactgtattttcaaaataaaactttttcttgtttgtttcaaaaaaaaaaaa

SEQ ID NO: 339524 - DNA, 115 bp, Homo sapiens
actatgtcatggaagtcagtgcattcattatcccttttacaaatgttgttttaaaaagcacccacaacatgcggttcccagccgggcgcggtggctcacacttgtaaccccagca

SEQ ID NO: 339525 - DNA, 425 bp, Homo sapiens
tccctgctgctgatgagatagcagcactactgatcttcaaccagctgtagaagtgataacagaaccctcaactctctgggtgagaaactttagcaatcctggcaataatagctaccatttatttagcactagctatgtgccaagcactgactatagcttagggatgaacaatacaagctttggaatcagatttatcaagacaagagcccaaactgcctttcaccagctacctgactttgagcaagttactcaaccccttaagacccaagatttaagacatctttatctataaaatagaaatagtaataataacaagtcctacctcatagtgtgatttacagaatcaagtaaaataatccactcggccaggtactgtggctcatgcctgtaatcccagcaccttgggaggctgaggcaggtggatg

SEQ ID NO: 339526 - DNA, 206 bp, Homo sapiens
cctaatccactgctatttcccaaggctgattctcatcatatcactcttctgttctgctcataaatctctagaggcacccagttgtctactgcattaagtttgtccccactgatggggcgtcatgccaagccgacctctgctttcctaatgctcaacagccctgatatgggaaatgttactgacacaccacagttagaaatgcccac

SEQ ID NO: 339527 - DNA, 666 bp, Homo sapiens
ccaccagccacttaatattttttcttaatctgtcattatcttgattttttaactattttctgtccttccccactatactgtaaatttcatgagtgcagagatcttgccggtcttaaaattccaacaaggttaaagaagctactgtttccctctaagcaggtttattttagatttccccctcctttcaagctttattggattttagtctagtcaaagattataattactttggcatttaccataaaaaacaaggggagaaaaaccagaagtgacttcccttcaaaaactggaagtcactccacccacctagtggtctagactggacacagactgcacagaggtatccaacaaatgctccttacaaaaactttccaatgtggacatatgcaaagatggtataattctgacatctgcatcaaaaatctaagttttaaactactctccctagcaattactaaacacaacgatttgagaagaatcaacaagagaaagcacaaaataaaatccatgatccttaatccagagaaattaatgatttcatcactgacttggttctttctcattttagtaaggtcatctattcatcacctgctctagatgcttcttcctgacctgtgttttttgtctccaggctggagtgcagtggcgcgatctcagctcactaca

SEQ ID NO: 339528 - DNA, 152 bp, Homo sapiens
ggttcatcctggagccagaaagatgaaagaaaagtgggagaatgacaaggatgtggccatgtccttccattacatctcaatgggagactgcataggatggcttgaggacttcttgatgggcatggacagcaccctggagccaagtgcaggag

SEQ ID NO: 339529 - DNA, 453 bp, Homo sapiens
tttttttgtggagatggggtttcactatgttgcccacgctggtcttgaactcctggcctcaagtgatcctccttccttggctttccaaagtgctgagattaccaacatgagccactgtgcctggtactacctttatcacatactaaatttctttatgtacttgggcttgtctttggactgttgttaagaactgatctcattttctcgttcagtggagagatgtatctcttcatttattaaggtcttatttgttgaaaacagacttatttactctctctctctctccctttttctctgttctctttttcttttgcagtcttgttaaacagtgtttttggctagggactttacagatttttactgcataaatgagaccatccactccctaccagtaccactgtggttaaatttataattgtttatcagtagtgtatgttaatgtcatatccagcc

SEQ ID NO: 339530 - DNA, 529 bp, Homo sapiens
atgtgttttgtgtgtttgtgtgtgtttttttttctttaaaagagagaggggaggagatctccattccaggattggtgctgaagcacatgtgtcctgaagttcaggacgtcagggtaattgacacagaagaaaagtgaggcgaaggcaggcagcaagctgcctgtatttttgagacatctccagagagggcaggtctgcagacgggcaggtctgcactttgcagcaacagtctgcaagcccagacaaggcccccaaggagacacaagcccagcccaaatgcagtctgagtgttaagaaaggaaagggcctgggattgcaaagcgcgaggccaaacgcctcccccgaccttcccttcgcgtggcacctgagaaaggggcagcccagtgcaaatgctaggtgtgaccaaccaggccccggagaagcgattctgtgaacaaggatgactagcccgctagtagtgcttgccgcaagccgcccatgcatcccaagtgctttccacccatcacctccctaacctgtctcagggagg

SEQ ID NO: 339531 - DNA, 585 bp, Homo sapiens
atttttattccactgaattgtttgcttcagttttaacataattaacgaaactttattaatatttagtagacatctactgcatgctaagtgatctacagacttcccttgttgattctgattcaatggtacttaagcattgcatagaaatctgtttttaaataaatactaagagttacgggtcatcagataaggatggtaaatgccctattattcaaagaagaaaacacctgtctaaggaacatggcctctaaaggtagcaaaaattctattgcttccctattttttagatgtttggtccagaaagaagtatccaatgtcttatctgttagttaccaagctatctgtttacagatcacatgatctgaaacatgaaactgcattcataaatttttaagaaatctaggttattagaaagtcccaacatttgaaaacttccattttaatgttcctcttatctgaaatttgttagactccatcctcttcagtttacctcttaagctgtcagcacctttctatgctctttttcttttttctttgagacagaatcttgctctgtcaccaggctggaagtacagtggtacaatc

SEQ ID NO: 339532 - DNA, 529 bp, Homo sapiens
acgggtagaataagagacagaaagatgtggtagaaaagtgatgttcaggcaagagatgacaaagtctgagcagtgcagacaaaggagaggaaagaatgattttaaacagaattaagttggtagaattgacatgatttgctgatgatctggataagaaggtaagaaagaaggaagagacaagaactatttacaggtttctgtcttagcaatgggaggcatggcaatgctatttactgggacagatacacaaagggaaaaacaaaatggggcattggaagactcacactccctgatttcaaaatttactacaaaactacagtaaacaaaacagtgtggtagtgacataaagacagacatataggccaatggaacagcatagagaacctagaaataaacccttgcatatatgtcaaataatagttaacaagagtgccaagaccattcaatagggaaaagacagttttttcaggctgggcacactggctcacacctgtaatcccagtactttgggaggctgagataggagaag

SEQ ID NO: 339533 - DNA, 166 bp, Homo sapiens
taacctacaggctgattgatctttgtccagaaataaataaatgaatcctccttctgaaaccacaaaacatcttgctgggctgaaaactactaacctacaggctgatctctgtccaaaatgaatgaatgaatgaatgaatgaatgaatgtcttaaataatctacagg

SEQ ID NO: 339534 - DNA, 322 bp, Homo sapiens
ctcctctgggctttaactctgccggttttcctagagctttgctcagtcctgacaggtgtgaggacctgaactcagggcttgggatcttatctcaggttctcctgctttattgcaaggactcggggtcctcagcagatcttggcattctggagggtgtcacattattggtgtgcatcatcgttaagggtctttggaggggatttctgtctggcatttggaaattgcagaattgactttctaaatgtatggagtagctggcgacaaaggggggtcacattgtggaggaacaggggccagtgcatcagtaaagagcaggagaggc

SEQ ID NO: 339535 - DNA, 316 bp, Homo sapiens
aggctttgcaaaaagacggcgggaaaatgtttttggtagatggagaagggaaagggtggcaaggaggatgggagaaaaagatgatagggaaacagtttttgggtagatggaaggggaaagagagggtggcgagcagcaggagtggggagaaggctttgggaaaagatgagggaaatgtttttggggagttgaaggagcaaaagaggatgatgagagcaggaggtggaaaaaaggctggccagggagagggagaaaagacgttggggaaaagttttggggtagatgggtggggaaaatggaagtgagcggtaaagta

SEQ ID NO: 339536 - DNA, 399 bp, Homo sapiens
tctctacaggtgctttgtgctgttcaagtgtagtgttccaaagcaaatggctatttatttacgaggccattttggtgagtacaaaagttggccagtagcagactttgaggtagaagcagaaggtactgagctctgcataataataaagtgggaggacatttgagttctggggaaaattaggggagaaaaaaatagaaatggggaagaaaaatgattagaggtaagtggacaaaaggattttggagcacactgaaatattcaattttaaattatttgctttccttttctgcaatagaaaccattcaattatctccaagtattctgatactgcttagtcaatagtattttgcgaagtggagatcagaagtgtccaacatgtggtgatgtggtacagaaaag

SEQ ID NO: 339537 - DNA, 341 bp, Homo sapiens
cctgggagaggaagaataccatcaaaaggaacaattatatgtatgcatagtgtgtgcttgtatatgtgttatatcataggctcgtttcttatattaaacaactcacttattaaaccctgcttattgtaagctctgtaataatacatgtagatatgataataacaataatagaggaatgaaattttccttggaggctttggttaactaaatgtattctcagctgttcttatgaaaaacataaaaatgtgtaagcaatataataattacaaatgccatcaagatggaaattacaattttaaattctgaaaaatatagtctttgctactgaatcacagttttat

SEQ ID NO: 339538 - DNA, 218 bp, Homo sapiens
gatatgtgtaggttatatgcaaatgtaacaccatttaatatgacttgagcatctgcagattttggtactcttgggggggtcctggaaccaatcccccaaggatactaagggatgactgcattataagccactaaaataagaaatcagtgagttacacagccaataacccaacaagagattaaacagaatcagtcagtaattacttgacctgaaagaag

SEQ ID NO: 339539 - DNA, 231 bp, Homo sapiens
gcaggagaagcccttgaacccgggaggttatgggaagctaagatcacaccactgcactccagcctgggcaacagagcaagattccatctcaatttaaaaaaaaagtgagagaaaaagagagagagaatagggttagtaattagggttaaaggttggggttgcaggtcaggcacctctggacattcccagctttggttcttcatgtgtctactcttcctgcaggtggtttga

SEQ ID NO: 339540 - DNA, 539 bp, Homo sapiens
aatgctacaacaaaaaacttagaagtgtgaattgggaagaattttactttgagtgaagaacctttttcaatgcaggcaccaaactcaaaatcataaaatgtcacaacttggaaggggcattggagatcacctgcgttctcattgtatagattgggaaaccgaggctggaagaggcaagttggctttctcatggtctgtcagatccttagaggctgagttaagagtagaatccagattttttacctccctattatctccaggtgtgtttaatgtttgggataagattaacatcccccaaggtgattcataaggaaagtgagaacaaatgtagataagggtttgaagcgtaattatctctggcattagaaccacacacccttcctcacagttgtacctttagccttgaacaggcttcctggtactcacctggtctaatagtgatttttatggtgcttaccatgtgccaggatctctggttcaagaactccttccgtcctcagcaactctatgaggtagctgctagtgtgatcctatcccca

SEQ ID NO: 339541 - DNA, 269 bp, Homo sapiens
agcaggtgaggataaacaagtgaaaatgcaaaggaaagttgacgcacataagggaagacaagtgagtcaccactgaggatggcaaaggggacaggcgaaaggctcacaggttagctagcatttggaagcagggcaagagtccgggccagaggcggtggctcacgcctgtaatcccagcactttgggaggctgagccgggcgatcacctgagctcaggagttccagcctgggcaaaacgacaaaaccccgtctcaaataaaaaaaaaaaa

SEQ ID NO: 339542 - DNA, 529 bp, Homo sapiens
caaagacacaacgttggaactataaggaataattttttcttaattcactatgtatttttctaacacttttcttggagcttttaatccttagaacctaggagatggaggactatacactcgggtttacttttctttcattttcttcttctgaattcttttttttaacttttaagttcaggggtacatgtgcaggtttgttatataggtaaacttgggtcacaggggcttcttgtacacattattttgtcacccaagtattaagcctactacctattagttttcctgatcctctccctcctcccaccttctaccctctggtaggccctagtgtgtgttgttcccctctttgtgtccatgtgttcacatcaattagctcccactaataagtgagaacatatggtatttggttttctgttcttgcattagtttgctaaagataatggcctccagctgtatccatgttcctgcaaaggacatgatctcattcttttttatggctgcagagtattccatggtgtgtatgcaccac

SEQ ID NO: 339543 - DNA, 149 bp, Homo sapiens
gaatccaaacacagaccttacatatttcataaaaattaactctaaatagatcatagaccaaaatgtagaagatgaaactataaatcatctagaagataacgtaagataaaatccaggtaaccttgggtttggcaatgacttagcaccaa

SEQ ID NO: 339544 - DNA, 566 bp, Homo sapiens
aaagtcccctagggaagtcatctgacagtcctggtcactgtctgtgctttaaagctggctgttactgaagcctttaatgcatactgtttttcttcccaggtaatctgcaatagtaattatggtttagttgagtggcctcccccagttgagaaacacaatcataccatgcagtaaaaaatatttaaagcacacttatagttctagaactttgcatggataactctaattagtctgggagcgcttccctggagccgaatgtgtttaagaattcaatcttttaagtgccggtgatgtcagtttggagacagcagtatgtggctccattccaccgtgaatcctttgctagctgcagtgtactttagctaatagaatcaagtgcttgtcttcaagttttttaagagcataaaaaccctgtttattaaaacaattctctttggcactttgcagcattatgataatgctgtcttagcagaagtgtagagagctgtgaactcctagggggaggctctggaggaggaccattctttcccattgtatttcttcgggacaagcatcattcttctcct

SEQ ID NO: 339545 - DNA, 342 bp, Homo sapiens
agtagaatgttattcaaattgtttggtattaggtgacttggtatgttagcgctactgaagcaaatatatagacaagactttggctgattggcaggattttgactagattaatcagacatttgagcattatgaaaaacaatcatttttctttaacaattattgccttttaaatgaataagctaatatgaaagtgacaagtgagacctcactaggggctgagatagctaacataaatatgtaagttatggcacagacagaaagaatgacaaaaatttacacatttaaaaacattttatcaattaagaatttcctgtttaataagttttataaaacagtaaagta

SEQ ID NO: 339546 - DNA, 457 bp, Homo sapiens
tagcagcaggttctttctctttatcttttctatcccttagacctgttctaagataacaaagatgttgagggggaccccttgggattaccaccaccatttctctaccttgaactcctgagagttgaatgattatataactgacagaaatcaagagatgtgatgatgtaaatattattatgacttcttcactagcatctgtataagtgtttatcttcatacagagaataggcacttaataaagatttgttcatggaatgtacaaatcaggtgagcagttcctgtcacttaacaaggactttaagtaaaacactaaataattacagaatctcctctaaccatgagctgcttctctgagtgggctgtgttgatgcctagtcaagaaatttcacacactattaatcatttcagtgtatagctttagtccttgaaagtcaccctgggggaacaagaatgtgtc

SEQ ID NO: 339547 - DNA, 155 bp, Homo sapiens
cctccatgtatcatcactcagcttcagtaattaccaggtcatgctaatcttatttcctgtattccttcattaacttctcctcttcccatgttaaagcaaatctcagatattgcagggatatcattatatcaatatgtatttctaagaggaaatga

SEQ ID NO: 339548 - DNA, 211 bp, Homo sapiens
gagaaaactcagcttggggtaggggttgcaaactcaagtgctaggtagtgtacaccgacaaggacagtgtgacccactgtgggactgtggtaaactctgcaacgcacacatgtacatccaaaaggagttgtgtccctcagtccagcagaccactgccagtgtaagctcagacggtgtgattttcagatttttcaagagaggccagaatcca

SEQ ID NO: 339549 - DNA, 551 bp, Homo sapiens
aaacagagacaacaggacatctatagatatatctgaagatataagaggaaacattatgggaattgctcacgtggttatggaggtagagaagttccatgctacgcatctgtaagctggaaatccagaaaagctagggtgtcattcagctcaagtctgaaggcctgagaagtaagagcaagtggtgtaagttatggagtctgaaggcctgagaaccaagagctccattgtccaagggcaggggaagaagatggatgtcccagctcaagatgagagagaattcacccttcctccaaattctttttgttctgtttgggccctcagtggattggagacgcccagccacattggagagggacgtcttctttactcactgtcacagacacacccagaaatatttcaccagctcttggacatcacttcaccgtctcaagttgacgcataaagttaaccattacaagtagccttgaaagactctatgtgtccttcctaatgaccaggagatgtgagtcttgcattgaagctagagaggttcaggctggacttgaagcata

SEQ ID NO: 339550 - DNA, 786 bp, Homo sapiens
tgtgaggctttctcaggaaggccttcccccaaactaagaaagagcaccatattatcctcgtgttttctccatggtgcttgcttgttcataagactgacttaatggctgtcttcccaaccagactgtaaactcctgagagatggcactgcatctgctttcttcaccatttattcgaatgtgtagtgcctggcacataacaggtgctcattaaatattggttggctgactgcatagttcctaacccttatatttactttcttcgttaatggtacccctatagttgtttgttttcataatatcatattctccacatgttctatgaactacagccattttcatataggaggtattcaaatacaggcatgccttgttttattgagctttgttttattgcactttgcagatatagtgcatttcttacaaattgaaggtttgtcgcaaccctgtattgagcaggtctgttggtgccattttccaagagcatgtgctcgcttcgtggctctgtgtcccatgttagtaactcttgaaatatttctaactttttcattatgactatatgtattatgctgatctgtgatccatgaactttgatgttcccattataattgttttgaccatgaaccttacccatataagacagagaactgaataaatgctgtgtgtgctctgactgctccaccaaccacccattctcccatccctgtccctctcctcaggcctcctcattctctgagacaaaacaatatagaaattagggcaattaatgaccctgcaattggctctaag

SEQ ID NO: 339551 - DNA, 177 bp, Homo sapiens
atggccagatgtgtaagtatgtacctgtagtccaaatactcatgaggttgtggtgggaggatcactggaggccaggagtagaagggtgttgtagggtactatgataagacctgcagataactactacattccagcctgggcaacacagtaaggccctgtctctaaaaaaactaagca

SEQ ID NO: 339552 - DNA, 793 bp, Homo sapiens
cctgccctggggcccttctaagaggaagatggcccaggagaagtctctagggggtgcctctcaactggccctatggagaccctttcctgcctgcggagagagactctcagccactcccccagggccggccacctcccagccattgcctggtgtgcggccgcaggggatgtccaagaaaccccaaaagcctaagcacagcagccctgggaagaaaccagcaggaaggaagaccagggagtcccaggctgtggcgagagaagataatgacccaaatagagatgaggtcccaagggcccaacttcccacacaccggccaggactgcctcgcctatccacgcatcgtggagaattcagcagtagcgactccaacatcagagctccccaagttctggggacttcagagccctctgcctacagcctgggaggcctcgtgcccagacgccatgcaccctctggtgactggcagccacctgtccatcccccaagaccggaaaggcagcaatagcccccgggagcccagggctgtcctcggtgcatccggctgcagagggaaattgaggaccttagagaccaactagcggccatgcagttcctcactgacaagttccaggacctttgaagttggagccagcatcttcctacaagatgaacagctgccacctttggagctccggagctgcagccaagcgggttccctccatatcctgttcagccagggcttcctctcttcctctgcatttgcacacttcccaacgcagttcaaagcaatttgaaataaagtcgttctcatatt

SEQ ID NO: 339553 - DNA, 408 bp, Homo sapiens
atgagttaagaggtgggtgttagaggagtggaatgtttttgggagtagttgttatgtaagaaaatattcagtgactggcagccacctgtccatcccccaagaccggaaaggcagcaatagcccccgggagcccagggctgtcctcggtgcatccggctgcagagggaaattgaggaccttagagaccaactagcggccatgcagttcctcactgacaagttccaggacctttgaagttggagccagcatcttcctacaagatgaacagctgccacctttggagctccggagctgcagccaagcgggttccctccatatcctgttcagccagggcttcctctcttcctctgcatttgcacacttcccaacgcagttcaaagcaatttgaaataaagtcgttctcatatt

SEQ ID NO: 339554 - DNA, 1078 bp, Homo sapiens
cctgccctggggcccttctaagaggaagatggcccaggagaagtctctagggggtgcctctcaactggccctatggagaccctttcctgcctgcggagagagactctcagccactcccccagggccggccacctcccagccattgcctggtgtgcggccgcaggggatgtccaagaaaccccaaaagcctaagcacagcagccctgggaagaaaccagcaggaaggaagaccagggagtcccaggctgtggcgagagaagataatgacccaaatagagatgaggtcccaagggcccaacttcccacacaccggccaggactgcctcgcctatccacgcatcgtggagaattcagcagtagcgactccaacatcagagctccccaagttctggggacttcagagccctctgcctacagcctgggaggcctcgtgcccagacgccatgcaccctctggtgactggcagccacctgtccatcccccaagaccggaaaggcagcaatagcccccgggagcccagggctgtcctcgggtaatgttttgtgtggctcctagaaatccaggtccacactagatggtgggatctgtgtctaggttaaactgatagctgcataccccccgacccccgccgcctccaccttctgcaccccagggagagagggtgcctcctttccattgaggattctgtgccaacccacctcgccactgggctgcaggctatgggggctactaagggttgggggagacagggaggacagggagagaggaggccagaattgactaaccatttatcttcctctggtgtctcctggactagtgcatccggctgcagagggaaattgaggaccttagagaccaactagcggccatgcagttcctcactgacaagttccaggacctttgaagttggagccagcatcttcctacaagatgaacagctgccacctttggagctccggagctgcagccaagcgggttccctccatatcctgttcagccagggcttcctctcttcctctgcatttgcacacttcccaacgcagttcaaagcaatttgaaataaagtcgttctcatatt

SEQ ID NO: 339555 - DNA, 847 bp, Homo sapiens
catccacaagaaacggtggaagccctgggggccctggcctggcccgggtgcaggctgcatggccgggcggggcggtgtctcctttcacagcttccccgtctgtccgcagcctccaggagccccacacagggctggggctctgtgcccccaactcacacccgtcggctcccccaggaggagcaggctgggcccagagccgcagggtgggctgcagggaggtctgacttagctggggaaagtgccatccctgccattgctagtgacaagctcgggctgctgtggccccagcacagattcaacactcactgcgctatgtgccagctgttgcacactcacctccacacccaactcacaggaagcaaggctgggaaggagggaactggccccaggccacacagatgctgcgagttgggattatgatcgggtgcagtggctcacacctgtaattccagcacttggggaggccaaggcgagtggattgcttgagcccaggagtctgagaccagcctgggcaacatggtgaaaccccatctctacaaaaaaaaaatacaaaaattagctgggcgtggtggtgcgtgccggcggtcccagctactcaggaggctgagatgggaggattgcttgagcctgggaggtcgaggctgcagtgaactgtgatcacgcccctgcactccagcttgggtgacaaagcaagatactgtctcaaaaaactcgagttgggatttcaccctgcgtggtccagcactgaacagcgttcacacctcggtcagctcagccccaaaaacggggaaggccgggcggggtggggacggcatgcgggcaggcccgtggcttttcggaggagtcc

SEQ ID NO: 339556 - DNA, 735 bp, Homo sapiens
gcggccgcaagaacagtagccgcccagggactaagggggcttctgggaggacacacggctggcccagggcgaggggtgtcactgcagggcgccccccaggcccagggcccgtcaggggacagtacggtgacccggcctgcaggtggcagtcagttctgtgtgtctggggcccgcagcacagattcaacactcactgcgctatgtgccagctgttgcacactcacctccacacccaactcacaggaagcaaggctgggaaggagggaactggccccaggccacacagatgctgcgagttgggattatgatcgggtgcagtggctcacacctgtaattccagcacttggggaggccaaggcgagtggattgcttgagcccaggagtctgagaccagcctgggcaacatggtgaaaccccatctctacaaaaaaaaaatacaaaaattagctgggcgtggtggtgcgtgccggcggtcccagctactcaggaggctgagatgggaggattgcttgagcctgggaggtcgaggctgcagtgaactgtgatcacgcccctgcactccagcttgggtgacaaagcaagatactgtctcaaaaaactcgagttgggatttcaccctgcgtggtccagcactgaacagcgttcacacctcggtcagctcagccccaaaaacggggaaggccgggcggggtggggacggcatgcgggcaggcccgtggcttttcggaggagtcc

SEQ ID NO: 339557 - DNA, 1078 bp, Homo sapiens
gcggccgcaagaacagtagccgcccagggactaagggggcttctgggaggacacacggctggcccagggcgaggggtgtcactgcagggcgccccccaggcccagggcccgtcaggggacagtacggtgacccggcctgcaggtggcagtcagttctgtgtgtctggggcccgcagcacaggttgggtgggggctggggcaggggcagcagaagtgggcaaggcctggggggctcaggcactgggcgtggagagcagacaggaagctccagtgggcaccaccccgggaccgcggctcccacccgtgctgccccccacccatggccacggtcaccaggaacagcgggacctggggtctccgagggactcagcagggcgggcacagaccagtggagtccgggctagagagggccagctcccagcctcttgcttcctgggctgaggacatggggatccaaggccagtgggtctgcagggcccagcccggctgcctgataagataggctgagctcctccctgcacggctgcaaagacgcccacctgtcttattggatccccacaggaatagacccaccaggcggcccccgtgtctcactctgtcagcaggtccccagggacctgctgccgaggggcagtttctggaggctgggggcactggctgggctctaggcctgctctgcccttgccgtggggaaggccaccccgataggggtcaagttgctcaaatctgcgtttggagggtgtgtggccgagggctccctttctggagacccagacaccgcctgggctccgggcggcagaggctgaggtgtcaggggctgagcccctatgtcagcaacacctcaggcctgcactttaggacaggggagaagtcagtttccgccaaatgccccctcagaccagccgaggactgtgccaggaaactgacatgctcaacgctcaagccagctgggacagcgaccgagcccagagagacggagcaagttgcctgaggtcacagagcagggacttggacaccaggcagccggctccacagaggccctctctcctccctgcctcctggccattcaacgcctccg

SEQ ID NO: 339558 - DNA, 461 bp, Homo sapiens
cagagataatgtaaacttttgggcacattacttttggctactgctgaattctgaaataattcctgtagatagttcagaaggatatgagtctatccacattaataggtgaaaacactctaatattggtgcttaggaagtgtatcgccattcaaatacttgttatatgaatgactgggcaataaacttgagtcagccattcttccagggtttaaagtctagctccatctattactattgtgtgacattgggcaggtcacctcaactctttgagttcgtcatctaatgaggaaagagatgatgctaatagtgcctttctcatagtgctgtgaaattagatgagataatgcatgagacaatgtatgtgaagtggttaacatagtcctggcctgcagtaggcactcaaatatttttgctgtttttgttattattaagctaataagccaatttggtaccactgacac

SEQ ID NO: 339559 - DNA, 905 bp, Homo sapiens
ccgattattgcatatatgatctttaattagatccaagatttttaaaaatacagctataaaaacattattgggatgctcagggaaatctgaatctagcttgcatattaggtaacatagttgtattaatactacatttcttgggtatgagaatgatattgtggctatttagaagatccttgttccttggaaacacatgctgaagtatctacaggtaaagcggaatgatgtctgcaacttgcctttgaatatttaagaaatatattgacatggtttggatatttgtcctctccaaatctcatgttgaaaaaggaatataaatcattctattataaagacacatgcatgcatattttcactgccgcactattcacaagagcaaagatacggaatcaacccaagtgcctatcaatgatagactggataaagaaaatatggttatatatacaccatggaatactatgcagccatgaaaaggaacaagatcatatcctttgcacggacagggatggagctggaagccattatcctcagcgaactaacacaggaacagaaaaacaaacactgtgtggcatgttctcacttgtaagtgggaacggaacaatgagagcacatggacacattgggggaaacaacacacactggggcctgtcagaggtgggggctgagggagagcatcaggaagaatagctaatggatgctgggcttaatacctaggtgataggttgatctgtgcagcaaatcaccatggcacacatttacctatgtaataaacctgcgcatcctgcacatgtaccccagaacttaaaatacaagttgattaaaaataaataactaaaatataaaatttaaaagaaatgtgattcccaatgttaaaggtggggtctggtgggaggtgatcggatcat

SEQ ID NO: 339560 - DNA, 183 bp, Homo sapiens
ccctctcctttaaacatgtctgatttgtaacccacctcttcagaattattcctgtatcttccaaggtgacctgacggtaacagcaagtggcacaagcacactcatttcccggtgatagctttaaaatatgttcacaatggccaggtatggaggctgatacccgtaatcccagcactttggaag

SEQ ID NO: 339561 - DNA, 263 bp, Homo sapiens
tatttccaagggagcactaactggactacagcctggcaggagataaccaagtcatatgcatagtggctttgggtacgatggtctgctgtatgaagcaaccctaggacatttgaagagaatggagtgatggccagtgtattgtgctgggatctaccacaggggtcatgttgtaatgacacctgtcagctttgactggggagccctttcatttcttagtaagtgttcagccccagtgtgcaccacttaaaaggaagacactggta

SEQ ID NO: 339562 - DNA, 151 bp, Homo sapiens
atagtaaccatcttaagatggaggttgaagtagaaatcagaaggcccaggatggctatgagtaggcccccactgtaaattaccaccttcctacagacccctcatttctcatcaataatgtaaaaagtatgtaccttcttacccaaacattc

SEQ ID NO: 339563 - DNA, 1353 bp, Homo sapiens
gttcttttcctggctagtcaaagcacaccttacgtacattctgaagccgtctcttatatgattcatttttttcactgtagataagacttttatggatggattgtttttctcaaataatattatcgctttgtgactaaagtaaagattattaattcctgaggcaagaagatataaaagctccagaaacgttgactgggaccactggagacactgaagaaggcaggggcccttagagtcttggttgccaaacagatttgcagatcaaggagaacccaggagtttcaaagaagcgctagtaaggtctctgagatccttgcactagctacatcctcagggtaggaggaagatggcttccagaagcatgcggctgctcctattgctgagctgcctggccaaaacaggagtcctgggtgatatcatcatgagacccagctgtgctcctggatggttttaccacaagtccaattgctatggttacttcaggaagctgaggaactggtctgatgccgagctcgagtgtcagtcttacggaaacggagcccacctggcatctatcctgagtttaaaggaagccagcaccatagcagagtacataagtggctatcagagaagccagccgatatggattggcctgcacgacccacagaagaggcagcagtggcagtggattgatggggccatgtatctgtacagatcctggtctggcaagtccatgggtgggaacaagcactgtgctgagatgagctccaataacaactttttaacttggagcagcaacgaatgcaacaagcgccaacacttcctgtgcaagtaccgaccatagagcaagaatcaagattctgctaactcctgcacagccccgtcctcttcctttctgctagcctggctaaatctgctcattatttcagaggggaaacctagcaaactaagagtgataagggccctactacactggcttttttaggcttagagacagaaactttagcattggcccagtagtggcttctagctctaaatgtttgccccgccatccctttccacagtatccttcttccctcctcccctgtctctggctgtctcgagcagtctagaagagtgcatctccagcctatgaaacagctgggtctttggccataagaagtaaagatttgaagacagaaggaagaaactcaggagtaagcttctagaccccttcagcttctacacccttctgccctctctccattgcctgcaccccaccccagccactcaactcctgcttgtttttcctttggccataggaaggtttaccagtagaatccttgctaggttgatgtgggccatacattcctttaataaaccattgtgtacata

SEQ ID NO: 339564 - DNA, 1273 bp, Homo sapiens
aaccttttcacctgtctgttctggcatgcttctaatgatgtcagagtcacctggatcaatgataggaaggcaggggcccttagagtcttggttgccaaacagatttgcagatcaaggagaacccaggagtttcaaagaagcgctagtaaggtctctgagatccttgcactagctacatcctcagggtaggaggaagatggcttccagaagcatgcggctgctcctattgctgagctgcctggccaaaacaggagtcctgggtgatatcatcatgagacccagctgtgctcctggatggttttaccacaagtccaattgctatggttacttcaggaagctgaggaactggtctgatgccgagctcgagtgtcagtcttacggaaacggagcccacctggcatctatcctgagtttaaaggaagccagcaccatagcagagtacataagtggctatcagagaagccagccgatatggattggcctgcacgacccacagaagaggcagcagtggcagtggattgatggggccatgtatctgtacagatcctggtctggcaagtccatgggtgggaacaagcactgtgctgagatgagctccaataacaactttttaacttggagcagcaacgaatgcaacaagcgccaacacttcctgtgcaagtaccgaccatagagcaagaatcaagattctgctaactcctgcacagccccgtcctcttcctttctgctagcctggctaaatctgctcattatttcagaggggaaacctagcaaactaagagtgataagggccctactacactggcttttttaggcttagagacagaaactttagcattggcccagtagtggcttctagctctaaatgtttgccccgccatccctttccacagtatccttcttccctcctcccctgtctctggctgtctcgagcagtctagaagagtgcatctccagcctatgaaacagctgggtctttggccataagaagtaaagatttgaagacagaaggaagaaactcaggagtaagcttctagaccccttcagcttctacacccttctgccctctctccattgcctgcaccccaccccagccactcaactcctgcttgtttttcctttggccataggaaggtttaccagtagaatccttgctaggttgatgtgggccatacattcctttaataaaccattgtgtacataagaggttgctgtgttccagttcagtaatggtgaatgtggaaaagtgaaataagaccaagaaatacaccca

SEQ ID NO: 339565 - DNA, 833 bp, Homo sapiens
gttcttttcctggctagtcaaagcacaccttacgtacattctgaagccgtctcttatatgattcatttttttcactgtagataagacttttatggatggattgtttttctcaaataatattatcgctttgtgactaaagtaaagattattaattcctgaggcaagaagatataaaagctccagaaacgttgactgggaccactggagacactgaagaaggcaggggcccttagagtcttggttgccaaacagatttgcagatcaaggagaacccaggagtttcaaagaagcgctagtaaggtctctgagatccttgcactagctacatcctcagggtaggaggaagatggcttccagaagcatgcggctgctcctattgctgagctgcctggccaaaacaggagtcctgggtgatatcatcatgagacccagctgtgctcctggatggttttaccacaagtccaattgctatggttacttcaggaagctgaggaactggtctgatgccgagctcgagtgtcagtcttacggaaacggagcccacctggcatctatcctgagtttaaaggaagccagcaccatagcagagtacataagtggctatcagagaagccagccgatatggattggcctgcacgacccacagaagcccagccactcaactcctgcttgtttttcctttggccataggaaggtttaccagtagaatccttgctaggttgatgtgggccatacattcctttaataaaccattgtgtacataagaggttgctgtgttccagttcagtaatggtgaatgtggaaaagtgaaataagaccaagaaatacaccca

SEQ ID NO: 339566 - DNA, 1423 bp, Homo sapiens
gttcttttcctggctagtcaaagcacaccttacgtacattctgaagccgtctcttatatgattcatttttttcactgtagataagacttttatggatggattgtttttctcaaataatattatcgctttgtgactaaagtaaagattattaattcctgaggcaagaagatataaaagctccagaaacgttgactgggaccactggagacactgaagaaggcaggggcccttagagtcttggttgccaaacagatttgcagatcaaggagaacccaggagtttcaaagaagcgctagtaaggtctctgagatccttgcactagctacatcctcagggtaggaggaagatggcttccagaagcatgcggctgctcctattgctgagctgcctggccaaaacaggagtcctgggtgatatcatcatgagacccagctgtgctcctggatggttttaccacaagtccaattgctatggttacttcaggaagctgaggaactggtctgatgccgagctcgagtgtcagtcttacggaaacggagcccacctggcatctatcctgagtttaaaggaagccagcaccatagcagagtacataagtggctatcagagaagccagccgatatggattggcctgcacgacccacagaagaggcagcagtggcagtggattgatggggccatgtatctgtacagatcctggtctggcaagtccatgggtgggaacaagcactgtgctgagatgagctccaataacaactttttaacttggagcagcaacgaatgcaacaagcgccaacacttcctgtgcaagtaccgaccatagagcaagaatcaagattctgctaactcctgcacagccccgtcctcttcctttctgctagcctggctaaatctgctcattatttcagaggggaaacctagcaaactaagagtgataagggccctactacactggcttttttaggcttagagacagaaactttagcattggcccagtagtggcttctagctctaaatgtttgccccgccatccctttccacagtatccttcttccctcctcccctgtctctggctgtctcgagcagtctagaagagtgcatctccagcctatgaaacagctgggtctttggccataagaagtaaagatttgaagacagaaggaagaaactcaggagtaagcttctagaccccttcagcttctacacccttctgccctctctccattgcctgcaccccaccccagccactcaactcctgcttgtttttcctttggccataggaaggtttaccagtagaatccttgctaggttgatgtgggccatacattcctttaataaaccattgtgtacataagaggttgctgtgttccagttcagtaatggtgaatgtggaaaagtgaaataagaccaagaaatacaccca

SEQ ID NO: 339567 - DNA, 758 bp, Homo sapiens
gtcgtgacatacatttctccatcgaagttcgtctccaggaggatcccctgatagaggcagcagtggcagtggattgatggggccatgtatctgtacagatcctggtctggcaagtccatgggtgggaacaagcactgtgctgagatgagctccaataacaactttttaacttggagcagcaacgaatgcaacaagcgccaacacttcctgtgcaagtaccgaccatagagcaagaatcaagattctgctaactcctgcacagccccgtcctcttcctttctgctagcctggctaaatctgctcattatttcagaggggaaacctagcaaactaagagtgataagggccctactacactggcttttttaggcttagagacagaaactttagcattggcccagtagtggcttctagctctaaatgtttgccccgccatccctttccacagtatccttcttccctcctcccctgtctctggctgtctcgagcagtctagaagagtgcatctccagcctatgaaacagctgggtctttggccataagaagtaaagatttgaagacagaaggaagaaactcaggagtaagcttctagaccccttcagcttctacacccttctgccctctctccattgcctgcaccccaccccagccactcaactcctgcttgtttttcctttggccataggaaggtttaccagtagaatccttgctaggttgatgtgggccatacattcctttaataaaccattgtgtacata

SEQ ID NO: 339568 - DNA, 510 bp, Homo sapiens
ggttggagagcgatggatttgagaaaagtcgaagagattagtggatggggctcagtgggttttgcagagtgtgtgtgctcgagtgctagtagcagatgaggggactccaagatgacttgccagccatattgctgggagttggtgactatacaagtgatagtgttaatttttttaggtaaacaagaagaaacagcttgttgttgatagtgggaagggtgaatgagagggcaataagctgtgtcaagatgctttttgagttgttcttggcttatatgcgtattctgtcttgagataaagatttagaagtcattaccataataaatgtggtttgagaaatttgcagtgttagatgttatggcataggaagagtaattaataccagatgaaaaagagattttaacaaaagttgacctttccccacgttttctctaccacttttttaaacatcagtgttccctgggttcctctttttcatctggtattaattactcttcctatgccataacgtct

SEQ ID NO: 339569 - DNA, 231 bp, Homo sapiens
ctctggaattagccatttctccagggagccctgttcctcttagtacaaagtggcatttagaaacaatgatctgggcactaggtacgctaaatgctgctggagtgttgctcttcccaggcccctttcagtggacagagctaggaaagacatacatatggatgcatttgcttacatatacatgtacatttacatctttatttctttatctatctatattgaaaatcatgagtt

SEQ ID NO: 339570 - DNA, 292 bp, Homo sapiens
ctgtcacttttgctcccatattgccatcgtattttgcaactttagacatccttttattaaactaacaactgcactaaataactgatacactaataactgatttttttaagttgaaacaacaaaatagtacacacttaaaagtaagcttccttccaaaaaaatcagaatcctggttcctctttcaagagacaaccactcttttttttttttttttgagacagtcttgctctgtcgcccaggttggagtgcagtggcgcaatcttcactcattgcaacctccatctcccgggtt

SEQ ID NO: 339571 - DNA, 514 bp, Homo sapiens
tccatttgaaatcatccaataaaagacctgagaaacctattacatggtctctggggtaataaaagtaaataaaagttttttaaaaatgctccagcctgggcgacacggtgaaaccccatctctaccaaaaatacaaaaattagccaggtgtggtggcgcacgcctgtagtcgcagctacttgggatgctgaggtggaaggatctcttgagccctggaggcagaggttgcagtaagctgagatcgtaccacagcactcctgggtgatagagggagaccatgtctcaaaaaaaaaagaaaaaggctgcgtgcagtggctcacacctgtaatcccagaactttcattggccgaggcgggaggatcacctgaggtcaggagttcaagaccagcctggccagcaaggtgaaaccctgtctctacttaaaaatacaaaattagccaggcatggtggcatgttcctgtaatcccagctattcgggaggctgaggaaggagaattgcttgaacctgggaggc

SEQ ID NO: 339572 - DNA, 233 bp, Homo sapiens
aaatttttttttaagtggaactttttaaaaattaataattaaaaagtaaagcttcttcaaagctaagtgtgcaacagacatcagcctgcgatgcttttggagccatgtcccagggttttctctttggagagaaaagactttgcaaaaagttttgtccctgattttttctggtccagtcttcgcgtctgaatttagtatgcctccttattgtaagcacaagttcataccactcc

SEQ ID NO: 339573 - DNA, 385 bp, Homo sapiens
taggttctttattctttcatctttatctttctatgccctctaaatttgcttttgggtttttttaaaacttttatatcatttgttcacccattagtcatttagcacttgacaatttgacaatgatagctctaaaggaatatatgctctgttttgggatatgtgtgtttatctgtgtctgagtgtgtgtgtgtttgagggttgtttatttgaagagccagtttcatcttttcccgcatgtgagtatccagatatttttggtatttgccttctgtctctttcaatgctgatactggatatatcattaatacattaatttgaataaagctaaatgcctaaaaggatcttcatgtgataaaataaattgtctttcctccatgcatagaat

SEQ ID NO: 339574 - DNA, 959 bp, Homo sapiens
acaactcttgaaaagaattaaaaggtcatgctgaatgtggactttgctttcaagggggtcactccggctgagcactgaaattctgctggcggtaagatgaggtactgggtaagcgtcttcatttctttacagggactcaggcctagcctcatccccctctggcttttgttgagcaagcagacccttctaggaaatgctcccatgctgatctctctttctccttttgtttaactataaaataggttagggaaaagttgcttgtgttttcatattctctccccatttttgtcttaaaaacacatacactatgacagaaactatgaattcagccctcatagctgaacataaagagaatgaaagaggctaaacaggcctctgtgaacaaagcctctgaaggactgattttaatggcacagttttggcatggcttgctaatgaggagcacacctccaggacttccaagaacatgcacaattcctggctgcgtcctcaaacaagtggggctatagcctcagaatctttcatcatcagcgtggtggcctcctattttgttgttgtccatgatgttatttatttttatttttaaacctaattctagacttcaatcccagcagataactgttttgtgtaagcagtaaataacagagttgacttctccatggcaccaaactaaacgtctctgcaaagtaaggtagcccctcaactgtgtctggcattccttcctgtggtgaccacctctatatgtctgtgaagttggagaagcagagcacgggaggggcacataaatataaaactggcttaggaacttacatgatgctataacattaccaagattttaccagttagtataaatctagagtcttttatgaccataggcaacttccatttttgaaaatagtatgaaatttttatagtataaaagcttataaattttctatcatctgtgtttaccttccaga

SEQ ID NO: 339575 - DNA, 511 bp, Homo sapiens
ccttctctgccccagcgtatctagatacatacattccatggtctggtgcatttgatgctgtttgagttagtattggtcagtgattttggcacccttccttccttatgttcctataccaaggctttttatacgaggtatcactgtcttcagaaatatggatggaatgaagttccatttagaccctgacatgagactagttctgttctcttttgttcttttagaacagcagtattaagcaactcaacgctgaagacatggatgaaattgaaaagattgactattgaagaaagaactttattgtttgtgcagtatcctagtttatgtgagaatgtctcagtgggttttgaaggtaatttttttatgttgaggctttttcgacgtgaaactgtcacagatggcaaaataaatgtcacggtacttagttttaagacatgaggtctttttgaagccaaattgatgtgaagcttgtgatccttttgaataaaaaaaaggcaagattatttcttattct

SEQ ID NO: 339576 - DNA, 1990 bp, Homo sapiens
cagcaatcgcagccatggcgtcgttactgtggggaggcgacgcaggggcggcggagagcgagcggctgaacagccacttttcaaacctcagccaaccccggaagaacctttggggtattaagagtactgcagtccgaaacatagatggttctattaataacatcaatgaagatgatgaagaagatgtagtggatttggcagctaattcactcttaaacaagttaatccatcaatccttagtagaatccagtcaccgtgtggaagttttacagaaggatcccagctctccactttactcagtaaagacatttgaagagctgcggctaaaggaagagttactaaaaggaatctatgcaatgggatttaataggccatctaaaatccaagagatggctctccctatgatgctggcacatccaccccagaacctcatagcacagagccagtctggaacaggaaagacagcggcatttgtgttggcaatgttaagcagagttaatgccttggaattgttcccacagtgcctctgcctagctcctacttatgaattggctctgcaaactggccgtgtggttgagcagatgggaaaattctgtgtggatgttcaagtgatgtatgccattcgagggaatcgaattcccagaggcaccgacatcactaaacagattataattggcactcctgggactgtcctagattggtgttttaaactaaaattgattgatttgactaagattcgtgtgtttgtcctggatgaagcagatgtgatgattgacactcaaggattctcagatcatagtattcgtattcaaagagctctaccctccgaatgccaaatgctcctcttttcagcaacctttgaggactctgtgtggcactttgctgagcgaatcatccctgaccctaatgttatcaagttacgcaaagaggagctcacactgaacaacatccggcaatattacgtgctgtgtgagcacaggaaagacaaataccaagctctgtgcaacatttatggcagcatcaccattggtcaggccatcatcttctgccagactcgtcgaaacgctaagtggttgaccgtggagatgatacaggatggccaccaggtgtctttgttaagcggggagctgaccgtggagcagcgagcttccatcattcagaggtttcgggatgggaaagagaaggttctcataacaactaatgtttgcgcccgagggattgatgtgaagcaggtcacaattgttgtgaactttgatctccctgtaaaacaaggagaggagccggactatgagacctacctccaccgcatagggcggacggggcgctttgggaaaaaaggccttgccttcaacatgattgaagtagatgagctgccctcgctcatgaaaatccaggaccactttaacagcagtattaagcaactcaacgctgaagacatggatgaaattgaaaagattgactattgaagaaagaactttattgtttgtgcagtatcctagtttatgtgagaatgtctcagtgggttttgaaggtaatttttttatgttgaggctttttcgacgtgaaactgtcacagatggcaaaataaatgtcacggtacttagttttaagacatgaggtctttttgaagccaaattgatgtgaagcttgtgatccttttgaataaaaaaaaggcaagattatttcttattctaatctttgtacaggtaatgtctcaatgtgggctatgggggtgtttttggatttggttgatacaatctgagcagatcgtgcctcttgggagcatcttactgtgtcacaagagggcggtagagcttcgctgattttggaagcggagcgagtaggaaaaagcccatgtcttcagacctcactcacaggtgccctttccagccatttatgcctttccccgctccccgccttaaactcccccatgcatgcacatgcatgttcttaagtgaaagtacagattaaaacttttaaaaagtgaaac

SEQ ID NO: 339577 - DNA, 721 bp, Homo sapiens
acacacgccttgtgtatatttacatttctgtagcattctctatggacacgctcatctagcatcatagacatcacagcatgcaagcaaacttcctaaccaaagtacctgtctcaattacataagccctggttggatttctaaattttctctataaataggaattcccttggcagacgtggtacttgaatggcccgtgtactgaggaaagcattgcaggaccctacagtgtttttcctcttctagggattgatgtgaagcaggtcacaattgttgtgaactttgatctccctgtaaaacaaggagaggagccggactatgagacctacctccaccgcatagggcggacggggcgctttgggaaaaaaggccttgccttcaacatgattgaagtagatgagctgccctcgctcatgaaaatccaggaccactttaacagcagtattaagcaactcaacgctgaagacatggatgaaattgaaaagattgactattgaagaaagaactttattgtttgtgcagtatcctagtttatgtgagaatgtctcagtgggttttgaaggtaatttttttatgttgaggctttttcgacgtgaaactgtcacagatggcaaaataaatgtcacggtacttagttttaagacatgaggtctttttgaagccaaattgatgtgaagcttgtgatccttttgaataaaaaaaaggcaagattatttcttattct

SEQ ID NO: 339578 - DNA, 927 bp, Homo sapiens
acacacgccttgtgtatatttacatttctgtagcattctctatggacacgctcatctagcatcatagacatcacagcatgcaagcaaacttcctaaccaaagtacctgtctcaattacataagccctggttggatttctaaattttctctataaataggaattcccttggcagacgtggtacttgaatggcccgtgtactgaggaaagcattgcaggaccctacagtgtttttcctcttctagggattgatgtgaagcaggtcacaattgttgtgaactttgatctccctgtaaaacaaggagaggagccggactatgagacctacctccaccgcatagggcggacggggcgctttgggaaaaaaggccttgccttcaacatgattgaagtagatgagctgccctcgctcatgaaaatccaggaccactttagaaagtcctaaattctgaagtccgcgacctttcctccagccccccatctaaacaaggcaggctctgatgatggcctgctggaactctggactggcagatttctctgatggaaactcaaaaggtcccatggttcaaattgtcctgtgccccaaagcccatggatgtggctggggagcaggggagaaggaacaccttccaggacagtgacagcagtattaagcaactcaacgctgaagacatggatgaaattgaaaagattgactattgaagaaagaactttattgtttgtgcagtatcctagtttatgtgagaatgtctcagtgggttttgaaggtaatttttttatgttgaggctttttcgacgtgaaactgtcacagatggcaaaataaatgtcacggtacttagttttaagacatgaggtctttttgaagccaaattgatgtgaagcttgtgatccttttgaataaaaaaaaggcaagattatttcttattct

SEQ ID NO: 339579 - DNA, 363 bp, Homo sapiens
  misc_feature (44)..(44): n is a, c, g, or t
  misc_feature (57)..(57): n is a, c, g, or t
  misc_feature (62)..(62): n is a, c, g, or t
tcctctctctcccctttctcaccccccatcactatcccgccacnatacttctaaggnaactncgagatcccctcacagcagtattaagcaactcaacgctgaagacatggatgaaattgaaaagattgactattgaagaaagaactttattgtttgtgcagtatcctagtttatgtgagaatgtctcagtgggttttgaaggtaatttttttatgttgaggctttttcgacgtgaaactgtcacagatggcaaaataaatgtcacggtacttagttttaagacatgaggtctttttgaagccaaattgatgtgaagcttgtgatccttttgaataaaaaaaaggcaagattatttcttattct

SEQ ID NO: 339580 - DNA, 1693 bp, Homo sapiens
cagcaatcgcagccatggcgtcgttactgtggggaggcgacgcaggggcggcggagagcgagcggctgaacagccacttttcaaacctcagccaaccccggaagaacctttggggtattaagagtactgcagtccgaaacatagatggttctattaataacatcaatgaagatgatgaagaagatgtagtggatttggcagctaattcactcttaaacaagttaatccatcaatccttagtagaatccagtcaccgtgtggaagttttacagaaggatcccagctctccactttactcagtaaagacatttgaagagctgcggctaaaggaagagttactaaaaggaatctatgcaatgggatttaataggccatctaaaatccaagagatggctctccctatgatgctggcacatccaccccagaacctcatagcacagagccagtctggaacaggaaagacagcggcatttgtgttggcaatgttaagcagagttaatgccttggaattgttcccacagtgcctctgcctagctcctacttatgaattggctctgcaaactggccgtgtggttgagcagatgggaaaattctgtgtggatgttcaagtgatgtatgccattcgagggaatcgaattcccagaggcaccgacatcactaaacagattataattggcactcctgggactgtcctagattggtgttttaaactaaaattgattgatttgactaagattcgtgtgtttgtcctggatgaagcagatgtgatgattgacactcaaggattctcagatcatagtattcgtattcaaagagctctaccctccgaatgccaaatgctcctcttttcagcaacctttgaggactctgtgtggcactttgctgagcgaatcatccctgaccctaatgttatcaagttacgcaaagaggagctcacactgaacaacatccggcaatattacgtgctgtgtgagcacaggaaagacaaataccaagctctgtgcaacatttatggcagcatcaccattggtcaggccatcatcttctgccagactcgtcgaaacgctaagtggttgaccgtggagatgatacaggatggccaccaggtgtctttgttaagcggggagctgaccgtggagcagcgagcttccatcattcagaggtttcgggatgggaaagagaaggttctcataacaactaatgtttgcgcccgagggattgatgtgaagcaggtcacaattgttgtgaactttgatctccctgtaaaacaaggagaggagccggactatgagacctacctccaccgcatagggcggacggggcgctttgggaaaaaaggccttgccttcaacatgattgaagtagatgagctgccctcgctcatgaaaatccaggaccactttaacagcagtattaagcaactcaacgctgaagacatggatgaaattgaaaagattgactattgaagaaagaactttattgtttgtgcagtatcctagtttatgtgagaatgtctcagtgggttttgaaggtaatttttttatgttgaggctttttcgacgtgaaactgtcacagatggcaaaataaatgtcacggtacttagttttaagacatgaggtctttttgaagccaaattgatgtgaagcttgtgatccttttgaataaaaaaaaggcaagattatttcttattct

SEQ ID NO: 339581 - DNA, 1658 bp, Homo sapiens
aaaggaggaattgtagtgctacgctaaaataatagaaaaaagttttcaaacctcagccaaccccggaagaacctttggggtattaagagtactgcagtccgaaacatagatggttctattaataacatcaatgaagatgatgaagaagatgtagtggatttggcagctaattcactcttaaacaagttaatccatcaatccttagtagaatccagtcaccgtgtggaagttttacagaaggatcccagctctccactttactcagtaaagacatttgaagagctgcggctaaaggaagagttactaaaaggaatctatgcaatgggatttaataggccatctaaaatccaagagatggctctccctatgatgctggcacatccaccccagaacctcatagcacagagccagtctggaacaggaaagacagcggcatttgtgttggcaatgttaagcagagttaatgccttggaattgttcccacagtgcctctgcctagctcctacttatgaattggctctgcaaactggccgtgtggttgagcagatgggaaaattctgtgtggatgttcaagtgatgtatgccattcgagggaatcgaattcccagaggcaccgacatcactaaacagattataattggcactcctgggactgtcctagattggtgttttaaactaaaattgattgatttgactaagattcgtgtgtttgtcctggatgaagcagatgtgatgattgacactcaaggattctcagatcatagtattcgtattcaaagagctctaccctccgaatgccaaatgctcctcttttcagcaacctttgaggactctgtgtggcactttgctgagcgaatcatccctgaccctaatgttatcaagttacgcaaagaggagctcacactgaacaacatccggcaatattacgtgctgtgtgagcacaggaaagacaaataccaagctctgtgcaacatttatggcagcatcaccattggtcaggccatcatcttctgccagactcgtcgaaacgctaagtggttgaccgtggagatgatacaggatggccaccaggtgtctttgttaagcggggagctgaccgtggagcagcgagcttccatcattcagaggtttcgggatgggaaagagaaggttctcataacaactaatgtttgcgcccgagggattgatgtgaagcaggtcacaattgttgtgaactttgatctccctgtaaaacaaggagaggagccggactatgagacctacctccaccgcatagggcggacggggcgctttgggaaaaaaggccttgccttcaacatgattgaagtagatgagctgccctcgctcatgaaaatccaggaccactttaacagcagtattaagcaactcaacgctgaagacatggatgaaattgaaaagattgactattgaagaaagaactttattgtttgtgcagtatcctagtttatgtgagaatgtctcagtgggttttgaaggtaatttttttatgttgaggctttttcgacgtgaaactgtcacagatggcaaaataaatgtcacggtacttagttttaagacatgaggtctttttgaagccaaattgatgtgaagcttgtgatccttttgaataaaaaaaaggcaagattatttcttattct

SEQ ID NO: 339582 - DNA, 1831 bp, Homo sapiens
cagcaatcgcagccatggcgtcgttactgtggggaggcgacgcaggggcggcggagagcgagcggctgaacagccacttttcaaacctcagccaaccccggaagaacctttggggtattaagagtactgcagtccgaaacatagatggttctattaataacatcaatgaagatgatgaagaagatgtagtggatttggcagctaattcactcttaaacaagttaatccatcaatccttagtagaatccagtcaccgtgtggaagttttacagaaggatcccagctctccactttactcagtaaagacatttgaagagctgcggctaaaggaagagttactaaaaggaatctatgcaatgggatttaataggccatctaaaatccaagagatggctctccctatgatgctggcacatccaccccagaacctcatagcacagagccagtctggaacaggaaagacagcggcatttgtgttggcaatgttaagcagagttaatgccttggaattgttcccacagtgcctctgcctagctcctacttatgaattggctctgcaaactggccgtgtggttgagcagatgggaaaattctgtgtggatgttcaagtgatgtatgccattcgagggaatcgaattcccagaggcaccgacatcactaaacagattataattggcactcctgggactgtcctagattggtgttttaaactaaaattgattgatttgactaagattcgtgtgtttgtcctggatgaagcagatgtgatgattgacactcaaggattctcagatcatagtattcgtattcaaagagctctaccctccgaatgccaaatgctcctcttttcagcaacctttgaggactctgtgtggcactttgctgagcgaatcatccctgaccctaatgttatcaagttacgcaaagaggagctcacactgaacaacatccggcaatattacgtgctgtgtgagcacaggaaagacaaataccaagctctgtgcaacatttatggcagcatcaccattggtcaggccatcatcttctgccagactcgtcgaaacgctaagtggttgaccgtggagatgatacaggatggccaccaggtgtctttgttaagcggggagctgaccgtggagcagcgagcttccatcattcagaggtttcgggatgggaaagagaaggttctcataacaactaatgtttgcgcccgagggattgatgtgaagcaggtcacaattgttgtgaactttgatctccctgtaaaacaaggagaggagccggactatgagacctacctccaccgcatagggcggacggggcgctttgggaaaaaaggccttgccttcaacatgattgaagtagatgagctgccctcgctcatgaaaatccaggaccactttaacagcagtattaagcaactcaacgctgaagacatggatgaaattgaaaagattgactattgaagaaagaactttattgtttgtgcagtatcctagtttatgtgagaatgtctcagtgggttttgaaggtaatttttttatgttgaggctttttcgacgtgaaactgtcacagatggcaaaataaatgtcacggtacttagttttaagaaaaaaaaaacaaaaaaaaaaagacaagaaaaaaaaaaaaaacaacaaaacaaagaagaagaaaaaaaaacagaaaggagcagcggagcgaggagggagaaccaaaaagaacagaggacaggaaggagcgagcgacagacgaccggagcgggggggggaccacgaggagagggcgcagaggagaagggaacacgcagagaggacagaggaaacagaaaaa

SEQ ID NO: 339583 - DNA, 402 bp, Homo sapiens
ctctgcctcccaggttcaagcgattctcctgcctcagcctcccgagtagctgggattcaccatggagtcttgaacccagattctgtgactgcttttgctctttttgtgttcatccaaacagtccctgtttatcctaagaggatgggagaaagagactgggagagaaggaaatccagtggcctccctccctgctagcagagcctggccctggcactgagccttcctcctctaccctctgctcctaatggtgagggtcccctagcagggcccttctgtccaggacacatgggccgcctgtcctcaccccagcctactgacctctctcctgggctggcctcagtgcccttgattgtgccggagagaggaagcgctggacagtcaggccaagctgctgtccccagg

SEQ ID NO: 339584 - DNA, 765 bp, Homo sapiens
gttcctgtgtcttcccgttgagttgctcgctccacggcatggaggactaggaatcaggagtcagtggccgtatgctggaggctggagccgcgggagcgcggctcgcctcgctgcggttgttggcagcgacggagataggagtgcggctggagcgatgtgccaggtggtgccagtgccagctaatcacctccctgttggcagcaccgtgaacactgtgcacctgtcttcagatggcacttaaagcagagaagcctgctgtgtggctgtgggagtcatcagagaggtggcagtggaggtttgttatcgacccaatcattacatcgctacccaagagttggaaacttcctgtgttgcccacgctggtctcaaactcctggactcatgggatcctcccaccttggcctcccaaagcagtggtattacaggcatgagccattgcactgggctcctgtttagttttaattttaaaacacctcaagagtcagataattcagggaaagaccatgcaaggctgttactgaagaaagtgctacgagtctgttctagacatggcttgcctagcactgagcatccttcctcacttctaagtgagaattttccagatctgtgcattggggtcccccaagaaagaggctcagtcctgatgtactgtttcctgtatactgcatgctcaccccccaaaaccacatggttaatccagatccagcccctgctttcttagttatgaggcttctcatggcaaagcaataaaaagcaagttttcaa

SEQ ID NO: 339585 - DNA, 736 bp, Homo sapiens
gttcctgtgtcttcccgttgagttgctcgctccacggcatggaggactaggaatcaggagtcagtggccgtatgctggaggctggagccgcgggagcgcggctcgcctcgctgcggttgttggcagcgacggagataggagtgcggctggagcgatgtgccaggtggtgccagtgccagctaatcacctccctgttggcagcaccgtgaacactgtgcacctgtcttcagatggcacttaaagcagagaagcctgctgtgtggctgtgggagtcatcagagaggtggcagtggaggtttgttatcgacccaatcattacatcgctacccaagaggatccagatgctcagtgtcatcttcgaagatgccaggtcacattggcaaaggccgcaagaactgatatgaaaaaccagatgcaatgaaaaccgtaactgtacttgagacagaactgcccaaggtcaagctggggcattctgtgttgaagaggaagatgccttggcagaagatcacttcatcatgaccagggcatcagaagaaggggtcgcagaatttattcatgatccaataagtatgcaccacctgttctggaagtgagttagcataaaacataagttcagtaagaatacaagaatgagtgagtgaattaagaaatgaatggattgggagttaccattggccacacaccgcttagacagtagaatatctcagccaggtagaaagaatggatcatggtggcc

SEQ ID NO: 339586 - DNA, 847 bp, Homo sapiens
ttggggtctggattacgtgatactctcagatgtgccaggtggtgccagtgccagctaatcacctccctgttggcagcaccgtgaacactgtgcacctgtcttcagatggcacttaaagcagagaagcctgctgtgtggctgtgggagtcatcagagaggtggcagtggaggtttgttatcgacccaatcattacatcgctacccaagcgttagctctgttcaacgcccttgtggagtccaggacttagagagaggatctccaagcagaagcccccagcccacgtgagaacagggagacccttgtgcccttaactgttttccatagtactgcccagccttgtacactctggcccaaatgttcctcacctttggaagacacagaacttctttcaaaaccattgaaatatcgagatcatttccgcagaaagaaaatgtaatttaagaggatccagatgctcagtgtcatcttcgaagatgccaggtcacattggcaaaggccgcaagaactgatatgaaaaaccagatgcaatgaaaaccgtaactgtacttgagacagaactgcccaaggtcaagctggggcattctgtgttgaagaggaagatgccttggcagaagatcacttcatcatgaccagggcatcagaagaaggggtcgcagaatttattcatgatccaataagtatgcaccacctgttctggaagtgagttagcataaaacataagttcagtaagaatacaagaatgagtgagtgaattaagaaatgaatggattgggagttaccattggccacacaccgcttagacagtagaatatctcagccaggtagaaagaatggatcatggtggcc

SEQ ID NO: 339587 - DNA, 972 bp, Homo sapiens
gttcctgtgtcttcccgttgagttgctcgctccacggcatggaggactaggaatcaggagtcagtggccgtatgctggaggctggagccgcgggagcgcggctcgcctcgctgcggttgttggcagcgacggagataggagtgcggctggagcgatgtgccaggtggtgccagtgccagctaatcacctccctgttggcagcaccgtgaacactgtgcacctgtcttcagatggcacttaaagcagagaagcctgctgtgtggctgtgggagtcatcagagaggtggcagtggaggtttgttatcgacccaatcattacatcgctacccaagcgttagctctgttcaacgcccttgtggagtccaggacttagagagaggatctccaagcagaagcccccagcccacgtgagaacagggagacccttgtgcccttaactgttttccatagtactgcccagccttgtacactctggcccaaatgttcctcacctttggaagacacagaacttctttcaaaaccattgaaatatcgagatcatttccgcagaaagaaaatgtaatttaagaggatccagatgctcagtgtcatcttcgaagatgccaggtcacattggcaaaggccgcaagaactgatatgaaaaaccagatgcaatgaaaaccgtaactgtacttgagacagaactgcccaaggtcaagctggggcattctgtgttgaagaggaagatgccttggcagaagatcacttcatcatgaccagggcatcagaagaaggggtcgcagaatttattcatgatccaataagtatgcaccacctgttctggaagtgagttagcataaaacataagttcagtaagaatacaagaatgagtgagtgaattaagaaatgaatggattgggagttaccattggccacacaccgcttagacagtagaatatctcagccaggtagaaagaatggatcatggtggcc

SEQ ID NO: 339588 - DNA, 237 bp, Homo sapiens
attgtagtttttaaacacattgacttagattagatgtccaatccttttttgttctttttaaatgttgataattgtatttgaaggactttgttttctgttttaatgttggtagttagcagcctgttgacctaatataaacctcatgtgagagattccttgtttcttgtaggtccctaaaagatgttggtgttacacatggcaagcattcaataaataaacatctgttaaatgaacaag

SEQ ID NO: 339589 - DNA, 874 bp, Homo sapiens
ttgaaaaagaagggaatagtacagctattaaagctgtactgaagggaatagtacagctattaaagacaatcctcaggcttcacattagccagtggtcgacatccccagaccttcgagtctcactcaggacagctatcatgaagcccagcgggttgactggaatgtcacttcctttgctggaaaatcaaataaaaaacagggagtgtgttccactccagaacgtcatacaggctggacggaagggctcctgcattctggaggaatgttcaaagaacaaatgcaaaatcacagtggctggtacagggcaggggatggggcaagaggcagggccccttcaaaccatcggtccctggcagccacccaaaattgggcaaaaatgcacttgcagaatgagaagctgcgatcacctcagcttgaaagactctgtcctatttcaactggaatgacctccccctctccttggccaacactgaggcctttacagggaaaaaaacaaaaacaaaaacaccacaatgataatttttaaaagataaacaaggaaccttaggacaccagccaggacagagcttcccaagacagcacaggtcccttctcctccaggcagcctaccctgcttgccaggcctgcctgtctcccaccctggacaggagccccaggggcacgggtggtcaggtccacgaaccacaaagtcaaagcaagctgcatccagtccccgttctactgcctagctttatgtgaccctggacaatccccttagccacaccgagtccttacctctgaaacggtgataaaaattctcacctcctagagttactatgaagattaactgagatcatgcacacacagcaacgtagaatgaaactagcacatggta

SEQ ID NO: 339590 - DNA, 743 bp, Homo sapiens
catttcaaatcaatacttgaaagacataggataattcatactgaagagaaaccatataagtgtaatgagtgtggcaagacctttaggcagaagtcaatccttacacgccatcatcgacttcatactggagagaaaccttacaagtgtaatgagtgtggcaagacctttagtcacaagtcatcccttacatgccatcatagacttcatactggagagaaaccctacaaatgtaatgagtgtggcaagacctttagtcacaagtcatcccttacatgccatcgtagacttcatactggagagaaaccttacaaatgtgaagaatgtgacaaagcttacagtttcagatcaaattttgaaatacatcggaaaattcatactgaagacaatgcttacaagtgtaatgagtgtggaaagacctttagccggacatcatcccttacatgccatcgtagacgtcatactggagagcaaccttacaaatgtgaagaatgtgacaaagctttccgtttcaaatcaaaccttgaaagacataggagaattcatactggagagaaaccatacaagtgtaatgagtgtggcaagacctttagtcggaagtcatacctcacatgccatcatagacttcatactggagagaaagcttacaagtgtaatgagtgcggcaagacctttagttggaagtcatcccttacctgccatcgtagacttcattctggagagaaaccttacaagtgtaaggagtg

SEQ ID NO: 339591 - DNA, 335 bp, Homo sapiens
catggcaaccctgccttttgcaatactatcagcgccattcttccaaaaacacatgttcacttcatgtttctgagtcacattatgatcgttgcaatatttcatagtttttcattatcattatatcttttatgatgatctttgaggttactatcgtaagtgttttggagtgccaccaaccatacctatatgagacagtgaacgtaatcaataaatgttgtgtgtgttctgactgctacactgaccagctattccccatgtcttttcttctccttgggcctccctatttcctgagatacaacagtattacaattagttcaattaataactttttaatg

SEQ ID NO: 339592 - DNA, 491 bp, Homo sapiens
tgagtaaatgaatagtgcactataaataaccattaactacattacaaaaacaatgatgagcttgttaaaggcatttagatcttttcgctttttctcttttttaatctaatccttcacaaacaatgataatttatattaaattttgaccagaaaaatatataaattcaaacattaaatacatgcaagttgagcagctcaaattcgaaatccagattgctccaaaatccaaaactttttgagcactattaaggcattcaaaggatttggggatacttaactggtaagtaaaaagcaaatattccaagatccaaaaaattccaaaatcccaaacacttctgttcctaagcatttcagataagggatacttaccctataacaacataaacaactcaagcctaaactaatttgctccagctgaacacccctgaaatgagagagatgctcacagaacattggtcattcataacatatacatttaaggaaagttttga

SEQ ID NO: 339593 - DNA, 513 bp, Homo sapiens
ctaatttttgtatttttagtagagacgggattccaccatgttggccggcctgttcttggactcctgactcaggtgatccgcctgctttggcctcccaaagtgctgggattacaggtgtaagtcaccgcactcagccgatttaggcttttgaaaaagcaatacttgttgatttcttttagtgttagtttgccagttggtgtggaaaatgactgttgagtcaattttgaccacacatgatacttcacacatacagacaggaagtgttccaggtggctgaatacgtgaatgtcatatggcaagagagcaaacccgtgttccatagaagcatacctccaacagtaagcatttatatggcactggcttatagtcttccttttcattcactgtgctctcagtcaactcttctgtcaatttttttgagacagggtcttgctgtggtcacccaggctggagtgcagcggcacagatacttggcttactgcagtctcgacctcccaggctcaagcctcctgc

SEQ ID NO: 339594 - DNA, 799 bp, Homo sapiens
ctgcccagtctgcggtgctttgttctggcagcctgcactgactcacaaacccacttctgacctaggccctgactgggttcaagcatacacagcctggccagctcagccactgtccgcattcacagcctcctgcagcttccactgctcaggcatcctgatcctagccttcttagttggccattgctcaccagaccattttatatgggcaggaatgaggagacaaggaggccctcagggacacagttgcccctctgctgtcttaccctacctgtcttatcctctggaccatgcaaaatgtttatcttacgcagtcttttgttctttggtaaatgcatataacagacacatacttagtatccatgatgtcccagcagccccgcagctctgatcgtagtagaggtggtttaaagagaaatgcattaagtagagttgagtttgtttttcacaaatcaagacacatcccacttggggcaaagtcgtgacattcaggtgaacctgaaagttatagcttcttttatagccagttatccaagggctgaagccatcgagctgcctgccttctgagcacttgaaacaaaaaggattggaatgtttggtacaaaacccagcacttaaaacctatgaggctttcagctgtgactcttactgtctcgcctccatctgggaagttcattgatcttcaaaacctggcaggctcctcaggggagagaaggtttaagatggagcaggcagctcaaatccctattaggtccaagagccaagaggcgcaacgcacagctagttgggaacatatgaacac

SEQ ID NO: 339595 - DNA, 453 bp, Homo sapiens
atgcagtgagcagagttttcaaattgggaagtggtttttaatacttagaattctcgtttgccttcaattatgaaaatttttgtacagagctgctcaagaatgataatctggaaatttctttcagagagacagtgtggtgctgtgcccagagcaaggggttttggcagcggatagatccgggttcaaatactgggtccaccacctgctagttgtgggacttgaacaagttacttaatcttttggagcctcgggtttttcaccaatgacgtgagaaggataatggatcatagcacctgggagagggtggctattggccacatgagcttataaaaattgagcattgtgacttgtaatgtggtaaaatatacataacataaaatttaacatttgagtcacttttaagcatacaattcagtggcattcattgcaacgttttttaagatttccttattt

SEQ ID NO: 339596 - DNA, 552 bp, Homo sapiens
gtctagcttcctcctcgcctcctgccatgattgtaagtttcctgaggcctccccatccatgaggaactgctgttgtagcaggacgagccgcagacaaaactccttagacaccggattgaagaaggcagacttgcgtctcaaaagccgagctcaccgcgtgagcaattcccgtcccttttaagggcttacgactctaagggggtctgcgtgagagggtcgtgatcgattgagcaagccaggggtacctgactgggggctgcatgcaccgaattctatgaaagaaaaaaatcccattttcccagggagaaactgaaccattctgacctctggttatggctgtcatccaaacagtttatataacctgtctgggaaattgaagattgttcatatctaactctgcagttacaaaaggaccatgtctcatggaattatccacgctcagatcttccgcatggctcaaaaccatttttgggatatgagacagggtctcactatgttgctcaggctggtctcaaactcctggcctcaagcgatcctcccactttggactcc

SEQ ID NO: 339597 - DNA, 598 bp, Homo sapiens
ccacccacccagagtgctgggattacaggcgtgagccaccgtgcccggcaaaaaacatttttaaatacaaaaaaaggttgaaaaactcataggaggcattactgatttttctaggctgttgtagcaggacgagccgcagacaaaactccttagacaccggattgaagaaggcagacttgcgtctcaaaagccgagctcaccgcgtgagcaattcccgtcccttttaagggcttacgactctaagggggtctgcgtgagagggtcgtgatcgattgagcaagccaggggtacctgactgggggctgcatgcaccgaattctatgaaagaaaaaaatcccattttcccagggagaaactgaaccattctgacctctggttatggctgtcatccaaacagtttatataacctgtctgggaaattgaagattgttcatatctaactctgcagttacaaaaggaccatgtctcatggaattatccacgctcagatcttccgcatggctcaaaaccatttttgggatatgagacagggtctcactatgttgctcaggctggtctcaaactcctggcctcaagcgatcctcccactttggactcc

SEQ ID NO: 339598 - DNA, 429 bp, Homo sapiens
gtcgacccaaaccaggaggtatttgagtttccagacacggggcataagagtagagtcaatttgccaatcttgagcagggataaattgtcgtgcttgatgcataaggaaaggaggaggtttaagaaagccttgatggggtagtagagtggcattatagcccattgagaggtgattgttttgaggatggatttccaggctggaaaagaaatgagaggttctaaaaggtgggttaaagatttatatcctacatggaagtggtcatcaaaggaggagaggatagagtaagcttgagaggcagggagaaggagctttccatgatctaaaaaccagttgccttgagtgggaagtgactggtagtttaaggtttcagaaggagagtaataggagtgatagatgagaaggagaaatattggccactgggagcagata

SEQ ID NO: 339599 - DNA, 364 bp, Homo sapiens
ccatgttggctgggccagtctcgaactcctgacgtcaagtgatcttcccgcctcgactcctgatatcaagtgatcttcccgcctcggcctcccagagtgctgagattacagacgtgaacccatgcctggccaggaattttgttttttaggaaggctttctactaatggaattcctggccttgagaggatgttactttagaaggaaaggatttttttgttattaaaagagccacctaagctgaagattcccttgagaacaagtactgtccctagtttcccagtgctggaatatagaaaatggatggacaagtaaatcccactcagcacccatagtccaggcatggggacctcaacacacctgagc

SEQ ID NO: 339600 - DNA, 376 bp, Homo sapiens
ccatgttggctgggccagtctcgaactcctgacgtcaagtgatcttcccgcctcgactcctgatatcaagtgatcttcccgcctcggcctcccagagtgctgagattacagacgtgaacccatgcctggccaggaattttgttttttaggaaggctttctactaatggaattcctggccttgagaggatgttactttagaaggaaaggatttttttgttattaaaagctggacctaccatgaaagacttctgaatccaggaagagaaactgactgggcaacatgttattcagatggggtcttcttatgttgcccaggttggtctcaaattcctaggctcaagtgattccgcccacctctgcctcccaaagtgctgg

SEQ ID NO: 339601 - DNA, 1065 bp, Homo sapiens
  misc_feature (42)..(42): n is a, c, g, or t
  misc_feature (45)..(45): n is a, c, g, or t
agtaggaagattattaataataataaaagaaaaaaagaaagntanctggaacgactctcttattttccaccgctacagcgcacctctttaagagagaacattcacaatggaaaacagcggcaagggttagaagacttttaaaaggaggctgttagtgcagcagtaaaatttggccagatgctcacaaaatgtctcggataacagctggactcataatgtcctcatcatgaccggaggggacaaggaagctgaattcctagaccagtctatctattcgaacacttcatcaattgtatctgcaaaaatattaatcaagacacaaagttcaaaccagtagagctgctggcttattctgggcctacagtcccatccttgaaattttactttctttttgttgagctccttgaatttgaggaaggccaaatgtgagagaggatgatgaagaaagggtaaaagttgcttgtagctgggcatgggaagctccaatgccaccacagagaaaagtctctaccagctcaggagcttggaaagggccctggtggaggagaatttgcataaggaaatcaccagctctagtacacttgtagcatgtgacaggaaaaatttgtcattggctatttatgaattaaatcttaataaaatccctaggtcttccctaaccaagcacaaatgtcttaagaggttacctataattttgaacatcctttcaggacattttctgcatagttaatgtgggcagttgtgtctaggcacaggacagatttacttctatgtcaatatttaaggcactgtatatggcacagagaccccattattcagtgaaaatatggcctattcaaggagatgaaagtttagtgagaatcttaactaggaagacaacaaagttactctatcaaagaaataatttaaatgactttgaagagaaaataagatttttttttaaatggaaagtttattttccaacctacaagacagttaaatagttagcatatctcttaaaccctaaattttaatttagcactcagagtgatgtcactgatagtctctagctcttaataaatgcag

SEQ ID NO: 339602 - DNA, 967 bp, Homo sapiens
  misc_feature (42)..(42): n is a, c, g, or t
  misc_feature (45)..(45): n is a, c, g, or t
agtaggaagattattaataataataaaagaaaaaaagaaagntanctggaacgactctcttattttccaccgctacagcatgctcacaaaatgtctcggataacagctggactcataatgtcctcatcatgaccggaggggacaaggaagctgaattcctagaccagtctatctattcgaacacttcatcaattgtatctgcaaaaatattaatcaagacacaaagttcaaaccagtagagctgctggcttattctgggcctacagtcccatccttgaaattttactttctttttgttgagctccttgaatttgaggaaggccaaatgtgagagaggatgatgaagaaagggtaaaagttgcttgtagctgggcatgggaagctccaatgccaccacagagaaaagtctctaccagctcaggagcttggaaagggccctggtggaggagaatttgcataaggaaatcaccagctctagtacacttgtagcatgtgacaggaaaaatttgtcattggctatttatgaattaaatcttaataaaatccctaggtcttccctaaccaagcacaaatgtcttaagaggttacctataattttgaacatcctttcaggacattttctgcatagttaatgtgggcagttgtgtctaggcacaggacagatttacttctatgtcaatatttaaggcactgtatatggcacagagaccccattattcagtgaaaatatggcctattcaaggagatgaaagtttagtgagaatcttaactaggaagacaacaaagttactctatcaaagaaataatttaaatgactttgaagagaaaataagatttttttttaaatggaaagtttattttccaacctacaagacagttaaatagttagcatatctcttaaaccctaaattttaatttagcactcagagtgatgtcactgatagtctctagctcttaataaatgcag

SEQ ID NO: 339603 - DNA, 373 bp, Homo sapiens
cctaacccttatactctcctatcctcaataccgccttccacaactcattattctgttattgacctcaaagatgccttctttaccatccccttacatccctcttcccagcccctttttgcctttacttggactgaccctgacacccaccagtcccaacaactcacctggaccgtcctgccctaaggtttcagagacagcccacactactttagccaggccctctcccgtgacctgctttcttttcgtccatttgtttcccatctcattcaatatgtggatgaccttcttctttgcagcccctcttaccaatcctcccagcaagacactatcctgcttcttcaacacctctactccaaggggtacagagtatccc

SEQ ID NO: 339604 - DNA, 500 bp, Homo sapiens
ttgtccctcaggtggactgtgccaggtactgggcttggtggagattatgtaggctggattgtgcctccatgcctgcctccttgattggtaccttagccaagggctcagactgcatgacagctgatggctctgaagagtgagcaaggggctgagaacttggcagagcctttcagctaggaaatggcagagctggaattccaagccaggtctgctgattctggagccagttgtcataaaccactgtggaggggagaaagctgtatgcctgtcagaagcatccggtgtagcctcgaccatcctgaggcttgtctttggaagtggtcctgcgaagacaaggtggctgtccatcaacaccgcaagaggaatcccccagtgggtggagggagagtgggcttgatgaccctgaagtatcccctccctgattccgagaccctgtcttacatgtgaggccatctgtcaaaacttaatgtcttaaaatatgacattttccctgtacaatc

SEQ ID NO: 339605 - DNA, 142 bp, Homo sapiens
ctgtcacgaccctcggcacttcacctgagttctaggagccactttggcagtcctctttctgtgccaccaatgggagtgaggggtgagcctggcagagacacacatgccaccctgggctttgtgacaaggcctggactctaat

SEQ ID NO: 339606 - DNA, 589 bp, Homo sapiens
ccagaaaggtcttttaagtcaaatgtatttcagatccaagagagcaagaacaatggtatactaggtcatatggtcttttggccctgccatttaaatataatatctgtacaaggaagtaactgcaggagtagtctgtatattcctgttggttggctggtgggaaggtagctaaccttttgtttctttctttttcagtacactgctttaataaatggtaacagtgctttaataagtcccctggccatcatcttacttatgatctctagatgaagaccactgtgtgaaactggtatcctaggaggttggagtgagcatgtatgagtgagtgtgtgtgtgtgtgtgtgtgtgtgtgtgtgtgtgttgcttgatttataaaccactgaagcccgatgaagtactagggtgaaaatcacctacgtttccagaggaaaaaaatgtcaccatcaattccaagagggacttgtaaacctgaaactaacagccaatggtttaatttttttaaggtagattttttttttaacatttctaggcttactatattctatctggaaaaatataaatttatgggcaaaaagaaaagctgagagtc

SEQ ID NO: 339607 - DNA, 499 bp, Homo sapiens
ttagacacccagggactaaaaaaaaatcatatttttatttaagctcagagataacaatgttagccaatttaaaaaaagacaatcaaaaaacatttaactaattagctgtcacatactagagaacacatttactctttattttaagaggacacagtacttgtatatcctcttgtattctatctggagcaattactgaccattaacataaaataacaggtgccatagcttaatagagaggttgcaacacagtggtaatggcatttctctaggtaacctggtattttaattcagttatagttaaatttaacctaggcaacaaagtcaataacggctaatgaattcaatggaaaaaaattgtattaaatgtgttttttaaaaaacatcacatgactaaacggtaagatgacactgtctattgaaatcagtacacttggtataccttgtgaagggtatacaacgaaacacttggggatcttcccataggagtcactacactatg

SEQ ID NO: 339608 - DNA, 747 bp, Homo sapiens
gcacagtcaagaccacagacacccgtggaggctcccccaagacatctgcttctctgggactggggacctcgctcaggaccgtggggagttggctgaaggacttggggagcccagaagctgccaccgaaccaagaaccacctctgtgcagaaaagcaaccaccttgttctctattctgctgcccgagacaaccacatcctcctcctcctacacccaaaggctcccatggagagctcagatgtggagctggacctccagaggagcgtgcaggctgtgctccgggagctcagcacccaggcccctgccctgcagagcaaccaaggcatgtggaggtggtccctgcacaagaaggtcgagcgagatcccggtaagagcccagtgctggtccgcattcttctcagagaactggagaaggtgagttcctggacctcagggaggaagacggggatgaaaggaagagaggggccaattgggcaggggctcagtcctggcagcgctatatctcataagctttggttgcctgcatgatttttaccatatgcatctccctcctgtacttttacgtaagcagtattttctttacgtcgactctcattgttttacttgaataaacatctttcaaaaagaagcactataacgcgaccacaaatggaaaacccgcatcacttgtcagaaacagaaggcggaaagccaggacctccggcatgtcatcattcccttgctgcacactgtaatgtacgtgctcacc

SEQ ID NO: 339609 - DNA, 208 bp, Homo sapiens
tctggggctttgcagaacaggtctgtggagctaatggagctcataggagcttgacttggtcagggaggtcagggcggcttcgctgcggaagacttgtaggatggaaaggaattaaccaaggcaatagggaagagaaggtccagggcagagggaacaggttgtgccaaggccctggggcttgatgaaggccagagtggctggggtactg

SEQ ID NO: 339610 - DNA, 356 bp, Homo sapiens
tcaatccttcgtgcatgtgcgcatccactcaacatctcagtaatgaggacctactgtgtgccaggcactgtgctaagtgctggtgaggccctgctgtcatggggcctgcagtccaggactcaagttatcaccacacagatcaaagggaaaaccacgctgagttctggggctttgcagaacaggtctgtggagctaatggagctcataggagcttgacttggtcagggaggtcagggcggcttcgctgcggaagacttgtaggatggaaaggaattaaccaaggcaatagggaagagaaggtccagggcagaggaccaacgtcgacccggccgcgaatttagtagtagtagtcgacc

SEQ ID NO: 339611 - DNA, 596 bp, Homo sapiens
ttgaaaagacccctaaggaagctaccaaaacatcccagggggtctgaaataggaagccaaggcccacattgcagtggtaaaaatccaccaagcggtgactataggcaggtgggggagatgaagtgtttggaagatgttagaacctgctcattcaggagcagcagggcaagctgagctgagacacctgaaagtgagctactactgggacttgaaggtcccctgcgaaagtgcaaacacgctctggaaaaagcggggcctggggcctgcattcccaaacactaggatcctgtattaattttctacagccactataacaaattactacaaacttagtggcttaaaacaacacatataattacctcagtgctccttaggtcagaatgtgggttggctcagctggtttccctgctcctggttcatgaagctgaattcaaggtgacagcggactgggctcctatcaggaggttctggaaggatcctcttccaaacttattcatgttgctgaattcagttccctgcagctgtaggccggcggtccccatttctctgttggctgttagctaggggccaccgttagcaaccagtctctccctcca

SEQ ID NO: 339612 - DNA, 841 bp, Homo sapiens
  misc_feature (9)..(10): n is a, c, g, or t
  misc_feature (12)..(12): n is a, c, g, or t
tgcttccgnnanaaccttacggctaggtacgaggctgggtggtgcgagcgatgggcatctctcgggacaactggcacaagcgccgcaaaaccgggggcaagagaaagccctaccacaagaagcggaagtatgagttggggcgcccagctgccaacaccaagattggcccccgccgcatccacacagtccgtgtgcggggaggtaacaagaaataccgtgccctgaggttggacgtggggaatttctcctggggctcagagtgttgtactcgtaaaacaaggatcatcgatgttgtctacaatgcatctaataacgagctggttcgtaccaagaccctggtgaagaattgcatcgtgctcatcgacagcacaccgtaccgacagtggtacgagtcccactatgcgctgcccctgggccgcaagaagggagccaagctgactcctgaggaagaagagattttaaacaaaaaacgatctaaaaaaattcagaagaaatatgatgaaaggaaaaagaatgccaaaatcagcagtctcctggaggagcagttccagcagggcaagcttcttgcgtgcatcgcttcaaggccgggacagtgtggccgagcagatggctatgtgctagagggcaaagagttggagttctatcttaggaaaatcaaggcccgcaaaggcaaataaatccttgttttgtcttcacccatgtaataaaggtgtttatgttttgttcccacaaaaacaaaaaaaaccgggctcttttcggggggaagggttgaatgggcttggctgctgttctgaccttttgttaagggaatcccggcctagggcgtaatcgacgtccaaag

SEQ ID NO: 339613 - DNA, 728 bp, Homo sapiens
  misc_feature (9)..(10): n is a, c, g, or t
  misc_feature (12)..(12): n is a, c, g, or t
tgcttccgnnanaaccttacggctaggtacgaggctgggtggtgcgagcgatgggcatctctcgggacaactggcacaagcgccgcaaaaccgggggcaagagaaagccctaccacaagaagcggaagtatgagttggggcgcccagctgccaacaccaagattggcccccgccgcatccacacagtccgtgtgcggggaggtaacaagaaataccgtgccctgaggttggacgtggggaatttctcctggggctcagagtgttgtactcgtaaaacaaggatcatcgatgttgtctacaatgcatctaataacgagctggttcgtaccaagaccctggtgaagaattgcatcgtgctcatcgacagcacaccgtaccgacagtggtacgagtcccactatgcgctgcccctgggccgcaagaagggagccaagctgactcctgaggaagaagagattttaaacaaaaaacgatctaaaaaaattcagaagaaatatgatgaaaggaaaaagaatgccaaaatcagcagtctcctggaggagcagttccagcagggcaagcttcttgcgtgcatcgcttcaaggccgggacagtgtggccgagcagatggctatgtgctagagggcaaagagttggagttctatcttaggaaaatcaaggcccgcaaaggcaaataaatccttgtttgtcttcacccatgtaataaaggtgttattgtttgttcccac

SEQ ID NO: 339614 - DNA, 747 bp, Homo sapiens
  misc_feature (506)..(506): n is a, c, g, or t
  misc_feature (747)..(747): n is a, c, g, or t
ccgcgacttcaccatcggctaggtgcgaggctgggtttacgagcgatgggcatctctcgggacaactggcacaagcgccgcaaaaccgggggcaagagaaagccctaccacaagaagcggaagtatgagttggggcgcccagctgccaacaccaagattggcccccgccgcatccacacagtccgtgtgcggggaggtaacaagaaataccgtgccctgaggttggacgtggggaatttctcctggggctcagagtgttgtactcgtaaaacaaggatcatcgatgttgtctacaatgcatctaataacgagctggttcgtaccaagaccctggtgaagaattgcatcgtgctcatcgacagcacaccgtaccgacagtggtacgagtcccactatgcgctgcccctgggccgcaagaagggagccaagctgactcctgaggaagaagagattttaaacaaaaaacgatctaaaaaaaaaaaaaaaaaaaacaagaaaaaaaaagnaaaaataacaaacaacaaaataaaccccgcgcggcggccatctcaatgcaggcgcgcggccgccagaaacaacaaggtatcaatgaaccagaggcacgcatggggaacatagcacgtcctctcaacgacacccgaattttctggtcgtacacacggggggctacaacagagacagagggcagccccccaaaaggagaggaaccgcaaaacccacagaaaccaccgggtaccgctgttaaan

SEQ ID NO: 339615 - DNA, 796 bp, Homo sapiens
  misc_feature (756)..(756): n is a, c, g, or t
  misc_feature (766)..(767): n is a, c, g, or t
  misc_feature (770)..(770): n is a, c, g, or t
taaaaaaaaaacataggctagtggaggccgggtgttaatcggccgaggccgagcgatgggcatctctcgggacaactggcacaagcgccgcaaaaccgggggcaagagaaagccctaccacaagaagcggaagtatgagttggggcgcccagctgccaacaccaagattggcccccgccgcatccacacagtccgtgtgcggggaggtaacaagaaataccgtgccctgaggttggacgtggggaatttctcctggggctcagagtgttgtactcgtaaaacaaggatcatcgatgttgtctacaatgcatctaataacgagctggttcgtaccaagaccctggtgaagaattgcatcgtgctcatcgacagcacaccgtaccgacagtggtacgagtcccactatgcgctgcccctgggccgcaagaagggagccaagctgactcctgaggaagaagagattttaaacaaaaaacgatctaaaaaaattcagaagaaatatgatgaaaggaaaaagaatgccaaaatcagcagtctcctggaggagcagttccagcagggcaagcttcttgcgtgcatcgcttcaaggccgggacagtgtggccgagcagatggctatgtgctagagggcaaagagttggagttctatcttaggaaaatcaaggcccgcaaaggcaaataaatccttgttttgtcttcacccatgtaatacaggtgttatggtttgttccacaaaaaaaaagaaaaaaaaaactnggggaatatnnttnggggggggaaaacaagggttatggaa

SEQ ID NO: 339616 - DNA, 1219 bp, Homo sapiens
  misc_feature (598)..(598): n is a, c, g, or t
ggctggtaccggcccgagatgtagggatattggcccccgccgcatccacacagtccgtgtgcggggaggtaacaagaaataccgtgccctgaggttggacgtggggaatttctcctggggctcagagtgttgtactcgtaaaacaaggatcatcgatgttgtctacaatgcatctaataacgagctggttcgtaccaagaccctggtgaagaattgcatcgtgctcatcgacagcacaccgtaccgacagtggtacgagtcccactatgcgctgcccctgggccgcaagaagggagccaagctgactcctgaggaagaagagattttaaacaaaaaacgatctaaaaaaattcagaagaaatatgatgaaaggaaaaagaatgccaaaatcagcagtctcctggaggagcagttccagcagggcaagcttcttgcgtgcatcgcttcaaggccgggacagtgtggccgagcagatggctatgtgctagagggcaaagagttggagttctatcttaggaaaatcaaggcccgcaaaggcaaataaatccttgttttgtcttcacccatgtaataaaggtgtttattgttttgttcccanaaaaaaaaaaaaaaaaacaacaacaaaaaacaacacacacgttgcgtgcggcgcgcgcacctcggggcccctcggaaaagcgcttttctagaaaccacatccgcggtggggggcggcgggggcccacagagggcaaagggaacacacggggccacaacaggtgtgttcccactagggaaaagactccgggcgggcacatggaaccaaaagcggcgggagggagatctctctacacacacagaataaaaaaaaaaacgccccgcgggggggggcaacaccgagacgcgttgtcttgggaggacacccaactcccccacaaagagcgggagggatctctcgagaggggtgactatatagcggggggagcactatataatacaaaagaggggggagagttccccaaagaggcgggaagacgcgcaaaatatatctccgaaaaatatatgaggccccccgggcagttccggggggggtcaacacgatatgcaaaaacgcgagaacacacaacaaacgacaaaccacacagcaaaaaaacaaccaaacaaaaaagaaaaaaatcaaagaacataagaagcaccaaacaaaaaaaagaaacgagcagacagaataacaaactgaaag

SEQ ID NO: 339617 - DNA, 1934 bp, Homo sapiens
ttttaaaaaaataattgcgcccccccgccccgtgccttggagatagtaagaattggagcagagcactgggacttcaattcacgcatggaaagagatctttgttagttggaggaaggagaacttgcctgagcttcgggcctttgttttgtttttgtgagagggacgtgtctcctaaatgaatgtttgctccagcgttgcacctcaaataagtcacctaaatatccacgccctctttatccaccccctctttactcgtgtgactagaatagttttcatttttcttctcaagggaatggctaaacagctcctatctgggcgtttgatggactgtcattcaagaatgagtgaagttgaggtgcctataagcaactcagaaattgttgtggccacgcttgggggaaatagagccctacactcaggtgatgagaggagacctcagaggtgaccgatccagggccttgctccctgcgccaccccagctcgtacctccagtggaacttggctgggcttatcaagagctcctttcattcattgcaacttcatttgttagaaagcttctctgtgtatttagtaggcattgtctccaacatgtaccactggtctggcttttgttaggcccattaatagtgtacatgtgacagcctttcaagtataggtgctccccggcttacggtggggtcgcatcccagtaaacacatcgttaaacctgaagtcgaaccatccgaagtcggagaccatctgtatttgaaaaaagtccctttgcattgcttgtaagagttctggttttcaaggtgagaaatctgtttgtgtgtttgtttgatcattctgcccaaaggagatgtggctttgggtccttttccccactcatcttccacaatgaattactttgtccatattaccctaaagaagtgacatccaagttggaatgtgatcttccgtatgtcgcctcccaaaaccccactaccatagcttcatgcttgtgttgacacagccacaatcacaactcaggtgtcagttctgagaccttcccatgcctgtcgccactcagcaagtgttcttcatgtgccctggcagttcgcattgtaaggagcagccaggttgttatggactgttgctagttaccacagagtagtgaattatattaaggattaattacagcagacaatgtgcacagtatcatcgagtgcagcgttctaaaaatgattctacacttttactttgaaaaattcttttttttccagccagcgccgagcgatgggcatctctcgggacaactggcacaagcgccgcaaaaccgggggcaagagaaagccctaccacaagaagcggaagtatgagttggggcgcccagctgccaacaccaagattggcccccgccgcatccacacagtccgtgtgcggggaggtaacaagaaataccgtgccctgaggttggacgtggggaatttctcctggggctcagagtgttgtactcgtaaaacaaggatcatcgatgttgtctacaatgcatctaataacgagctggttcgtaccaagaccctggtgaagaattgcatcgtgctcatcgacagcacaccgtaccgacagtggtacgagtcccactatgcgctgcccctgggccgcaagaagggagccaagctgactcctgaggaagaagagattttaaacaaaaaacgatctaaaaaaattcagaagaaatatgatgaaaggaaaaagaatgccaaaatcagcagtctcctggaggagcagttccagcagggcaagcttcttgcgtgcatcgcttcaaggccgggacagtgtggccgagcagatggctatgtgctagagggcaaagagttggagttctatcttaggaaaatcaaggcccgcaaaggcaaataaatccttgtttgtcttcacccatgtaataaaggtgttcattgttttgttcccac

SEQ ID NO: 339618 - DNA, 883 bp, Homo sapiens
  misc_feature (860)..(860): n is a, c, g, or t
  misc_feature (878)..(878): n is a, c, g, or t
ctcctaggctcgtggccctaggcgcggcagctgacacgtaagtctcgtcgcccgacgttgtttcggcgctcagaaacaacgtaaagtaaaggggcggggcagcgttttacaaaccgaaccgtgaatctttgcggtttctctttccagccagcgccgagcgatgggcatctctcgggacaactggcacaagcgccgcaaaaccgggggcaagagaaagccctaccacaagaagcggaagtatgagttggggcgcccagctgccaacaccaagattggcccccgccgcatccacacagtccgtgtgcggggaggtaacaagaaataccgtgccctgaggttggacgtggggaatttctcctggggctcagagtgttgtactcgtaaaacaaggatcatcgatgttgtctacaatgcatctaataacgagctggttcgtaccaagaccctggtgaagaattgcatcgtgctcatcgacagcacaccgtaccgacagtggtacgagtcccactatgcgctgcccctgggccgcaagaagggagccaagctgactcctgaggaagaagagattttaaacaaaaaacgatctaaaaaaattcagaagaaatatgatgaaaggaaaaagaatgccaaaatcagcagtctcctggaggagcagttccagcagggcaagcttcttgcgtgcatcgcttcaaggccgggacagtgtggccgagcagatggctatgtgctagagggcaaagagttggagttctatcttaggaaaatcaaggcccgcaaaggcaaataaatccttgtttggttcaccatggtatagggggttattggtttttgtccccccatatattttgggggtgggtgtntccccctttttttttttncgctc

SEQ ID NO: 339619 - DNA, 1172 bp, Homo sapiens
  misc_feature (22)..(22): n is a, c, g, or t
cgcggcccgcgcgaactacggntgcgagaagagacagaagggtaaaacaaggatcatcgatgttgtctacaatgcatctaataacgagctggttcgtaccaagaccctggtgaagaattgcatcgtgctcatcgacagcacaccgtaccgacagtggtacgagtcccactatgcgctgcccctgggccgcaagaagggagccaagctgactcctgaggaagaagagattttaaacaaaaaacgatctaaaaaaattcagaagaaatatgatgaaaggaaaaagaatgccaaaatcagcagtctcctggaggagcagttccagcagggcaagcttcttgcgtgcatcgcttcaaggccgggacagtgtggccgagcagatggctatgtgctagagggcaaagagttggagttctatcttaggaaaatcaaggcccgcaaaggcaaataaatccttgttttaaaggtggtttatgctttgcttcccacaaaaaaaaaaaaaaaaaaaacaaaaaaaaaacgtgtgtgtctgcggccgcgcctcatgcggcgccccttggcgaagaaaagcttgtcttaaaagaccaattcggttgtgggggcgccgcgggcccagaatagaggtataaggggaaacagtgggcccacaagcgcgggtttcccatagagaaaactcgcgggcaccgagcacctgagggcggggggatttcccccaccaaatttaaaaaacgcgcccgggggggaaagacgaggagaggcggtcagtgaggacaaccacgccaaagagggagaggcttcggaaggggacataacggggggctcataaccacaaccggggaggccgacaggcagagcaggagaatcaaaatataaacgcccccgaccggggagaaaagaaacaacaaaagagaagaacgaaacagcgaagcatataagcacaagcgcgacaaacaaaacgctaaaaaacacacagaaagacaagaactaaggaacaaacacaaaaagcaagaaaaaagtccaaaacgaaaaaagtagaacagaaaaaacacaaaagagacgaacagacgatgacacaaagagagaccgacacaacgaggatataatagacaacaagtcgtaaaattaaacacagaacaaaaacacaacacaaacaacaaaacaaagaatacagagga

SEQ ID NO: 339620 - DNA, 936 bp, Homo sapiens
cccaggtagaccacgtcgggttatcaagacagcctgaccaacacggagaaacctgtctttactaaaaacacaaaattagccaggcatggtggtgcacgcctgtaatcccagcactttaggaagctgaggcagcgaggatctcttgagcccaagagttcacgaccaccccggaacaccaggtagacctaacaagattggcccccgccgcatccacacagtccgtgtgcggggaggtaacaagaaataccgtgccctgaggttggagtggggaatttctcctggggctcagagtgttgtactcggttgtactcgtaaaacaaggatcatcgatgttgtctacaatgcatctaataacgagctggttcgtaccaagaccctggtgaagaattgcatcgtgctcatcgacagcacaccgtaccgacagtggtacgagtcccactatgcgctgcccctgggccgcaagaagggagccaagctgactcctgaggaagaagagattttaaacaaaaaacgatctaaaaaaattcagaagaaatatgatgaaaggaaaaagaatgccaaaatcagcagtctcctggaggagcagttccagcagggcaagcttcttgcgtgcatcgcttcaaggccgggacagtgtggccgagcagatggctatgtgctagagggcaaagagttggagttctatcttaggaaaatcaaggcccgcaaaggcaaataaatccttgtttaaaaaaaacacaaaaatacaacaaacaacaaacaacatccgcggggctctatatgtggggggggggcgaaacaagggggttactgcacaatgcgccctggttcaaatacgtgtttctcggcgacccacgttcttggtacaaagggggacaaattggggggcacacttaggggacgcatcataattctcaaaggccgggttcacctgct

SEQ ID NO: 339621 - DNA, 968 bp, Homo sapiens
  misc_feature (842)..(842): n is a, c, g, or t
ctcctaggctcgtggccctaggcgcggcagctgacacgtaagtctcgtcgcccgacgttgtttcggcgctcagaaacaacgtaaagtaaaggggcggggcagcgttttacaaaccgaaccgtgaatctttgcggtttctctttccagccagcgccgagcgatgggcatctctcgggacaactggcacaagcgccgcaaaaccgggggcaagagaaagccctaccacaagaagcggaagtatgagttggggcgcccagctgccaacaccaagattggcccccgccgcatccacacagtccgtgtgcggggaggtaacaagaaataccgtgccctgaggttggacgtggggaatttctcctggggctcagagtgttgtactcgtaaaacaaggatcatcgatgttgtctacaatgcatctaataacgagctggttcgtaccaagaccctggtgaagaattgcatcgtgctcatcgacagcacaccgtaccgacagtggtacgagtcccactatgcgctgcccctgggccgcaagaagggagccaagctgactcctgaggaagaagagattttaaacaaaaaacgatctaaaaaaattcagaagaaatatgatgaaaggaaaaagaatgccaaaatcagcagtctcctggaggagcagttccagcagggcaagcttcttgcgtgcatcgcttcaaggccgggacagtgtggccgagcagatggctatgtgctagagggcaaagagttggagttctatcttaggaaaatcaaggcccgcaaaggcaaataaatccttgttttgtcttcacccatgtaataaaggtgttatgttgtcccaaaaaaanaaaaaaaatttgggcgccgccaaagttaacatgtttgggccgcccgaaggaacgcacgccagaacgccaagcggtccccaaaccggcgcggcaacccggtggttgttcacgccacccccctcccgg

SEQ ID NO: 339622 - DNA, 1092 bp, Homo sapiens
  misc_feature (9)..(10): n is a, c, g, or t
  misc_feature (12)..(12): n is a, c, g, or t
tgcttccgnnanaaccttacggctaggtacgaggctgggtggtgcgagcgatgggcatctctcgggacaactggcacaagcgccgcaaaaccgggggcaagagaaagccctaccacaagaagcggaagtatgagttggggcgcccagctgccaacaccaagattggcccccgccgcatccacacagtccgtgtgcggggaggtaacaagaaataccgtgccctgaggttggacgtggggaatttctcctggggctcagagtgttgtactcgtaaaacaaggatcatcgatgttgtctacaatgcatctaataacgagctggttcgtaccaagaccctggtgaagaattgcatcgtgctcatcgacagcacaccgtaccgacagtggtacgagtcccactatgcgctgcccctgggccgcaagaagggagccaagctgactcctgaggaagaagagattttaaacaaaaaacgatctaaaaaaattcagaagaaatatgatgaaaggaaaaagaatgccaaaatcagcagtctcctggaggagcagttccagcagggcaagcttcttgcgtgcatcgcttcaaggccgggacagtgtggccgagcagatggctatgtgctagagggcaaagagttggagttctatcttaggaaaatcaaggcccgcaaaggcaaataaatccttgttttgtcttcacccatgtaataaaggtgtttattgttttgttcccacatttatgttgcctgaaaaaaaaaaaaaaaaaaaaaaaaaaaaaaaaaaaaaaaaaaaaaaaaaaaaaaaaaaaaaaaaacaaaaaaaaaaaaaaaaaacgggggggcggccagaggagcacaaaagagaacaacaacacatagggagggggagggggagcacacaagagaaagagaaaaaggggcaaacagaggacacacggacaccccggggacaaaaaaagggggggaagaacacaaaaaaaaacaccccggaaaaaaaaagagagaaaaaaaacatccaaaaagagaaaagagaaaaaaaggggaaaaaaaaaaagagaaacaagagggggcaagaaaaaaaaacccaatgaggtgac

SEQ ID NO: 339623 - DNA, 780 bp, Homo sapiens
  misc_feature (9)..(10): n is a, c, g, or t
  misc_feature (12)..(12): n is a, c, g, or t
  misc_feature (742)..(742): n is a, c, g, or t
tgcttccgnnanaaccttacggctaggtacgaggctgggtggtgcgagcgatgggcatctctcgggacaactggcacaagcgccgcaaaaccgggggcaagagaaagccctaccacaagaagcggaagtatgagttggggcgcccagctgccaacaccaagattggcccccgccgcatccacacagtccgtgtgcggggaggtaacaagaaataccgtgccctgaggttggacgtggggaatttctcctggggctcagagtgttgtactcgtaaaacaaggatcatcgatgttgtctacaatgcatctaataacgagctggttcgtaccaagaccctggtgaagaattgcatcgtgctcatcgacagcacaccgtaccgacagtggtacgagtcccactatgcgctgcccctgggccgcaagaagggagccaagctgactcctgaggaagaagagattttaaacaaaaaacgatctaaaaaaattcagaagaaatatgatgaaaggaaaaagaatgccaaaatcagcagtctcctggaggagcagttccagcagggcaagcttcttgcgtgcatcgcttcaaggccgggacagtgtggccgagcagatggctatgtgctagagggcaaagagttggagttctatcttaggaaaatcaaggcccgcaaaggcaaataaatccttgttttgtcttcacccatgtaataaaggtgtttattgttttgttcccacaaaaagtcgancggccgcgaatttagtagtagtagtagtatgcggccgc

SEQ ID NO: 339624 - DNA, 1142 bp, Homo sapiens
  misc_feature (9)..(10): n is a, c, g, or t
  misc_feature (12)..(12): n is a, c, g, or t
tgcttccgnnanaaccttacggctaggtacgaggctgggtggtgcgagcgatgggcatctctcgggacaactggcacaagcgccgcaaaaccgggggcaagagaaagccctaccacaagaagcggaagtatgagttggggcgcccagctgccaacaccaagattggcccccgccgcatccacacagtccgtgtgcggggaggtaacaagaaataccgtgccctgaggttggacgtggggaatttctcctggggctcagagtgttgtactcgtaaaacaaggatcatcgatgttgtctacaatgcatctaataacgagctggttcgtaccaagaccctggtgaagaattgcatcgtgctcatcgacagcacaccgtaccgacagtggtacgagtcccactatgcgctgcccctgggccgcaagaagggagccaagctgactcctgaggaagaagagattttaaacaaaaaacgatctaaaaaaattcagaagaaatatgatgaaaggaaaaagaatgccaaaatcagcagtctcctggaggagcagttccagcagggcaagcttcttgcgtgcatcgcttcaaggccgggacagtgtggccgagcagatggctatgtgctagagggcaaagagttggagttctatcttaggaaaatcaaggcccgcaaaggcaaataaatccttgttttgtcttcacccatgtaataaaggtgtttattgttttgttcccatattgttttgttcccacatttatgttgcctgaatatatgactgttttctctgctttatttccttgccctgcaaaactgatctgggtgggtggctgcaaccccttgccttaacctctgcctcctactgtcctgagccaggctcaccacactgtaaagtccctgttctcaactccatgtccctgaaggccagatttattatgtgggctatgtctatagtgggaacatttctcaccacattttggtggggatagggatgtggcagaggctatgagggggtatcccaaccttggggttcagtaatattgtgctggctgagtcatgattagaatctcaggctatattgcttataaaaaattttaaggatcttgtacccattgtaagattaacagtgatttctgccttgaaaagtctc

SEQ ID NO: 339625 - DNA, 1080 bp, Homo sapiens
  misc_feature (9)..(10): n is a, c, g, or t
  misc_feature (12)..(12): n is a, c, g, or t
tgcttccgnnanaaccttacggctaggtacgaggctgggtggtgcgagcgatgggcatctctcgggacaactggcacaagcgccgcaaaaccgggggcaagagaaagccctaccacaagaagcggaagtatgagttggggcgcccagctgccaacaccaagattggcccccgccgcatccacacagtccgtgtgcggggaggtaacaagaaataccgtgccctgaggttggacgtggggaatttctcctggggctcagagtgttgtactcgtaaaacaaggatcatcgatgttgtctacaatgcatctaataacgagctggttcgtaccaagaccctggtgaagaattgcatcgtgctcatcgacagcacaccgtaccgacagtggtacgagtcccactatgcgctgcccctgggccgcaagaagggagccaagctgactcctgaggaagaagagattttaaacaaaaaacgatctaaaaaaattcagaagaaatatgatgaaaggaaaaagaatgccaaaatcagcagtctcctggaggagcagttccagcagggcaagcttcttgcgtgcatcgcttcaaggccgggacagtgtggccgagcagatggctatgtgctagagggcaaagagttggagttctatcttaggaaaatcaaggcccgcaaaggcaaataaatccttgttttgtcttcacccatgtaataaaggtgtttattgttttgttcccaaaaaaaaaaaaaaaaaaaaaaaaaaaaaaaaaaaaaaaaaaaaaaaaaaaaaaaaaaaagtgtgtgtgggggcgcggcgccgggcgccccgggagaaaggttttttaaccccctctccggggggggggcgggggcgcccgagtgggtctacgtggaacactgtgggccatagcggtgtccagagaaaaccccgcgcaataggacagcggcggtggttcctcaccaacaaaaaaagccgcgggggcgacacgcgcggctcgtgaacaaaacccagggggcgctccggaggcaacacggcgcccatcccacaggggccccaggagcgcgaaataaagtggcgcggcggggag

SEQ ID NO: 339626 - DNA, 1054 bp, Homo sapiens
  misc_feature (9)..(10): n is a, c, g, or t
  misc_feature (12)..(12): n is a, c, g, or t
  misc_feature (842)..(842): n is a, c, g, or t
  misc_feature (851)..(851): n is a, c, g, or t
tgcttccgnnanaaccttacggctaggtacgaggctgggtggtgcgagcgatgggcatctctcgggacaactggcacaagcgccgcaaaaccgggggcaagagaaagccctaccacaagaagcggaagtatgagttggggcgcccagctgccaacaccaagattggcccccgccgcatccacacagtccgtgtgcggggaggtaacaagaaataccgtgccctgaggttggacgtggggaatttctcctggggctcagagtgttgtactcgtaaaacaaggatcatcgatgttgtctacaatgcatctaataacgagctggttcgtaccaagaccctggtgaagaattgcatcgtgctcatcgacagcacaccgtaccgacagtggtacgagtcccactatgcgctgcccctgggccgcaagaagggagccaagctgactcctgaggaagaagagattttaaacaaaaaacgatctaaaaaaattcagaagaaatatgatgaaaggaaaaagaatgccaaaatcagcagtctcctggaggagcagttccagcagggcaagcttcttgcgtgcatcgcttcaaggccgggacagtgtggccgagcagatggctatgtgctagagggcaaagagttggagttctatcttaggaaaatcaaggcccgcaaaggcaaataaatccttgttttgtcttcacccatgtaataaaggtgtttattgttttgttcccaaaaaaaaaaaaaaaaaaaaaaaaaaaaattgttgggggcggctgtgggccctgggaaaaagtttttaaaaaccattgcgctgggggggcgcgggggcccagaagagggtagngtagaacangtgggccaaacggtggtgtccaaagaggagagaacccggggccaagaacaaaggggcgggggattctctcccccaataaaaaaacggcccgggggggaaaaccccggccgtcgtcgtgagaccaatccccgaatgaggagccggagagggccaaagcgggatctctacaccaagagaccacacggaccccgaattaaatcacg

SEQ ID NO: 339627 - DNA, 1080 bp, Homo sapiens
  misc_feature (9)..(10): n is a, c, g, or t
  misc_feature (12)..(12): n is a, c, g, or t
tgcttccgnnanaaccttacggctaggtacgaggctgggtggtgcgagcgatgggcatctctcgggacaactggcacaagcgccgcaaaaccgggggcaagagaaagccctaccacaagaagcggaagtatgagttggggcgcccagctgccaacaccaagattggcccccgccgcatccacacagtccgtgtgcggggaggtaacaagaaataccgtgccctgaggttggacgtggggaatttctcctggggctcagagtgttgtactcgtaaaacaaggatcatcgatgttgtctacaatgcatctaataacgagctggttcgtaccaagaccctggtgaagaattgcatcgtgctcatcgacagcacaccgtaccgacagtggtacgagtcccactatgcgctgcccctgggccgcaagaagggagccaagctgactcctgaggaagaagagattttaaacaaaaaacgatctaaaaaaattcagaagaaatatgatgaaaggaaaaagaatgccaaaatcagcagtctcctggaggagcagttccagcagggcaagcttcttgcgtgcatcgcttcaaggccgggacagtgtggccgagcagatggctatgtgctagagggcaaagagttggagttctatcttaggaaaatcaaggcccgcaaaggcaaataaatccttgttttgtcttcacccatgtaataaaggtgtttattgttttgttcccacaaaaaaagaaaaaaaaaaaaaaaaaaaaaaaaaaaaaaaaacaaacaaagaacaaaaaaaaaaaaaataaaaaaaaaaaaaaaaaagaaaaaaaaagaaaaaaaaaaaacaagaaggggggggggggggggtgttgccccggggagatggggtgggaaacaagattctcacgatgagggagatggtgttgacacacccccgtcgtgtttttaaaacaaacacaaagataaacaagatgtagggtagaacaccctcgcacgagtggagtgagcgtagttgtttttagtcaactcgtgtcggaaaaagggagaatcaaaatacgtgtgtgagcggcgtttggcagtaaata

SEQ ID NO: 339628 - DNA, 1117 bp, Homo sapiens
  misc_feature (9)..(10): n is a, c, g, or t
  misc_feature (12)..(12): n is a, c, g, or t
tgcttccgnnanaaccttacggctaggtacgaggctgggtggtgcgagcgatgggcatctctcgggacaactggcacaagcgccgcaaaaccgggggcaagagaaagccctaccacaagaagcggaagtatgagttggggcgcccagctgccaacaccaagattggcccccgccgcatccacacagtccgtgtgcggggaggtaacaagaaataccgtgccctgaggttggacgtggggaatttctcctggggctcagagtgttgtactcgtaaaacaaggatcatcgatgttgtctacaatgcatctaataacgagctggttcgtaccaagaccctggtgaagaattgcatcgtgctcatcgacagcacaccgtaccgacagtggtacgagtcccactatgcgctgcccctgggccgcaagaagggagccaagctgactcctgaggaagaagagattttaaacaaaaaacgatctaaaaaaattcagaagaaatatgatgaaaggaaaaagaatgccaaaatcagcagtctcctggaggagcagttccagcagggcaagcttcttgcgtgcatcgcttcaaggccgggacagtgtggccgagcagatggctatgtgctagagggcaaagagttggagttctatcttaggaaaatcaaggcccgcaaaggcaaataaatccttgttttgtcttcacccatgtaataaaggtgtttattgttttgttcccacaaaaaaagaaaaaaaaaaaaaaaaaaaaaaaaaaaaaaaaacaaacaaagaacaaaaaaaaaaaaaataaaaaaaaaaaacgggggggggcgcgcgcgcggcgaccccaaaaaagccttaacacaaaaaccaagagagagaggaggaggaggcgggcccacaggggagagaagagcagacacagcggggaccacagggcgtccccaagagacaccgcggggcggaaaaaaaagggggggaggacccaccaaaaaaaaaacggcgcgggggagacacagaggctcgaaagaaacaaaaacaaaagaggaacaaagaggagccttaaagggagtaaacaagagaaggagcaaaggaggcacaaaacaatacccccaagagggggggga

SEQ ID NO: 339629 - DNA, 1032 bp, Homo sapiens
  misc_feature (9)..(10): n is a, c, g, or t
  misc_feature (12)..(12): n is a, c, g, or t
  misc_feature (815)..(815): n is a, c, g, or t
tgcttccgnnanaaccttacggctaggtacgaggctgggtggtgcgagcgatgggcatctctcgggacaactggcacaagcgccgcaaaaccgggggcaagagaaagccctaccacaagaagcggaagtatgagttggggcgcccagctgccaacaccaagattggcccccgccgcatccacacagtccgtgtgcggggaggtaacaagaaataccgtgccctgaggttggacgtggggaatttctcctggggctcagagtgttgtactcgtaaaacaaggatcatcgatgttgtctacaatgcatctaataacgagctggttcgtaccaagaccctggtgaagaattgcatcgtgctcatcgacagcacaccgtaccgacagtggtacgagtcccactatgcgctgcccctgggccgcaagaagggagccaagctgactcctgaggaagaagagattttaaacaaaaaacgatctaaaaaaattcagaagaaatatgatgaaaggaaaaagaatgccaaaatcagcagtctcctggaggagcagttccagcagggcaagcttcttgcgtgcatcgcttcaaggccgggacagtgtggccgagcagatggctatgtgctagagggcaaagagttggagttctatcttaggaaaatcaaggcccgcaaaggcaaataaatccttgttttgtcttcacccatgtaataaaggtgtttattgttttgttcccaaaaaaaaaaaaaaaaaaaaaaaaaaaaaaaaaaaaaaaaaaaaaaaaaaaaaaaaaaaaaaaaaaaaaaaaaaaaaaaccttgtnggccgcttgggccacagcgattttaaattggagcaagtttttgcaggcggccgaatttcgggctaatttggccaattcgccctatagggggccttataacattcaattggccgtcgtttaacacggttgtaactgggaaaaccctggggatacccatctaattcgctttgaacaaatccccctttcaccagctgttgaactgaattgtgagggttat

SEQ ID NO: 339630 - DNA, 1384 bp, Homo sapiens
  misc_feature (9)..(10): n is a, c, g, or t
  misc_feature (12)..(12): n is a, c, g, or t
tgcttccgnnanaaccttacggctaggtacgaggctgggtggtgcgagcgatgggcatctctcgggacaactggcacaagcgccgcaaaaccgggggcaagagaaagccctaccacaagaagcggaagtatgagttggggcgcccagctgccaacaccaagattggcccccgccgcatccacacagtccgtgtgcggggaggtaacaagaaataccgtgccctgaggttggacgtggggaatttctcctggggctcagagtgttgtactcgtaaaacaaggatcatcgatgttgtctacaatgcatctaataacgagctggttcgtaccaagaccctggtgaagaattgcatcgtgctcatcgacagcacaccgtaccgacagtggtacgagtcccactatgcgctgcccctgggccgcaagaagggagccaagctgactcctgaggaagaagagattttaaacaaaaaacgatctaaaaaaattcagaagaaatatgatgaaaggaaaaagaatgccaaaatcagcagtctcctggaggagcagttccagcagggcaagcttcttgcgtgcatcgcttcaaggccgggacagtgtggccgagcagatggctatgtgctagagggcaaagagttggagttctatcttaggaaaatcaaggcccgcaaaggcaaataaatccttgttttgtcttcacccatgtaataaaggtgtttattgttttgttcccaaaaaaacaaaaaaaaaaaaaaaaaaaactttttgcggccgcgccctgggcccctccgagagaaggccttttctgtagaccccccttctgcgttgtgggcgcgccgcggggcccccagttggggcttacggtgtgcacccttggccccctatacgcgtgtttcccccgtgggggggagaaccccgctgcgccccagtgaaccctcagcggcgcgtggggcattctctcgccccccatatttacaaaaaacaccgcccggcgggggggcaaaacacccgagagcggcgttttctctgcggaacaccaacaatctctcccagagaagtggagcactttctctgagagagcggcccacatataacacggggggaatctctatctatcaccacacgagagggagctctccacacaagcgcgaagagcgccctcaagcatattatcctcccaaatatttttagccgccgcccccgcggctctcggtgggggagtacacacaacaactgccaccaatgaatcacgtccgccaaccaccgcctcccaccaagcagccctaagccgcacaacgcgaccaaaccacaccaccagaccacccaccagccccacacccaacacgaacagcagccgcaccacgcactacagcacaacccaccacact

SEQ ID NO: 339631 - DNA, 1352 bp, Homo sapiens
  misc_feature (9)..(10): n is a, c, g, or t
  misc_feature (12)..(12): n is a, c, g, or t
  misc_feature (731)..(731): n is a, c, g, or t
tgcttccgnnanaaccttacggctaggtacgaggctgggtggtgcgagcgatgggcatctctcgggacaactggcacaagcgccgcaaaaccgggggcaagagaaagccctaccacaagaagcggaagtatgagttggggcgcccagctgccaacaccaagattggcccccgccgcatccacacagtccgtgtgcggggaggtaacaagaaataccgtgccctgaggttggacgtggggaatttctcctggggctcagagtgttgtactcgtaaaacaaggatcatcgatgttgtctacaatgcatctaataacgagctggttcgtaccaagaccctggtgaagaattgcatcgtgctcatcgacagcacaccgtaccgacagtggtacgagtcccactatgcgctgcccctgggccgcaagaagggagccaagctgactcctgaggaagaagagattttaaacaaaaaacgatctaaaaaaattcagaagaaatatgatgaaaggaaaaagaatgccaaaatcagcagtctcctggaggagcagttccagcagggcaagcttcttgcgtgcatcgcttcaaggccgggacagtgtggccgagcagatggctatgtgctagagggcaaagagttggagttctatcttaggaaaatcaaggcccgcaaaggcaaataaatccttgttttgtcttcacccatgtaataaaggtgtttattgttttgttcccanaaaaaaaaaaaaaaaaacaacaacaaaaaacaacacacacgttgcgtgcggcgcgcgcacctcggggcccctcggaaaagcgcttttctagaaaccacatccgcggtggggggcggcgggggcccacagagggcaaagggaacacacggggccacaacaggtgtgttcccactagggaaaagactccgggcgggcacatggaaccaaaagcggcgggagggagatctctctacacacacagaataaaaaaaaaaacgccccgcgggggggggcaacaccgagacgcgttgtcttgggaggacacccaactcccccacaaagagcgggagggatctctcgagaggggtgactatatagcggggggagcactatataatacaaaagaggggggagagttccccaaagaggcgggaagacgcgcaaaatatatctccgaaaaatatatgaggccccccgggcagttccggggggggtcaacacgatatgcaaaaacgcgagaacacacaacaaacgacaaaccacacagcaaaaaaacaaccaaacaaaaaagaaaaaaatcaaagaacataagaagcaccaaacaaaaaaaagaaacgagcagacagaataacaaactgaaag

SEQ ID NO: 339632 - DNA, 898 bp, Homo sapiens
  misc_feature (9)..(10): n is a, c, g, or t
  misc_feature (12)..(12): n is a, c, g, or t
tgcttccgnnanaaccttacggctaggtacgaggctgggtggtgcgagcgatgggcatctctcgggacaactggcacaagcgccgcaaaaccgggggcaagagaaagccctaccacaagaagcggaagtatgagttggggcgcccagctgccaacaccaagattggcccccgccgcatccacacagtccgtgtgcggggaggtaacaagaaataccgtgccctgaggttggacgtggggaatttctcctggggctcagagtgttgtactcgtaaaacaaggatcatcgatgttgtctacaatgcatctaataacgagctggttcgtaccaagaccctggtgaagaattgcatcgtgctcatcgacagcacaccgtaccgacagtggtacgagtcccactatgcgctgcccctgggccgcaagaagggagccaagctgactcctgaggaagaagagattttaaacaaaaaacgatctaaaaaaattcagaagaaatatgatgaaaggaaaaagaatgccaaaatcagcagtctcctggaggagcagttccagcagggcaagcttcttgcgtgcatcgcttcaaggccgggacagtgtggccgagcagatggctatgtgctagagggcaaagagttggagttctatcttaggaaaatcaaggcccgcaaaggcaaataaatccttgttttgtcttcacccatgtaatacaggtgttatggtttgttccacaaaaaaaaaaggggcggtaaagtatctgggggcagttaaggtacagtttggaaagggccatggggataagagagggggttaaagtgcggaaagtctggtttggaggacttttggggctatggcacactaggtaagcggataatgtggtagttggggatgggataaaaagc

SEQ ID NO: 339633 - DNA, 1203 bp, Homo sapiens
  misc_feature (9)..(10): n is a, c, g, or t
  misc_feature (12)..(12): n is a, c, g, or t
tgcttccgnnanaaccttacggctaggtacgaggctgggtggtgcgagcgatgggcatctctcgggacaactggcacaagcgccgcaaaaccgggggcaagagaaagccctaccacaagaagcggaagtatgagttggggcgcccagctgccaacaccaagattggcccccgccgcatccacacagtccgtgtgcggggaggtaacaagaaataccgtgccctgaggttggacgtggggaatttctcctggggctcagagtgttgtactcgtaaaacaaggatcatcgatgttgtctacaatgcatctaataacgagctggttcgtaccaagaccctggtgaagaattgcatcgtgctcatcgacagcacaccgtaccgacagtggtacgagtcccactatgcgctgcccctgggccgcaagaagggagccaagctgactcctgaggaagaagagattttaaacaaaaaacgatctaaaaaaattcagaagaaatatgatgaaaggaaaaagaatgccaaaatcagcagtctcctggaggagcagttccagcagggcaagcttcttgcgtgcatcgcttcaaggccgggacagtgtggccgagcagatggctatgtgctagagggcaaagagttggagttctatcttaggaaaatcaaggcccgcaaaggcaaataaatccttgttttggtcttcacccatgtaaaacaaacaacaaaaacacaaaaaaaaaaaaaccttttgcggccgcctggggccccgagagaaggtgtttttttaccaccctcttcgtttggccccggggccccccaggttggtttcgtgtcaccacggggccataagggggtcccaagggaaacccgcgccatgacacacggcgttgggttctctcccccaaaataaaaaaagcgcgcggcggaacccggggttcgtggttccccaacgacagggcaaatgggggccgagctggcgaacctttctcccgaggagcattggggcgccagggttaatctgatgagcaacgccggtccgcgctctaaaaactgcggttaatactagcgcgatcacacaatgatcatacagtagatgacaacaacgactataaccatacacaatattgtacaaacacaatacacgaagacactacaacgcgtactaatctaaccactacactcaagccgtgactacactaacagcacgtccc

SEQ ID NO: 339634 - DNA, 1136 bp, Homo sapiens
  misc_feature (9)..(10): n is a, c, g, or t
  misc_feature (12)..(12): n is a, c, g, or t
tgcttccgnnanaaccttacggctaggtacgaggctgggtggtgcgagcgatgggcatctctcgggacaactggcacaagcgccgcaaaaccgggggcaagagaaagccctaccacaagaagcggaagtatgagttggggcgcccagctgccaacaccaagattggcccccgccgcatccacacagtccgtgtgcggggaggtaacaagaaataccgtgccctgaggttggacgtggggaatttctcctggggctcagagtgttgtactcgtaaaacaaggatcatcgatgttgtctacaatgcatctaataacgagctggttcgtaccaagaccctggtgaagaattgcatcgtgctcatcgacagcacaccgtaccgacagtggtacgagtcccactatgcgctgcccctgggccgcaagaagggagccaagctgactcctgaggaagaagagattttaaacaaaaaacgatctaaaaaaattcagaagaaatatgatgaaaggaaaaagaatgccaaaatcagcagtctcctggaggagcagttccagcagggcaagcttcttgcgtgcatcgcttcaaggccgggacagtgtggccgagcagatggctatgtgctagagggcaaagagttggagttctatcttaggaaaatcaaggcccgcaaaggcaaataaatccttgtttggtcttcacccatgtaataaaggtgtctatgggttggttcgccacaaaaaagaaagaacagacagaaacaataagaaaaaagaggcgggacaaaggacaaaataaagaagacaggaagaagaaaagtggcggcggggagggacggggaccgagaggaagcggccgcacagcacgcaacgccagcgggggacgcagggaccgaccacgaagcgtggacagaaaacacacgggacagataggaagacaaaccagaacagagagcacgcgggccgcgcaaaacacgaggtcgcgggagactcccctcaaagaataaaagaaacacggaggggcggggccacaagcccgcttctgcaaaacaaacacaccgcgagaaggacgtcaaggcaggaccacaggggggcacccaaaacgggacgcggaccacacacagcgacccgagaacaaaagac

SEQ ID NO: 339635 - DNA, 1011 bp, Homo sapiens
  misc_feature (9)..(10): n is a, c, g, or t
  misc_feature (12)..(12): n is a, c, g, or t
  misc_feature (799)..(799): n is a, c, g, or t
  misc_feature (808)..(808): n is a, c, g, or t
tgcttccgnnanaaccttacggctaggtacgaggctgggtggtgcgagcgatgggcatctctcgggacaactggcacaagcgccgcaaaaccgggggcaagagaaagccctaccacaagaagcggaagtatgagttggggcgcccagctgccaacaccaagattggcccccgccgcatccacacagtccgtgtgcggggaggtaacaagaaataccgtgccctgaggttggacgtggggaatttctcctggggctcagagtgttgtactcgtaaaacaaggatcatcgatgttgtctacaatgcatctaataacgagctggttcgtaccaagaccctggtgaagaattgcatcgtgctcatcgacagcacaccgtaccgacagtggtacgagtcccactatgcgctgcccctgggccgcaagaagggagccaagctgactcctgaggaagaagagattttaaacaaaaaacgatctaaaaaaattcagaagaaatatgatgaaaggaaaaagaatgccaaaatcagcagtctcctggaggagcagttccagcagggcaagcttcttgcgtgcatcgcttcaaggccgggacagtgtggccgagcagatggctatgtgctagagggcaaagagttggagttctatcttaggaaaatcaaggcccgcaaaggcaaataaatccttgtttaaaaaaaaaaaaaaaaaaaaaaaaaaaattgttgggggcggctgtgggccctgggaaaaagtttttaaaaaccattgcgctgggggggcgcgggggcccagaagagggtagngtagaacangtgggccaaacggtggtgtccaaagaggagagaacccggggccaagaacaaaggggcgggggattctctcccccaataaaaaaacggcccgggggggaaaaccccggccgtcgtcgtgagaccaatccccgaatgaggagccggagagggccaaagcgggatctctacaccaagagaccacacggaccccgaattaaatcacg

SEQ ID NO: 339636 - DNA, 931 bp, Homo sapiens
  misc_feature (9)..(10): n is a, c, g, or t
  misc_feature (12)..(12): n is a, c, g, or t
  misc_feature (728)..(728): n is a, c, g, or t
  misc_feature (732)..(733): n is a, c, g, or t
tgcttccgnnanaaccttacggctaggtacgaggctgggtggtgcgagcgatgggcatctctcgggacaactggcacaagcgccgcaaaaccgggggcaagagaaagccctaccacaagaagcggaagtatgagttggggcgcccagctgccaacaccaagattggcccccgccgcatccacacagtccgtgtgcggggaggtaacaagaaataccgtgccctgaggttggacgtggggaatttctcctggggctcagagtgttgtactcgtaaaacaaggatcatcgatgttgtctacaatgcatctaataacgagctggttcgtaccaagaccctggtgaagaattgcatcgtgctcatcgacagcacaccgtaccgacagtggtacgagtcccactatgcgctgcccctgggccgcaagaagggagccaagctgactcctgaggaagaagagattttaaacaaaaaacgatctaaaaaaattcagaagaaatatgatgaaaggaaaaagaatgccaaaatcagcagtctcctggaggagcagttccagcagggcaagcttcttgcgtgcatcgcttcaaggccgggacagtgtggccgagcagatggctatgtgctagagggcaaagagttggagttctatcttaggaaaatcaaggcccgcaaaggcaaataaatccttgttttggtcttcacccatgtaaaacaaacaacaaaaacacaaacnaaannttaaaaaaaaaaaaaaaaaaaaaaacaaaaaagagggggggaggagacgaggggccccagggaagagagggttagataaaagaacacaagagggtgaggagagaggcgggggacccgaaaggaggcgcacaagagaaaagcgtgggcaaaaagagggggccaacgagggaggaacccgcgggggacacaccggaaaga

SEQ ID NO: 339637 - DNA, 1058 bp, Homo sapiens
  misc_feature (9)..(10): n is a, c, g, or t
  misc_feature (12)..(12): n is a, c, g, or t
  misc_feature (717)..(717): n is a, c, g, or t
tgcttccgnnanaaccttacggctaggtacgaggctgggtggtgcgagcgatgggcatctctcgggacaactggcacaagcgccgcaaaaccgggggcaagagaaagccctaccacaagaagcggaagtatgagttggggcgcccagctgccaacaccaagattggcccccgccgcatccacacagtccgtgtgcggggaggtaacaagaaataccgtgccctgaggttggacgtggggaatttctcctggggctcagagtgttgtactcgtaaaacaaggatcatcgatgttgtctacaatgcatctaataacgagctggttcgtaccaagaccctggtgaagaattgcatcgtgctcatcgacagcacaccgtaccgacagtggtacgagtcccactatgcgctgcccctgggccgcaagaagggagccaagctgactcctgaggaagaagagattttaaacaaaaaacgatctaaaaaaattcagaagaaatatgatgaaaggaaaaagaatgccaaaatcagcagtctcctggaggagcagttccagcagggcaagcttcttgcgtgcatcgcttcaaggccgggacagtgtggccgagcagatggctatgtgctagagggcaaagagttggagttctatcttaggaaaatcaaggcccgcaaaggcaaataaatccttgttttaaaggtgtttatgtttgttcccacaaaanaaaaaaaaaaaaaaaaaaaaaaaaactttttgggcggccttgggcccaagaaaaaagtttttaaaacaatccggtggggcgcgcgcgggccccaagttgggatagtgcgaccacgtgggcaaaagaggggggtacccaaaggggaaactccgggcgacagtagatcaagcgtcgctggggattcttcaccaaatataaaaaaaccgcgccggggcggggcaacccagagcgggtctggaacaaatcccagaggggagaggtccgagagaggcaataagggggctctatcaaccagggggcccaagggagagccagatataaattaagccccgccatggacc

SEQ ID NO: 339638 - DNA, 1099 bp, Homo sapiens
  misc_feature (9)..(10): n is a, c, g, or t
  misc_feature (12)..(12): n is a, c, g, or t
tgcttccgnnanaaccttacggctaggtacgaggctgggtggtgcgagcgatgggcatctctcgggacaactggcacaagcgccgcaaaaccgggggcaagagaaagccctaccacaagaagcggaagtatgagttggggcgcccagctgccaacaccaagattggcccccgccgcatccacacagtccgtgtgcggggaggtaacaagaaataccgtgccctgaggttggacgtggggaatttctcctggggctcagagtgttgtactcgtaaaacaaggatcatcgatgttgtctacaatgcatctaataacgagctggttcgtaccaagaccctggtgaagaattgcatcgtgctcatcgacagcacaccgtaccgacagtggtacgagtcccactatgcgctgcccctgggccgcaagaagggagccaagctgactcctgaggaagaagagattttaaacaaaaaacgatctaaaaaaattcagaagaaatatgatgaaaggaaaaagaatgccaaaatcagcagtctcctggaggagcagttccagcagggcaagcttcttgcgtgcatcgcttcaaggccgggacagtgtggccgagcagatggctatgtgctagagggcaaagagttggagttctatcttaggaaaatcaaggcccgcaaaggcaaataaatccttgttttattgttttgttcccacatttatgttgcctgaatatatgactgttttctctgctttatttccttgccctgcaaaactgatctgggtgggtggctgcaaccccttgccttaacctctgcctcctactgtcctgagccaggctcaccacactgtaaagtccctgttctcaactccatgtccctgaaggccagatttattatgtgggctatgtctatagtgggaacatttctcaccacattttggtggggatagggatgtggcagaggctatgagggggtatcccaaccttggggttcagtaatattgtgctggctgagtcatgattagaatctcaggctatattgcttataaaaaattttaaggatcttgtacccattgtaagattaacagtgatttctgccttgaaaagtctc

SEQ ID NO: 339639 - DNA, 1111 bp, Homo sapiens
  misc_feature (9)..(10): n is a, c, g, or t
  misc_feature (12)..(12): n is a, c, g, or t
tgcttccgnnanaaccttacggctaggtacgaggctgggtggtgcgagcgatgggcatctctcgggacaactggcacaagcgccgcaaaaccgggggcaagagaaagccctaccacaagaagcggaagtatgagttggggcgcccagctgccaacaccaagattggcccccgccgcatccacacagtccgtgtgcggggaggtaacaagaaataccgtgccctgaggttggacgtggggaatttctcctggggctcagagtgttgtactcgtaaaacaaggatcatcgatgttgtctacaatgcatctaataacgagctggttcgtaccaagaccctggtgaagaattgcatcgtgctcatcgacagcacaccgtaccgacagtggtacgagtcccactatgcgctgcccctgggccgcaagaagggagccaagctgactcctgaggaagaagagattttaaacaaaaaacgatctaaaaaaattcagaagaaatatgatgaaaggaaaaagaatgccaaaatcagcagtctcctggaggagcagttccagcagggcaagcttcttgcgtgcatcgcttcaaggccgggacagtgtggccgagcagatggctatgtgctagagggcaaagagttggagttctatcttaggaaaatcaaggcccgcaaaggcaaataaatccttgtttaaaaaaaaaaaaaaaaaaaaaaaaaaaaaaaaaaaaacaaaaaaagaaaaaaaaaaaaaaaaaaaaaaaaaaaaaaaaacaaacaaagaacaaaaaaaaaaaaaataaaaaaaaaaaacgggggggggcgcgcgcgcggcgaccccaaaaaagccttaacacaaaaaccaagagagagaggaggaggaggcgggcccacaggggagagaagagcagacacagcggggaccacagggcgtccccaagagacaccgcggggcggaaaaaaaagggggggaggacccaccaaaaaaaaaacggcgcgggggagacacagaggctcgaaagaaacaaaaacaaaagaggaacaaagaggagccttaaagggagtaaacaagagaaggagcaaaggaggcacaaaacaatacccccaagagggggggga

SEQ ID NO: 339640 - DNA, 1302 bp, Homo sapiens
  misc_feature (9)..(10): n is a, c, g, or t
  misc_feature (12)..(12): n is a, c, g, or t
tgcttccgnnanaaccttacggctaggtacgaggctgggtggtgcgagcgatgggcatctctcgggacaactggcacaagcgccgcaaaaccgggggcaagagaaagccctaccacaagaagcggaagtatgagttggggcgcccagctgccaacaccaagattggcccccgccgcatccacacagtccgtgtgcggggaggtaacaagaaataccgtgccctgaggttggacgtggggaatttctcctggggctcagagtgttgtactcgtaaaacaaggatcatcgatgttgtctacaatgcatctaataacgagctggttcgtaccaagaccctggtgaagaattgcatcgtgctcatcgacagcacaccgtaccgacagtggtacgagtcccactatgcgctgcccctgggccgcaagaagggagccaagctggtgcgtgttacttccctgtaggggttgtggggagggcagcctgactccagccttctcgtgatgaaaactctgtccagttctgctactgaagggagagagatgagagccttttaggctgaggaaggccagcactggggtgtgcagggttcgagaaagctcccagggcctgccttccttccctgagctcatatatttgtatccccttttcagactcctgaggaagaagagattttaaacaaaaaacgatctaaaaaaattcagaagaaatatgatgaaaggaaaaagaatgccaaaatcagcagtctcctggaggagcagttccagcagggcaagcttcttgcgtgcatcgcttcaaggccgggacagtgtggccgagcagatggctatgtgctagagggcaaagagttggagttctatcttaggaaaatcaaggcccgcaaaggcaaataaatccttgttttgtcttcacccatgtaataaaggtgtttattgttttgttcccacatttatgttgcctgaaaaaaaaaaaaaaaaaaaaaaaaaaaaaaaaaaaaaaaaaaaaaaaaaaaaaaaaaaaaaaaaacaaaaaaaaaaaaaaaaaacgggggggcggccagaggagcacaaaagagaacaacaacacatagggagggggagggggagcacacaagagaaagagaaaaaggggcaaacagaggacacacggacaccccggggacaaaaaaagggggggaagaacacaaaaaaaaacaccccggaaaaaaaaagagagaaaaaaaacatccaaaaagagaaaagagaaaaaaaggggaaaaaaaaaaagagaaacaagagggggcaagaaaaaaaaacccaatgaggtgac

SEQ ID NO: 339641 - DNA, 752 bp, Homo sapiens
  misc_feature (9)..(10): n is a, c, g, or t
  misc_feature (12)..(12): n is a, c, g, or t
  misc_feature (511)..(511): n is a, c, g, or t
  misc_feature (752)..(752): n is a, c, g, or t
tgcttccgnnanaaccttacggctaggtacgaggctgggtggtgcgagcgatgggcatctctcgggacaactggcacaagcgccgcaaaaccgggggcaagagaaagccctaccacaagaagcggaagtatgagttggggcgcccagctgccaacaccaagattggcccccgccgcatccacacagtccgtgtgcggggaggtaacaagaaataccgtgccctgaggttggacgtggggaatttctcctggggctcagagtgttgtactcgtaaaacaaggatcatcgatgttgtctacaatgcatctaataacgagctggttcgtaccaagaccctggtgaagaattgcatcgtgctcatcgacagcacaccgtaccgacagtggtacgagtcccactatgcgctgcccctgggccgcaagaagggagccaagctgactcctgaggaagaagagattttaaacaaaaaacgatctaaaaaaaaaaaaaaaaaaaacaagaaaaaaaaagnaaaaataacaaacaacaaaataaaccccgcgcggcggccatctcaatgcaggcgcgcggccgccagaaacaacaaggtatcaatgaaccagaggcacgcatggggaacatagcacgtcctctcaacgacacccgaattttctggtcgtacacacggggggctacaacagagacagagggcagccccccaaaaggagaggaaccgcaaaacccacagaaaccaccgggtaccgctgttaaan

SEQ ID NO: 339642 - DNA, 828 bp, Homo sapiens
  misc_feature (9)..(10): n is a, c, g, or t
  misc_feature (12)..(12): n is a, c, g, or t
tgcttccgnnanaaccttacggctaggtacgaggctgggtggtgcgagcgatgggcatctctcgggacaactggcacaagcgccgcaaaaccgggggcaagagaaagccctaccacaagaagcggaagtatgagttggggcgcccagctgccaacaccaagattggcccccgccgcatccacacagtccgtgtgcggggaggtaacaagaaataccgtgccctgaggttggacgtggggaatttctcctggggctcagagtgttgtactcgtaaaacaaggatcatcgatgttgtctacaatgcatctaataacgagctggttcgtaccaagaccctggtgaagaattgcatcgtgctcatcgacagcacaccgtaccgacagtggtacgagtcccactatgcgctgcccctgggccgcaagaagggagccaagctgactcctgaggaagaagagattttaaacaaaaaacgatctaaaaaaaaaaaaaaaaaaaaaaaaaaaaaaaaaaaaaaaaaaaaaaaaaaaaaaaaaaaaaaaaaaaaaacaaaaaaaaaaaaaaaaaacgggggggcggccagaggagcacaaaagagaacaacaacacatagggagggggagggggagcacacaagagaaagagaaaaaggggcaaacagaggacacacggacaccccggggacaaaaaaagggggggaagaacacaaaaaaaaacaccccggaaaaaaaaagagagaaaaaaaacatccaaaaagagaaaagagaaaaaaaggggaaaaaaaaaaagagaaacaagagggggcaagaaaaaaaaacccaatgaggtgac

SEQ ID NO: 339643 - DNA, 1039 bp, Homo sapiens
  misc_feature (9)..(10): n is a, c, g, or t
  misc_feature (12)..(12): n is a, c, g, or t
tgcttccgnnanaaccttacggctaggtacgaggctgggtggtgcgagcgatgggcatctctcgggacaactggcacaagcgccgcaaaaccgggggcaagagaaagccctaccacaagaagcggaagtatgagttggggcgcccagctgccaacaccaagattggcccccgccgcatccacacagtccgtgtgcggggaggtaacaagaaataccgtgccctgaggttggacgtggggaatttctcctggggctcagagtgttgtactcgtaaaacaaggatcatcgatgttgtctacaatgcatctaataacgagctggttcgtaccaagaccctggtgaagaattgcatcgtgctcatcgacagcacaccgtaccgacaggactcctgaggaagaagagattttaaacaaaaaacgatctaaaaaaattcagaagaaatatgatgaaaggaaaaagaatgccaaaatcagcagtctcctggaggagcagttccagcagggcaagcttcttgcgtgcatcgcttcaaggccgggacagtgtggccgagcagatggctatgtgctagagggcaaagagttggagttctatcttaggaaaatcaaggcccgcaaaggcaaataaatccttgttttgtcttcacccatgtaataaaggtgtttattgttttgttcccacatttatgttgcctgaaaaaaaaaaaaaaaaaaaaaaaaaaaaaaaaaaaaaaaaaaaaaaaaaaaaaaaaaaaaaaaaacaaaaaaaaaaaaaaaaaacgggggggcggccagaggagcacaaaagagaacaacaacacatagggagggggagggggagcacacaagagaaagagaaaaaggggcaaacagaggacacacggacaccccggggacaaaaaaagggggggaagaacacaaaaaaaaacaccccggaaaaaaaaagagagaaaaaaaacatccaaaaagagaaaagagaaaaaaaggggaaaaaaaaaaagagaaacaagagggggcaagaaaaaaaaacccaatgaggtgac

SEQ ID NO: 339644 - DNA, 1824 bp, Homo sapiens
  misc_feature (9)..(10): n is a, c, g, or t
  misc_feature (12)..(12): n is a, c, g, or t
tgcttccgnnanaaccttacggctaggtacgaggctgggtggtgcgagcgatgggcatctctcgggacaactggcacaagcgccgcaaaaccgggggcaagagaaagccctaccacaagaagcggaagtatgagttggggcgcccagctgccaacaccaagattggcccccgccgcatccacacagtccgtgtgcggggaggtaacaagaaataccgtgccctgaggttggacgtggggaatttctcctggggctcagagtgtgagtgaggccctttgggagtgggtgggaaaacgcacctaaacggtcttaagattcaccaagtgggcctggcgcggtggctcacgcctataagctcagcctcccaagaagctgggattacaggcgtgtgccatcacacccggctgcttctgtatttttagtagagacggggtttcaccatgttggccaggctggtctcaaattcttggctttaagtgatccacccgccttgacctcccaaagtgctggggttacgggcgtgagtcaccgtgcccgacctgctctgatctttctgaactctgcagcctgagagattggggctggtaaagactgcgggttgccaaacataactagaaacgtgggttagggggttgtggaagacgaactgatgccccatggcttgtaaaggctgagagttcccttatttctccttaaggcctcatggggctgaagaacctggaggagtgtgccagggccatttgtcctccagtttacttgatgccaaatttctcctgtgagcaggttgtactcgtaaaacaaggatcatcgatgttgtctacaatgcatctaataacgagctggttcgtaccaagaccctggtgaagaattgcatcgtgctcatcgacagcacaccgtaccgacagtggtacgagtcccactatgcgctgcccctgggccgcaagaagggagccaagctggtgcgtgttacttccctgtaggggttgtggggagggcagcctgactccagccttctcgtgatgaaaactctgtccagttctgctactgaagggagagagatgagagccttttaggctgaggaaggccagcactggggtgtgcagggttcgagaaagctcccagggcctgccttccttccctgagctcatatatttgtatccccttttcagactcctgaggaagaagagattttaaacaaaaaacgatctaaaaaaattcagaagaaatatgatgaaaggaaaaagaatgccaaaatcagcagtctcctggaggagcagttccagcagggcaagcttcttgcgtgcatcgcttcaaggccgggacagtgtggccgagcagatggctatgtgctagagggcaaagagttggagttctatcttaggaaaatcaaggcccgcaaaggcaaataaatccttgttttgtcttcacccatgtaataaaggtgtttattgttttgttcccacatttatgttgcctgaaaaaaaaaaaaaaaaaaaaaaaaaaaaaaaaaaaaaaaaaaaaaaaaaaaaaaaaaaaaaaaaacaaaaaaaaaaaaaaaaaacgggggggcggccagaggagcacaaaagagaacaacaacacatagggagggggagggggagcacacaagagaaagagaaaaaggggcaaacagaggacacacggacaccccggggacaaaaaaagggggggaagaacacaaaaaaaaacaccccggaaaaaaaaagagagaaaaaaaacatccaaaaagagaaaagagaaaaaaaggggaaaaaaaaaaagagaaacaagagggggcaagaaaaaaaaacccaatgaggtgac

SEQ ID NO: 339645 - DNA, 2007 bp, Homo sapiens
  misc_feature (9)..(10): n is a, c, g, or t
  misc_feature (12)..(12): n is a, c, g, or t
tgcttccgnnanaaccttacggctaggtacgaggctgggtggtgcgagcgatgggcatctctcgggacaactggcacaagcgccgcaaaaccgggggcaagagaaagccctaccacaagaagcggaagtatgagttggggcgcccagctgccaacaccaagattggcccccgccgcatccacacagtccgtgtgcggggaggtaacaagaaataccgtgccctgaggttggacgtggggaatttctcctggggctcagagtgtgagtgaggccctttgggagtgggtgggaaaacgcacctaaacggtcttaagattcaccaagtgggcctggcgcggtggctcacgcctataagctcagcctcccaagaagctgggattacaggcgtgtgccatcacacccggctgcttctgtatttttagtagagacggggtttcaccatgttggccaggctggtctcaaattcttggctttaagtgatccacccgccttgacctcccaaagtgctggggttacgggcgtgagtcaccgtgcccgacctgctctgatctttctgaactctgcagcctgagagattggggctggtaaagactgcgggttgccaaacataactagaaacgtgggttagggggttgtggaagacgaactgatgccccatggcttgtaaaggctgagagttcccttatttctccttaaggcctcatggggctgaagaacctggaggagtgtgccagggccatttgtcctccagtttacttgatgccaaatttctcctgtgagcaggttgtactcgtaaaacaaggatcatcgatgttgtctacaatgcatctaataacgagctggttcgtaccaagaccctggtgaagaattgcatcgtgctcatcgacagcacaccgtaccgacaggactcctgaggaagaagagattttaaacaaaaaacgatctaaaaaaattcagaagaaatatgatgaaaggaaaaagaatgccaaaatcagcagtctcctggaggagcagttccagcagggcaagcttcttggtgagaaggctgttgtgttggaggtggggagtcgcagagattgagtgtgccgaggcacttttcccttgtctcagttcctttgactgccagccatgcagtctaaagggttcactgataacaggctgcgagcacaaaggggaacgtttggtcaccctattcgtatgaagctgaaatgggaagcattgggtagaagagtctgcataggcccgtgcttggagtctttgtatttggggaagtctctgcccaggctgagggggctgtctcagtgatgaaaactttgtccagttctgctactgacagtaagtgaagataaagtgtgtctgaggagacagctggcttcatgcttgcccccagggtacctgaacccacagagattcttaagcgggtggagaggtttgggtagggccaccttgtcgttgtgctaaggatcacctactctcttgcagcgtgcatcgcttcaaggccgggacagtgtggccgagcagatggctatgtgctagagggcaaagagttggagttctatcttaggaaaatcaaggcccgcaaaggcaaataaatccttgttttgtcttcacccatgtaataaaggtgtttattgttttgttcccacatttatgttgcctgaaaaaaaaaaaaaaaaaaaaaaaaaaaaaaaaaaaaaaaaaaaaaaaaaaaaaaaaaaaaaaaaacaaaaaaaaaaaaaaaaaacgggggggcggccagaggagcacaaaagagaacaacaacacatagggagggggagggggagcacacaagagaaagagaaaaaggggcaaacagaggacacacggacaccccggggacaaaaaaagggggggaagaacacaaaaaaaaacaccccggaaaaaaaaagagagaaaaaaaacatccaaaaagagaaaagagaaaaaaaggggaaaaaaaaaaagagaaacaagagggggcaagaaaaaaaaacccaatgaggtgac

SEQ ID NO: 339646 - DNA, 783 bp, Homo sapiens
  misc_feature (9)..(10): n is a, c, g, or t
  misc_feature (12)..(12): n is a, c, g, or t
tgcttccgnnanaaccttacggctaggtacgaggctgggtggtgcgagcgatgggcatctctcgggacaactggcacaagcgccgcaaaaccgggggcaagagaaagccctaccacaagaagcggaagtatgagttggggcgcccagctgccaacaccaagattggcccccgccgcatccacacagtccgtgtgcggggaggtaacaagaaataccgtgccctgaggttggacgtggggaatttctcctggggctcagagtgttgtactcgtaaaacaaggatcatcgatgttgtctacaatgcatctaataacgagctggttcgtaccaagaccctggtgaagaattgcatcgtgctcatcgacagcacaccgtaccgacagtggtacgagtcccactatgcgctgcccctgggccgcaagaagggagccaagctgactcctgaggaagaagagattttaaacaaaaaacgatctaaaaaaattcagaagaaatatgatgaaaggaaaaagaatgccaaaatcagcagtctcctggaggagcagttccagcagggcaagcttcttgcgtgcatcgcttcaaggccgggacagtgtggccgagcagatggctatgtgctagagggcaaagagttggagttctatcttaggaaaatcaaggcccgcaaaggcaaataaatccttgtttgtcttcacccatgtaataaaggtgttattgtttgttcccacaaaaaaaaacaagaacgacacacacaatcaaaaaagccgcgggcaatgttgtttc

SEQ ID NO: 339647 - DNA, 1008 bp, Homo sapiens
gcggccgctactactactaaattgggggcgttcggacgccgagcgatgggcatctctcgggacaactggcacaagcgccgcaaaaccgggggcaagagaaagccctaccacaagaagcggaagtatgagttggggcgcccagctgccaacaccaagattggcccccgccgcatccacacagtccgtgtgcggggaggtaacaagaaataccgtgccctgaggttggacgtggggaatttctcctggggctcagagtgttgtactcgtaaaacaaggatcatcgatgttgtctacaatgcatctaataacgagctggttcgtaccaagaccctggtgaagaattgcatcgtgctcatcgacagcacaccgtaccgacaggactcctgaggaagaagagattttaaacaaaaaacgatctaaaaaaattcagaagaaatatgatgaaaggaaaaagaatgccaaaatcagcagtctcctggaggagcagttccagcagggcaagcttcttgcgtgcatcgcttcaaggccgggacagtgtggccgagcagatggctatgtgctagagggcaaagagttggagttctatcttaggaaaatcaaggcccgcaaaggcaaataaatccttgttttgtcttcacccatgtaataaaggtgtttattgttttgttcccacatttatgttgcctgaaaaaaaaaccaaaaaacaaaaaacaaaaacaaagggggggcccccacaaaagtttcccccgaggggggccccacaatttaaccgtaccccgcaggtatttcttgtgtacacacaagaggggaccccctaattagaggaggcacagtattttatgacgaatagcgacacttggcggccgcactgtgtttacacaaggtctgagagcagtgaggacacaaacggggctatgcgatgtggggaacattgtgtgttcgacaaggagaacccataaactccgaggggagagggcacacaactgggtggacacaacatactaccca

SEQ ID NO: 339648 - DNA, 405 bp, Homo sapiens
agagagagagagagagagagagagagagagagagagagagagcgatgggcatctctcgggacaactggcacaagcgccgcaaaaccgggggcaagagaaagccctaccacaagaagcggaagtatgagttggggcgcccagctgccaacaccaagattggcccccgccgcatccacacagtccgtgtgcggggaggtaacaagaaataccgtgccctgaggttggagtggggaatttctcctggggctcagagtgttgtactcgtaaaacaaggatcatcgatgttgtctacaatgcatctaataacgagctggttcgtaccaagacctgggaaagatttcatctatcacgaagaccacctaacgcagttgatcgtcactatgcctcccggaccaagaggagcaa

SEQ ID NO: 339649 - DNA, 1071 bp, Homo sapiens
  misc_feature (9)..(10): n is a, c, g, or t
  misc_feature (12)..(12): n is a, c, g, or t
  misc_feature (859)..(859): n is a, c, g, or t
  misc_feature (868)..(868): n is a, c, g, or t
tgcttccgnnanaaccttacggctaggtacgaggctgggtggtgcgagcgatgggcatctctcgggacaactggcacaagcgccgcaaaaccgggggcaagagaaagccctaccacaagaagcggaagtatgagttggggcgcccagctgccaacaccaagattggcccccgccgcatccacacagtccgtgtgcggggaggtaacaagaaataccgtgccctgaggttggacgtggggaatttctcctggggctcagagtgttgtactcgtaaaacaaggatcatcgatgttgtctacaatgcatctaataacgagctggttcgtaccaagaccctggtgaagaattgcatcgtgctcatcgacagcacaccgtaccgacagtggtacgagtcccactatgcgctgcccctgggccgcaagaagggagccaagctgactcctgaggaagaagagattttaaacaaaaaacgatctaaaaaaattcagaagaaatatgatgaaaggaaaaagaatgccaaaatcagcagtctcctggaggagcagttccagcagggcaagcttcttgcgtgcatcgcttcaaggccgggacagtgtggccgagcagatggctatgtgctagagggcaaagagttggagttctatcttaggaaaatcaaggcccgcaaaggcaaataaatccttgttttgtcttcacccatgtaataaaggtgtttattgttttgttcccacatttatgttgcctgaaaaaaaaaaaaaaaaaaaaaaaaaaaaaattgttgggggcggctgtgggccctgggaaaaagtttttaaaaaccattgcgctgggggggcgcgggggcccagaagagggtagngtagaacangtgggccaaacggtggtgtccaaagaggagagaacccggggccaagaacaaaggggcgggggattctctcccccaataaaaaaacggcccgggggggaaaaccccggccgtcgtcgtgagaccaatccccgaatgaggagccggagagggccaaagcgggatctctacaccaagagaccacacggaccccgaattaaatcacg

SEQ ID NO: 339650 - DNA, 1126 bp, Homo sapiens
  misc_feature (9)..(10): n is a, c, g, or t
  misc_feature (12)..(12): n is a, c, g, or t
tgcttccgnnanaaccttacggctaggtacgaggctgggtggtgcgagcgatgggcatctctcgggacaactggcacaagcgccgcaaaaccgggggcaagagaaagccctaccacaagaagcggaagtatgagttggggcgcccagctgccaacaccaagattggcccccgccgcatccacacagtccgtgtgcggggaggtaacaagaaataccgtgccctgaggttggacgtggggaatttctcctggggctcagagtgttgtactcgtaaaacaaggatcatcgatgttgtctacaatgcatctaataacgagctggttcgtaccaagaccctggtgaagaattgcatcgtgctcatcgacagcacaccgtaccgacagtggtacgagtcccactatgcgctgcccctgggccgcaagaagggagccaagctgactcctgaggaagaagagattttaaacaaaaaacgatctaaaaaaattcagaagaaatatgatgaaaggaaaaagaatgccaaaatcagcagtctcctggaggagcagttccagcagggcaagcttcttgcgtgcatcgcttcaaggccgggacagtgtggccgagcagatggctatgtgctagagggcaaagagttggagttctatcttaggaaaatcaaggcccgcaaaggcaaataaatccttgttttgtcttcacccatgtaataaaggtgtttattgttttgttcccacatttatgttgcctgaatatatgactgttttctctgctttatttccttgccctgcaaaactgatctgggtgggtggctgcaaccccttgccttaacctctgcctcctactgtcctgagccaggctcaccacactgtaaagtccctgttctcaactccatgtccctgaaggccagatttattatgtgggctatgtctatagtgggaacatttctcaccacattttggtggggatagggatgtggcagaggctatgagggggtatcccaaccttggggttcagtaatattgtgctggctgagtcatgattagaatctcaggctatattgcttataaaaaattttaaggatcttgtacccattgtaagattaacagtgatttctgccttgaaaagtctc

SEQ ID NO: 339651 - DNA, 1278 bp, Homo sapiens
  misc_feature (9)..(10): n is a, c, g, or t
  misc_feature (12)..(12): n is a, c, g, or t
tgcttccgnnanaaccttacggctaggtacgaggctgggtggtgcgagcgatgggcatctctcgggacaactggcacaagcgccgcaaaaccgggggcaagagaaagccctaccacaagaagcggaagtatgagttggggcgcccagctgccaacaccaagattggcccccgccgcatccacacagtccgtgtgcggggaggtaacaagaaataccgtgccctgaggttggacgtggggaatttctcctggggctcagagtgttgtactcgtaaaacaaggatcatcgatgttgtctacaatgcatctaataacgagctggttcgtaccaagaccctggtgaagaattgcatcgtgctcatcgacagcacaccgtaccgacagtggtacgagtcccactatgcgctgcccctgggccgcaagaagggagccaagctgactcctgaggaagaagagattttaaacaaaaaacgatctaaaaaaattcagaagaaatatgatgaaaggaaaaagaatgccaaaatcagcagtctcctggaggagcagttccagcagggcaagcttcttgcgtgcatcgcttcaaggccgggacagtgtggccgagcagatggctatgtgctagagggcaaagagttggagttctatcttaggaaaatcaaggcccgcaaaggcaaataaatccttgttttgtcttcacccatgtaataaaggtgtttattgttttgttcccaaaaaaaaaaaaaaaaaaaaaaaaaaaaaaaaaaaaaaaaaaaaaaaaaaaaaaaaaaaaaaaacaaaaaaaaaaaaaaaaaaaaaaaaaaaagaaagaaggaggaggcgacgcaacgactaaaagaaagactcaatcagagcgcgaggagaccacaagacaatgctacgacgcacaacacagcaaaagtctacacaaagaaaaagaaggatcacataacaaaaaagcgcgcgaaataaacagaagagaggacgggagggacaaaaacacaaacaaaagcgataaacaacaaaccacgcaacacaaagaagagaaataaagaaagacagaacaagcacaacaaaataaatgggcaagagcgagcaacaaaaaaagagcacaaaacacaacaaaaagaaaaatcacacacctaacgaagaagccacaccaaccaacaactagaatatgtagagcgagaaaaccaaacagacagaatacgagccaaaagaaaagagcacggcaaaaaaaagtagaaacaaaaaaaccacgggaggaaaaaaaccgacacgc

SEQ ID NO: 339652 - DNA, 988 bp, Homo sapiens
  misc_feature (9)..(10): n is a, c, g, or t
  misc_feature (12)..(12): n is a, c, g, or t
  misc_feature (805)..(805): n is a, c, g, or t
tgcttccgnnanaaccttacggctaggtacgaggctgggtggtgcgagcgatgggcatctctcgggacaactggcacaagcgccgcaaaaccgggggcaagagaaagccctaccacaagaagcggaagtatgagttggggcgcccagctgccaacaccaagattggcccccgccgcatccacacagtccgtgtgcggggaggtaacaagaaataccgtgccctgaggttggacgtggggaatttctcctggggctcagagtgttgtactcgtaaaacaaggatcatcgatgttgtctacaatgcatctaataacgagctggttcgtaccaagaccctggtgaagaattgcatcgtgctcatcgacagcacaccgtaccgacagtggtacgagtcccactatgcgctgcccctgggccgcaagaagggagccaagctgactcctgaggaagaagagattttaaacaaaaaacgatctaaaaaaattcagaagaaatatgatgaaaggaaaaagaatgccaaaatcagcagtctcctggaggagcagttccagcagggcaagcttcttgcgtgcatcgcttcaaggccgggacagtgtggccgagcagatggctatgtgctagagggcaaagagttggagttctatcttaggaaaatcaaggcccgcaaaggcaaataaatccttgtttgtcttcacccatgtaataaaggtgttcattgttttgttcccacaaaaaaacaaaaaaaacaacaaacaaaacaacaaccacaaaaacacaaacacacacaacaaacaccaacgaaaanacaaagggaaagaaaaaagcaacaatcgaggagaacaggagaaaaaaagacacaaaaaagggaaacaagaggacaccaaagagaacaacaaaagccagaaaagaagaaagaacggcacgacgggaccgcgagcgacaaacaagccgcccgagcacgaacaggagccgcggcaacgaaacgaaa

SEQ ID NO: 339653 - DNA, 791 bp, Homo sapiens
  misc_feature (9)..(10): n is a, c, g, or t
  misc_feature (12)..(12): n is a, c, g, or t
  misc_feature (751)..(751): n is a, c, g, or t
  misc_feature (761)..(762): n is a, c, g, or t
  misc_feature (765)..(765): n is a, c, g, or t
tgcttccgnnanaaccttacggctaggtacgaggctgggtggtgcgagcgatgggcatctctcgggacaactggcacaagcgccgcaaaaccgggggcaagagaaagccctaccacaagaagcggaagtatgagttggggcgcccagctgccaacaccaagattggcccccgccgcatccacacagtccgtgtgcggggaggtaacaagaaataccgtgccctgaggttggacgtggggaatttctcctggggctcagagtgttgtactcgtaaaacaaggatcatcgatgttgtctacaatgcatctaataacgagctggttcgtaccaagaccctggtgaagaattgcatcgtgctcatcgacagcacaccgtaccgacagtggtacgagtcccactatgcgctgcccctgggccgcaagaagggagccaagctgactcctgaggaagaagagattttaaacaaaaaacgatctaaaaaaattcagaagaaatatgatgaaaggaaaaagaatgccaaaatcagcagtctcctggaggagcagttccagcagggcaagcttcttgcgtgcatcgcttcaaggccgggacagtgtggccgagcagatggctatgtgctagagggcaaagagttggagttctatcttaggaaaatcaaggcccgcaaaggcaaataaatccttgttttgtcttcacccatgtaatacaggtgttatggtttgttccacaaaaaaaaagaaaaaaaaaactnggggaatatnnttnggggggggaaaacaagggttatggaa

SEQ ID NO: 339654 - DNA, 1080 bp, Homo sapiens
  misc_feature (9)..(10): n is a, c, g, or t
  misc_feature (12)..(12): n is a, c, g, or t
  misc_feature (810)..(810): n is a, c, g, or t
  misc_feature (845)..(845): n is a, c, g, or t
  misc_feature (853)..(853): n is a, c, g, or t
  misc_feature (1080)..(1080): n is a, c, g, or t
tgcttccgnnanaaccttacggctaggtacgaggctgggtggtgcgagcgatgggcatctctcgggacaactggcacaagcgccgcaaaaccgggggcaagagaaagccctaccacaagaagcggaagtatgagttggggcgcccagctgccaacaccaagattggcccccgccgcatccacacagtccgtgtgcggggaggtaacaagaaataccgtgccctgaggttggacgtggggaatttctcctggggctcagagtgttgtactcgtaaaacaaggatcatcgatgttgtctacaatgcatctaataacgagctggttcgtaccaagaccctggtgaagaattgcatcgtgctcatcgacagcacaccgtaccgacagtggtacgagtcccactatgcgctgcccctgggccgcaagaagggagccaagctgactcctgaggaagaagagattttaaacaaaaaacgatctaaaaaaattcagaagaaatatgatgaaaggaaaaagaatgccaaaatcagcagtctcctggaggagcagttccagcagggcaagcttcttgcgtgcatcgcttcaaggccgggacagtgtggccgagcagatggctatgtgctagagggcaaagagttggagttctatcttaggaaaatcaaggcccgcaaaggcaaataaatccttgttttgtcttcacccatgaaaaaaaaaaaaaaaaaaaaaaaaaaaaaagtgttgggggcggccctggggcccggaaaaagtttttaaacaaccatctcgggtggggggggcggggggccccagtggngtaaggggaaactggggccaagagcgggtgtcccnaagagganaaccccggggccaagagcacgagggggcggggggttctcctcacccaatttaaaaaaaagcgcacgccggggggcgaagaccgccgaagggttcctgggtaacaaaatttccacaagaggggggagtccgggaaagggcacaagaggggggttcctaatccacacggggggatctcccaaggaggaaaacccgataattccaatttaaggcccccgggctggtgaan

SEQ ID NO: 339655 - DNA, 1311 bp, Homo sapiens
  misc_feature (9)..(10): n is a, c, g, or t
  misc_feature (12)..(12): n is a, c, g, or t
  misc_feature (890)..(890): n is a, c, g, or t
  misc_feature (901)..(901): n is a, c, g, or t
  misc_feature (907)..(907): n is a, c, g, or t
  misc_feature (933)..(933): n is a, c, g, or t
  misc_feature (937)..(937): n is a, c, g, or t
  misc_feature (943)..(943): n is a, c, g, or t
  misc_feature (954)..(955): n is a, c, g, or t
  misc_feature (961)..(961): n is a, c, g, or t
  misc_feature (983)..(983): n is a, c, g, or t
tgcttccgnnanaaccttacggctaggtacgaggctgggtggtgcgagcgatgggcatctctcgggacaactggcacaagcgccgcaaaaccgggggcaagagaaagccctaccacaagaagcggaagtatgagttggggcgcccagctgccaacaccaagattggcccccgccgcatccacacagtccgtgtgcggggaggtaacaagaaataccgtgccctgaggttggacgtggggaatttctcctggggctcagagtgttgtactcgtaaaacaaggatcatcgatgttgtctacaatgcatctaataacgagctggttcgtaccaagaccctggtgaagaattgcatcgtgctcatcgacagcacaccgtaccgacagtggtacgagtcccactatgcgctgcccctgggccgcaagaagggagccaagctgactcctgaggaagaagagattttaaacaaaaaacgatctaaaaaaattcagaagaaatatgatgaaaggaaaaagaatgccaaaatcagcagtctcctggaggagcagttccagcagggcaagcttcttgcgtgcatcgcttcaaggccgggacagtgtggccgagcagatggctatgtgctagagggcaaagagttggagttctatcttaggaaaatcaaggcccgcaaaggcaaataaatccttgtttaaaaaaaaaaaaaaaaaaaaaaaaaaaaaaaaaaaaaaaaaaaaaaaaaaaaaaaaaaaaaaaaaaaaaaaaaaaaaaaaaaaaaaaaaaaaaaaaaccttttggcccccttggcccaattgaattttaaattcgacaaagtttatccttgcggccaaatttgggcctaattggccaaattccccttatagggagtcgttttnaaattaattgncccgtnttttaaaaactttggaattggaaaancctngggttncccaaattaanncccttngaaaaaaatccccttttcccanttggcttaattacaaaaaggccctaaccaacggcctttccaaaaagttggccacctctatggcaaaaggaaaatttgaaccttaaataatttgtaaaatttcggtaaaattttgtaaaatcagttatttttaaacaatatggccaaattggaaaaatcctttaaatcaaagaattccccgaatagggttaaggtttcccaattggaaaaagatcccattttaaaaacgggcttccaacttaaagggcaaaaaaccttttaagggcaatggccattggtgaccatcccctaaaaaatttttgggtcaaggcccaccttaacggcctggg

SEQ ID NO: 339656 - DNA, 1401 bp, Homo sapiens
  misc_feature (9)..(10): n is a, c, g, or t
  misc_feature (12)..(12): n is a, c, g, or t
tgcttccgnnanaaccttacggctaggtacgaggctgggtggtgcgagcgatgggcatctctcgggacaactggcacaagcgccgcaaaaccgggggcaagagaaagccctaccacaagaagcggaagtatgagttggggcgcccagctgccaacaccaagattggcccccgccgcatccacacagtccgtgtgcggggaggtaacaagaaataccgtgccctgaggttggacgtggggaatttctcctggggctcagagtgttgtactcgtaaaacaaggatcatcgatgttgtctacaatgcatctaataacgagctggttcgtaccaagaccctggtgaagaattgcatcgtgctcatcgacagcacaccgtaccgacagtggtacgagtcccactatgcgctgcccctgggccgcaagaagggagccaagctgactcctgaggaagaagagattttaaacaaaaaacgatctaaaaaaattcagaagaaatatgatgaaaggaaaaagaatgccaaaatcagcagtctcctggaggagcagttccagcagggcaagcttcttgcgtgcatcgcttcaaggccgggacagtgtggccgagcagatggctatgtgctagagggcaaagagttggagttctatcttaggaaaatcaaggcccgcaaaggcaaataaatccttgttttaaaggtggtttatgctttgcttcccacaaaaaaaaaaaaaaaaaaaacaaaaaaaaaacgtgtgtgtctgcggccgcgcctcatgcggcgccccttggcgaagaaaagcttgtcttaaaagaccaattcggttgtgggggcgccgcgggcccagaatagaggtataaggggaaacagtgggcccacaagcgcgggtttcccatagagaaaactcgcgggcaccgagcacctgagggcggggggatttcccccaccaaatttaaaaaacgcgcccgggggggaaagacgaggagaggcggtcagtgaggacaaccacgccaaagagggagaggcttcggaaggggacataacggggggctcataaccacaaccggggaggccgacaggcagagcaggagaatcaaaatataaacgcccccgaccggggagaaaagaaacaacaaaagagaagaacgaaacagcgaagcatataagcacaagcgcgacaaacaaaacgctaaaaaacacacagaaagacaagaactaaggaacaaacacaaaaagcaagaaaaaagtccaaaacgaaaaaagtagaacagaaaaaacacaaaagagacgaacagacgatgacacaaagagagaccgacacaacgaggatataatagacaacaagtcgtaaaattaaacacagaacaaaaacacaacacaaacaacaaaacaaagaatacagagga

SEQ ID NO: 339657 - DNA, 1058 bp, Homo sapiens
  misc_feature (9)..(10): n is a, c, g, or t
  misc_feature (12)..(12): n is a, c, g, or t
tgcttccgnnanaaccttacggctaggtacgaggctgggtggtgcgagcgatgggcatctctcgggacaactggcacaagcgccgcaaaaccgggggcaagagaaagccctaccacaagaagcggaagtatgagttggggcgcccagctgccaacaccaagattggcccccgccgcatccacacagtccgtgtgcggggaggtaacaagaaataccgtgccctgaggttggacgtggggaatttctcctggggctcagagtgttgtactcgtaaaacaaggatcatcgatgttgtctacaatgcatctaataacgagctggttcgtaccaagaccctggtgaagaattgcatcgtgctcatcgacagcacaccgtaccgacagtggtacgagtcccactatgcgctgcccctgggccgcaagaagggagccaagctgactcctgaggaagaagagattttaaacaaaaaacgatctaaaaaaattcagaagaaatatgatgaaaggaaaaagaatgccaaaatcagcagtctcctggaggagcagttccagcagggcaagcttcttgcgtgcatcgcttcaaggccgggacagtgtggccgagcagatggctatgtgctagagggcaaagagttggagttctatcttaggaaaatcaaggcccgcaaaggcaaataaatccttgttttatgtttgttcccccaaaaaaaaaaaaaaaaaaaaaaaaaaaaaatgtgttgggggggctgggccttgaaaaggtttttaaaaaaatttggttgttgggggcgggggccccaagcataggtatcgggtgaaaacggggcaaacaggggtgtgttcccaaaggaagacgctcggcgatcctgagaacaagcgccgtggggattccttccccacatataaaaaccaggcccggggggccaacacggaaggtgttgctgcgaaaaaaacttccaagaagggggagtcaggagggccaagagaggggcatcactaccaacggggaagtcccaaagagaagctcgcgaaatatacaaattaaccacccgcaccggg

SEQ ID NO: 339658 - DNA, 1059 bp, Homo sapiens
  misc_feature (9)..(10): n is a, c, g, or t
  misc_feature (12)..(12): n is a, c, g, or t
  misc_feature (717)..(717): n is a, c, g, or t
tgcttccgnnanaaccttacggctaggtacgaggctgggtggtgcgagcgatgggcatctctcgggacaactggcacaagcgccgcaaaaccgggggcaagagaaagccctaccacaagaagcggaagtatgagttggggcgcccagctgccaacaccaagattggcccccgccgcatccacacagtccgtgtgcggggaggtaacaagaaataccgtgccctgaggttggacgtggggaatttctcctggggctcagagtgttgtactcgtaaaacaaggatcatcgatgttgtctacaatgcatctaataacgagctggttcgtaccaagaccctggtgaagaattgcatcgtgctcatcgacagcacaccgtaccgacagtggtacgagtcccactatgcgctgcccctgggccgcaagaagggagccaagctgactcctgaggaagaagagattttaaacaaaaaacgatctaaaaaaattcagaagaaatatgatgaaaggaaaaagaatgccaaaatcagcagtctcctggaggagcagttccagcagggcaagcttcttgcgtgcatcgcttcaaggccgggacagtgtggccgagcagatggctatgtgctagagggcaaagagttggagttctatcttaggaaaatcaaggcccgcaaaggcaaataaatccttgttttaaaggtgtttatgtttgttcccacaaaanaaaaaaaaaaaaaaaaaaaaaaaaaaaaaaaaaaaaaaaaaaaaaaaaaaaaaaaaaaaaaaaaaaaaaaaaaaaaaaaaaaaaaaaaaaaaaaaaaaaaaaaaaaaaaaaaaaaaaaaaaaaattataaataaaaaaatataaaatatatttaataataaatttataaaaaatttaatataaaataataaattttataacttttttatattttattaatttttttataaattatattttattaattttaatttttattatataatatttatttttttataatataattttatttttattttatattattaatattttatatatattaattttaatttaaat

SEQ ID NO: 339659 - DNA, 1342 bp, Homo sapiens
  misc_feature (9)..(10): n is a, c, g, or t
  misc_feature (12)..(12): n is a, c, g, or t
  misc_feature (921)..(921): n is a, c, g, or t
  misc_feature (932)..(932): n is a, c, g, or t
  misc_feature (938)..(938): n is a, c, g, or t
  misc_feature (964)..(964): n is a, c, g, or t
  misc_feature (968)..(968): n is a, c, g, or t
  misc_feature (974)..(974): n is a, c, g, or t
  misc_feature (985)..(986): n is a, c, g, or t
  misc_feature (992)..(992): n is a, c, g, or t
  misc_feature (1014)..(1014): n is a, c, g, or t
tgcttccgnnanaaccttacggctaggtacgaggctgggtggtgcgagcgatgggcatctctcgggacaactggcacaagcgccgcaaaaccgggggcaagagaaagccctaccacaagaagcggaagtatgagttggggcgcccagctgccaacaccaagattggcccccgccgcatccacacagtccgtgtgcggggaggtaacaagaaataccgtgccctgaggttggacgtggggaatttctcctggggctcagagtgttgtactcgtaaaacaaggatcatcgatgttgtctacaatgcatctaataacgagctggttcgtaccaagaccctggtgaagaattgcatcgtgctcatcgacagcacaccgtaccgacagtggtacgagtcccactatgcgctgcccctgggccgcaagaagggagccaagctgactcctgaggaagaagagattttaaacaaaaaacgatctaaaaaaattcagaagaaatatgatgaaaggaaaaagaatgccaaaatcagcagtctcctggaggagcagttccagcagggcaagcttcttgcgtgcatcgcttcaaggccgggacagtgtggccgagcagatggctatgtgctagagggcaaagagttggagttctatcttaggaaaatcaaggcccgcaaaggcaaataaatccttgttttaaaggtgtttattgttttgttcccacaaaaaaaaaaaaaaaaaaaaaaaaaaaaaaaaaaaaaaaaaaaaaaaaaaaaaaaaaaaaaaaaaaaaaaaaaaaaaaaaaaaaaaaaaaaaaaaaaaaaaccttttggcccccttggcccaattgaattttaaattcgacaaagtttatccttgcggccaaatttgggcctaattggccaaattccccttatagggagtcgttttnaaattaattgncccgtnttttaaaaactttggaattggaaaancctngggttncccaaattaanncccttngaaaaaaatccccttttcccanttggcttaattacaaaaaggccctaaccaacggcctttccaaaaagttggccacctctatggcaaaaggaaaatttgaaccttaaataatttgtaaaatttcggtaaaattttgtaaaatcagttatttttaaacaatatggccaaattggaaaaatcctttaaatcaaagaattccccgaatagggttaaggtttcccaattggaaaaagatcccattttaaaaacgggcttccaacttaaagggcaaaaaaccttttaagggcaatggccattggtgaccatcccctaaaaaatttttgggtcaaggcccaccttaacggcctggg

SEQ ID NO: 339660 - DNA, 885 bp, Homo sapiens
  misc_feature (24)..(24): n is a, c, g, or t
aatcagctcggtacccccacttanccgtggggaatttctcctggggctcagagtgttgtactcgtaaaacaaggatcatcgatgttgtctacaatgcatctaataacgagctggttcgtaccaagaccctggtgaagaattgcatcgtgctcatcgacagcacaccgtaccgacagtggtacgagtcccactatgcgctgcccctgggccgcaagaagggagccaagctgactcctgaggaagaagagattttaaacaaaaaacgatctaaaaaaattcagaagaaatatgatgaaaggaaaaagaatgccaaaatcagcagtctcctggaggagcagttccagcagggcaagcttcttgcgtgcatcgcttcaaggccgggacagtgtggccgagcagatggctatgtgctagagggcaaagagttggagttctatcttaggaaaatcaaggcccgcaaaggcaaataaatccttgttttgtcttcacccatgtaataaaggtgtttattgttttgttcccacatttatgttgcctgaaaaaaaaaaaaaaaaaaaaaaaaaaaaaaaaaaaaaaaaaaaaaaaaaaaaaaaaaaaaaaaaacaaaaaaaaaaaaaaaaaacgggggggcggccagaggagcacaaaagagaacaacaacacatagggagggggagggggagcacacaagagaaagagaaaaaggggcaaacagaggacacacggacaccccggggacaaaaaaagggggggaagaacacaaaaaaaaacaccccggaaaaaaaaagagagaaaaaaaacatccaaaaagagaaaagagaaaaaaaggggaaaaaaaaaaagagaaacaagagggggcaagaaaaaaaaacccaatgaggtgac

SEQ ID NO: 339661 - DNA, 1614 bp, Homo sapiens
  misc_feature (9)..(10): n is a, c, g, or t
  misc_feature (12)..(12): n is a, c, g, or t
tgcttccgnnanaaccttacggctaggtacgaggctgggtggtgcgagcgatgggcatctctcgggacaactggcacaagcgccgcaaaaccgggggcaagagaaagccctaccacaagaagcggaagtatgagttggggcgcccagctgccaacaccaagattggcccccgccgcatccacacagtccgtgtgcggggaggtaacaagaaataccgtgccctgaggttggacgtggggaatttctcctggggctcagagtgtgagtgaggccctttgggagtgggtgggaaaacgcacctaaacggtcttaagattcaccaagtgggcctggcgcggtggctcacgcctataagctcagcctcccaagaagctgggattacaggcgtgtgccatcacacccggctgcttctgtatttttagtagagacggggtttcaccatgttggccaggctggtctcaaattcttggctttaagtgatccacccgccttgacctcccaaagtgctggggttacgggcgtgagtcaccgtgcccgacctgctctgatctttctgaactctgcagcctgagagattggggctggtaaagactgcgggttgccaaacataactagaaacgtgggttagggggttgtggaagacgaactgatgccccatggcttgtaaaggctgagagttcccttatttctccttaaggcctcatggggctgaagaacctggaggagtgtgccagggccatttgtcctccagtttacttgatgccaaatttctcctgtgagcaggttgtactcgtaaaacaaggatcatcgatgttgtctacaatgcatctaataacgagctggttcgtaccaagaccctggtgaagaattgcatcgtgctcatcgacagcacaccgtaccgacagtggtacgagtcccactatgcgctgcccctgggccgcaagaagggagccaagctgactcctgaggaagaagagattttaaacaaaaaacgatctaaaaaaattcagaagaaatatgatgaaaggaaaaagaatgccaaaatcagcagtctcctggaggagcagttccagcagggcaagcttcttgcgtgcatcgcttcaaggccgggacagtgtggccgagcagatggctatgtgctagagggcaaagagttggagttctatcttaggaaaatcaaggcccgcaaaggcaaataaatccttgttttgtcttcacccatgtaataaaggtgtttattgttttgttcccacatttatgttgcctgaaaaaaaaaaaaaaaaaaaaaaaaaaaaaaaaaaaaaaaaaaaaaaaaaaaaaaaaaaaaaaaaacaaaaaaaaaaaaaaaaaacgggggggcggccagaggagcacaaaagagaacaacaacacatagggagggggagggggagcacacaagagaaagagaaaaaggggcaaacagaggacacacggacaccccggggacaaaaaaagggggggaagaacacaaaaaaaaacaccccggaaaaaaaaagagagaaaaaaaacatccaaaaagagaaaagagaaaaaaaggggaaaaaaaaaaagagaaacaagagggggcaagaaaaaaaaacccaatgaggtgac

SEQ ID NO: 339662 - DNA, 1538 bp, Homo sapiens
  misc_feature (9)..(10): n is a, c, g, or t
  misc_feature (12)..(12): n is a, c, g, or t
tgcttccgnnanaaccttacggctaggtacgaggctgggtggtgcgagcgatgggcatctctcgggacaactggcacaagcgccgcaaaaccgggggcaagagaaagccctaccacaagaagcggaagtatgagttggggcgcccagctgccaacaccaagattggcccccgccgcatccacacagtccgtgtgcggggaggtaacaagaaataccgtgccctgaggttggacgtggggaatttctcctggggctcagagtgttgtactcgtaaaacaaggatcatcgatgttgtctacaatgcatctaataacgagctggttcgtaccaagaccctggtgaagaattgcatcgtgctcatcgacagcacaccgtaccgacagtggtacgagtcccactatgcgctgcccctgggccgcaagaagggagccaagctgactcctgaggaagaagagattttaaacaaaaaacgatctaaaaaaattcagaagaaatatgatgaaaggaaaaagaatgccaaaatcagcagtctcctggaggagcagttccagcagggcaagcttcttggtgagaaggctgttgtgttggaggtggggagtcgcagagattgagtgtgccgaggcacttttcccttgtctcagttcctttgactgccagccatgcagtctaaagggttcactgataacaggctgcgagcacaaaggggaacgtttggtcaccctattcgtatgaagctgaaatgggaagcattgggtagaagagtctgcataggcccgtgcttggagtctttgtatttggggaagtctctgcccaggctgagggggctgtctcagtgatgaaaactttgtccagttctgctactgacagtaagtgaagataaagtgtgtctgaggagacagctggcttcatgcttgcccccagggtacctgaacccacagagattcttaagcgggtggagaggtttgggtagggccaccttgtcgttgtgctaaggatcacctactctcttgcagcgtgcatcgcttcaaggccgggacagtgtggccgagcagatggctatgtgctagagggcaaagagttggagttctatcttaggaaaatcaaggcccgcaaaggcaaataaatccttgttttgtcttcacccatgtaataaaggtgtttattgttttgttcccacatttatgttgcctgaaaaaaaaaaaaaaaaaaaaaaaaaaaaaaaaaaaaaaaaaaaaaaaaaaaaaaaaaaaaaaaaacaaaaaaaaaaaaaaaaaacgggggggcggccagaggagcacaaaagagaacaacaacacatagggagggggagggggagcacacaagagaaagagaaaaaggggcaaacagaggacacacggacaccccggggacaaaaaaagggggggaagaacacaaaaaaaaacaccccggaaaaaaaaagagagaaaaaaaacatccaaaaagagaaaagagaaaaaaaggggaaaaaaaaaaagagaaacaagagggggcaagaaaaaaaaacccaatgaggtgac

SEQ ID NO: 339663 - DNA, 706 bp, Homo sapiens
  misc_feature (9)..(10): n is a, c, g, or t
  misc_feature (12)..(12): n is a, c, g, or t
  misc_feature (558)..(558): n is a, c, g, or t
  misc_feature (564)..(564): n is a, c, g, or t
  misc_feature (574)..(574): n is a, c, g, or t
tgcttccgnnanaaccttacggctaggtacgaggctgggtggtgcgagcgatgggcatctctcgggacaactggcacaagcgccgcaaaaccgggggcaagagaaagccctaccacaagaagcggaagtatgagttggggcgcccagctgccaacaccaagattggcccccgccgcatccacacagtccgtgtgcggggaggtaacaagaaataccgtgccctgaggttggacgtggggaatttctcctggggctcagagtgttgtactcgtaaaacaaggatcatcgatgttgtctacaatgcatctaataacgagctggttcgtaccaagaccctggtgaagaattgcatcgtgctcatcgacagcacaccgtaccgacagtggtacgagtcccactatgcgctgcccctgggccgcaagaagggagccaagctgactcctgaggaagaagagattttaaacaaaaaacgatctaaaaaaaaaaaaaaaaaactcgagactagttctctctctcggggggttggcttaggcgcaaacggggaagcggagccaaatngccagnggccggagcngggttggtcgcaaaacttttgtgaccccggggagacccttcgagaaatctcgtctcgaccaagagctgaagctgatcggcgagtatgggcccgggaacaaacgtgaggtcgggggggtcaatttcccctggc

SEQ ID NO: 339664 - DNA, 1748 bp, Homo sapiens
  misc_feature (9)..(10): n is a, c, g, or t
  misc_feature (12)..(12): n is a, c, g, or t
tgcttccgnnanaaccttacggctaggtacgaggctgggtggtgcgagcgatgggcatctctcgggacaactggcacaagcgccgcaaaaccgggggcaagagaaagccctaccacaagaagcggaagtatgagttggggcgcccagctgccaacaccaagattggcccccgccgcatccacacagtccgtgtgcggggaggtaacaagaaataccgtgccctgaggttggacgtggggaatttctcctggggctcagagtgttgtactcgtaaaacaaggatcatcgatgttgtctacaatgcatctaataacgagctggttcgtaccaagaccctggtgaagaattgcatcgtgctcatcgacagcacaccgtaccgacagtggtacgagtcccactatgcgctgcccctgggccgcaagaagggagccaagctggtgcgtgttacttccctgtaggggttgtggggagggcagcctgactccagccttctcgtgatgaaaactctgtccagttctgctactgaagggagagagatgagagccttttaggctgaggaaggccagcactggggtgtgcagggttcgagaaagctcccagggcctgccttccttccctgagctcatatatttgtatccccttttcagactcctgaggaagaagagattttaaacaaaaaacgatctaaaaaaattcagaagaaatatgatgaaaggaaaaagaatgccaaaatcagcagtctcctggaggagcagttccagcagggcaagcttcttggtgagaaggctgttgtgttggaggtggggagtcgcagagattgagtgtgccgaggcacttttcccttgtctcagttcctttgactgccagccatgcagtctaaagggttcactgataacaggctgcgagcacaaaggggaacgtttggtcaccctattcgtatgaagctgaaatgggaagcattgggtagaagagtctgcataggcccgtgcttggagtctttgtatttggggaagtctctgcccaggctgagggggctgtctcagtgatgaaaactttgtccagttctgctactgacagtaagtgaagataaagtgtgtctgaggagacagctggcttcatgcttgcccccagggtacctgaacccacagagattcttaagcgggtggagaggtttgggtagggccaccttgtcgttgtgctaaggatcacctactctcttgcagcgtgcatcgcttcaaggccgggacagtgtggccgagcagatggctatgtgctagagggcaaagagttggagttctatcttaggaaaatcaaggcccgcaaaggcaaataaatccttgttttgtcttcacccatgtaataaaggtgtttattgttttgttcccacatttatgttgcctgaaaaaaaaaaaaaaaaaaaaaaaaaaaaaaaaaaaaaaaaaaaaaaaaaaaaaaaaaaaaaaaaacaaaaaaaaaaaaaaaaaacgggggggcggccagaggagcacaaaagagaacaacaacacatagggagggggagggggagcacacaagagaaagagaaaaaggggcaaacagaggacacacggacaccccggggacaaaaaaagggggggaagaacacaaaaaaaaacaccccggaaaaaaaaagagagaaaaaaaacatccaaaaagagaaaagagaaaaaaaggggaaaaaaaaaaagagaaacaagagggggcaagaaaaaaaaacccaatgaggtgac

SEQ ID NO: 339665 - DNA, 190 bp, Homo sapiens
aatgcaaaagttttagagataatgagcttagagaaattacatggggggaagaaatacctggatcatatttgaaagcatttgtcttgaattctgctcatctaaatgagagctctctttctacctgtgtcatttaaaaaacaatttcaatatcctcctacctgctaccccagcctgaagcagggactaatga

SEQ ID NO: 339666 - DNA, 386 bp, Homo sapiens
gcccctacccagaatacatcaattcattagtaaacacatcatgtatgaagaatgtctatttcttaaaacagagaattgcagcatgtctgtattctaaagagtctctattctttctgtagtagtgtaagttagttctgtagtggtgtaagtggtttcaaattctcagttcctcaataaaggtgtgtgtattcacatgttttaaagcatattacatttgtatttgtgacacatggaaaatagggagttgaaggtaaggaaaagagaatttggactggtcaaaattgtgaacaatatcatttggtgtaacaaaagacctaaaaatactttggtgctttatcattaaaaaaacagagttctcaggccaggtgctgtggctcacgtctgta

SEQ ID NO: 339667 - DNA, 417 bp, Homo sapiens
tctggagtaacgggcaaatgtaaaaaaacaaactcttgccactgcctgtcatgatattgttcttcatatgctgctcaacgacagcaacaggtgtccctttatattttcttaagtgtcacccatatagctattctcactgtcctgtggacattactagagtgtttggtggaaatgcttccctagctcaccctgcttacaagctccaaggctcttccctttacaacagtcgtaaggccagactggaagaaagcccccatgaagcccatgtttcagtatcatgttggcaccgtctatgagcaaccccatgactcagcaagatttctcgcactctccttggtaactcaagtcccacagattgctgctgtggttgtatgagtgccccaggagcctcttgagtgtggtgggcattgtgtgatg

SEQ ID NO: 339668 - DNA, 337 bp, Homo sapiens
catgctgtaggccagcggctgttggggatcgagtagggttccccagaaaggagggagctgaggctcacaaagaagcgaggccctggtatctgatcagttcgtggagacgtgggagagcctgcttgtcatctggaacagtttagcagcctcggcctccctgtctctcccagccctggggagtaccggtagcctctggccgtttcattatattgttgttaaggcccttctccttgtcagtttaccaggtttgaccgcccagccctggtctctgcgtggaaacccccgggggcccctctccttccagtaggcaacatcttcagagccaaaccctggccta

SEQ ID NO: 339669 - DNA, 646 bp, Homo sapiens
gtgttaaattttgtcaaatgctctctttgcgtcaattgagaaacgtggattttttcttcatcctgttaatgtagtgtatttcattgattgattttcctacattgaatcatccttgcattcagtgaatgaatcccactttgtcacgatgtatgaagtatttgctgaggacttttgcatctgtattcacacaatatattgatttatattgattaccaaaactcaagtcagttttggtagattgtatgtttttagaactttgtcagtttcatctggcttgtctgatttgttggaatacaactctttattgtattctcataatctctgttatttatgcaaaattactggtaatgttctttctgatttttgtgatttgaatcatctcccttttttcttaacttacctagaggtttatcagttttgttgatttttcaaagagtcaacttttggctggatgtgatggctcatgtctgtaatcccagcactttgggaagctgaggcgggaggattgcttgaggcagggagttacaggggagcctgggggacatagcataatgccatcgctacaaaaaataaacttagccaggtgagttggcacatgattgtagtcctagctgctcaggagggtgagtcaggaggatcacctgtg

SEQ ID NO: 339670 - DNA, 666 bp, Homo sapiens
tggtcttctcacagcagtcattccggacagaagtcagcaaacttttctgtaaagggctagatagttaaatatgtttggctttatgggccatgcggtctctgtcacaactccgcaacaaaagcagccagaggcagttcataaacaaatgggcatgactgtgatccaataaaactctatttacaagaagatgtgacgagctggatttggttctcaagctgtggttatgtgaatacatattatcgtttccattattcagatgagaaaattgaggctcagaaaagtaaagtgacttatcctatgcaactgaatgaataaacaatgtgtctggaacgagaattcactttctgtggttatagtttggtgctccatgaagtaaattgaagacatgtacccagaaagatttcagggaagtttgtcatcccaagataccatttgcctgtgattgtaattaaaattgggagcagatgaatcaagaagttagatgaggctgggagcgcggtggctcacacctataatcccagcattttgggaggccaaggcaggcggatcacttgagctgaggagttcaagaccagcctgggcaacatggtgaaactccatctctacaaaaattacaaaaattagacaggtgtggtggtgtgtgcctgtaatcccagatactcagga

SEQ ID NO: 339671 - DNA, 288 bp, Homo sapiens
ttgtatattggaacaagctttcatgtaaagactacatgggagataactttttgtagatcttctggtgatttccaaacagaaaagtatagatctgggtcctagtgtgaatctacacctttgtagaataagactacaaaagtgagagagatgacctgaatggcttccactccctccatctagctctagaattctagtattgtaagtacttgggaattaagttattttacaggttatctagcatatggttaaagcagcaagctttcagggatatcctttgtgagactttga

SEQ ID NO: 339672 - DNA, 149 bp, Homo sapiens
cagtaaagctcctctgaggaggcaacatttaaggtgaagcctgtaggttgagtaggatatatccatgggagaagggggcattgagtatttcagggagagagaacagggtgtgtgaaggcctttagacagaagggaacttgatggtcagg

SEQ ID NO: 339673 - DNA, 683 bp, Homo sapiens
actgggttcctctcggttgttggcagagttggggtaaaaagagaactaatgcacccattaaaaactctatcctgacccccaaaatggaactcatccattttattttttccaccaagctctagcacataccaacaattaaaaggtattacagtgtggggaaatctggggatgcccagctccacctacaaaagcaccctgtcatcagcccagagggccatgttagcatcctgggaggttctcctgggcagcagccagcatgttgcctggcaaaggctccacagagacgaaatggcttctcacaaaccctgcctctctatgatgacttccacctcctcacctgctgcacctgggtccccaccctaagaatcctagaagctgaggaggtcgttctccatccagcctccgggacactccgcaggcacatgacggtcagatttatgttttaaaaagtgtcccctggctgctgattgcattggaggtgagccagagtgactcgggagacttcacagaagaccagaagagagatgatggttggactagagtgacggggctatggcttggctgtgtctccactgaaatctcatctcaaattgtagcttccataattcccttgcattgtgggagggacacagtgggagacaattgaatcatggaggcagtttcccccatactgttctcctggt

SEQ ID NO: 339674 - DNA, 112 bp, Homo sapiens
aaaataaaacaagcagaaaagtacttccacttgctatcaaccaaatttacaacccacttcatctatgcccacatacttgccttcatttttgtaacaaaggatgagcatttct

SEQ ID NO: 339675 - DNA, 1325 bp, Homo sapiens
gatttcgctctgttgcccgggctggagtgcagtggctcaatcacagctcaatgcaacctcgacctcaagggctcaaggaattctcatgccttaagccccccagtagctgggactacaggggtatgccaccatgcctggctagttttttggtttgtgtttttgttttgtagagacaggctttcaccatgttgcccaggctggtctcgaactcctgagctcaagcaatccggccaccctcggcctcccaaagtgctgggattacaggcatgagccactgcagccggcctccaaaatagcttttggagtcaaatttaacataaatattttgatgctgattaaaataataatgaaaagccatgcaccagaaagagatgcaattataggctgtgtatacgtgcagagtaagtgcccagcagccagggattctgcatgatggactgtgttgctgtgaaaccccagcacccgggatctgctgacgttgagcccaacatatcccagcgcctgccttttgtaaactctgcaaagacgctggcatcctaaagagtccctggctcccgctggatacgttaaccgaggcatggtagacctggccctcgattccaggaacctagggtggtctgaaaaattaatgactctggcatttgaaaattaaagtgagaccctgtcttaaacaaacaaacaaacaaaaaagcatgatcacttggagttaacagacttaggtgtgcattctccatgccagccaactagctgggtgacctcaggtgagtcattctgcttccctgggctttagtttctgaggcctctttctcgagattgttgtaaggctcaaaagacacaatctccataaagtgtcccgtgaactgtgtggcgttctcaggcatcaggtgtcacttctagcctcataatcactggacccttaaacatcccggcacctgtccacggacttgtccgtcctccacgtgcagctccggggatgtgattgacctcctggggctgctacctggtgtatttctctacttatctgatcaaagaatgaaaatcatgaaagtgtcacaccaggcaggagtaatcggcaaataccagtgaatctcatggctattgccaccccattttcacacctcgaggaccccgggctgggtccatcctttgtaaagcactggagaattctcccacccagcaagggggctggctgcaggggcatgactgtggcctctggggagcccccggagctgatgtcccaggagccccactctgagcctgtgtaccgccgtggagggggcctgtttgcgggcagagtggggtgatggctgttttcctgttgtgca

SEQ ID NO: 339676 - DNA, 1234 bp, Homo sapiens
gatttcgctctgttgcccgggctggagtgcagtggctcaatcacagctcaatgcaacctcgacctcaagggctcaaggaattctcatgccttaagccccccagtagctgggactacaggggtatgccaccatgcctggctagttttttggtttgtgtttttgttttgtagagacaggctttcaccatgttgcccaggctggtctcgaactcctgagctcaagcaatccggccaccctcggcctcccaaagtgctgggattacaggcatgagccactgcagccggcctccaaaatagcttttggagtcaaatttaacataaatattttgatgctgattaaaataataatgaaaagccatgcaccagaaagagatgcaattataggctgtgtatacgtgcagagtaagtgcccagcagccagggattctgcatgatggactgtgttgctgtgaaaccccagcacccgggatctgctgacgttgagcccaacatatcccagcgcctgccttttgtaaactctgcaaagacgctggcatcctaaagagtccctggctcccgctggatacgttaaccgaggcatggtagacctggccctcgattccaggaacctagggtggtctgaaaaattaatgactctggcatttgaaaattaagtgagctcttgaatatatactcttgttgatccgctgggcatggtgtttggcattcttcgactggagactaaatctctgcagccatctcacaagtgacgctggcgcccataccagaaatatattcaataatctttctaagccctgtggacttgggtattcttccactctgacggagcctgagaattccaaaggaagtatgccccaggtacccagcaggcggaatataattgcctcttaggcagcagaaagaaaactaaagatcacattgatgcggaagaacatttaaggtctctctatcctgtgttgaattcacagtaaaggcgagagccgtgagtttgtactgtaaattccaggtctgtgacttctgactttggattaaaatccagttttctggaagtgaatctgatggcagatatgaccttgaattggctgcaagaccccagcgctggcctggctgccgtgcagcgcgcgctgctctgcactttgttatcatcaggagtgtggtggcctcctggccagctggtctacgacagggccatgccgggtcaccagctgtgcctctgcaggggtctccagccttgg

SEQ ID NO: 339677 - DNA, 297 bp, Homo sapiens
atactctgctggtgcaaactgaaacagttagtcaaaggtttctcagatattcttgcaagtgggagcagttttctgtcaagtttttgctaaccacccactttggtgtgtcaggctaaaatattcagtgtctgatgctctgatggttggtcaaaactttcttgaccctaataccccaggtattccaatatccatgtcatcgactctgtgagggtccagatttttcaacagatttcaattacaaacccccacagaacataccagaaggtaagccgatgcctcccttcacacttttctatg

SEQ ID NO: 339678 - DNA, 762 bp, Homo sapiens
tggagatgcactgaccttccttgcaagagcctttccctgaagttgggctcctgagagaagttctgaacatggctatccctgccttttcatcttgtcagcagatttcttcagcagctgctctacaaatatgcaatggaccctttaagcatttctcctttacagtgagcacaatgctaagctttgtcagcagatgccactggagcagcattgcagaagaaagcgagtttctcttcctgattttggtgtgctacttttcttcttcttgctccagctgcattatccatcagtggtactatgtataagaccatcccgctgtgccctgccctaccacctgcccagaggcacatccctcactgactatttggcctgattctgagcctgtggccaccttctcacagccctgcaacacaggcactgtgtgctccaggcctcacgtccccagcagtggcctgactgtgcacttagccacagcctcagtttgcctgtgctccaagaaattgcatcctatttgcccagcagctatggaccagctcctggtcctggaaaacagcaggcttctctgacatctagtggactgcaaacacaccttctccaacaaggcctgaccccagccttaaggagagaaccgtctttccgagttgtctttccttgggtactctccctcaatcctcggatacccttgaaagttctctttacattgttatagttattcttctatcactgtcgaataattttttatattaaacttctcttgctttacat

SEQ ID NO: 339679 - DNA, 1370 bp, Homo sapiens
aagtatggtttacagataaaaatggtttatgggtaaaaatgaggaggaggcagaagacattgtaggtttgaagagagaagagataaaagtttttctaggagagtgggaaagggaattgatgagggaatcatagtatgatttcaggcagctgtgaccattaaggtttgtggtcaaacaatgtttttcagtggagatgctgtcagtgtttcaggcaggcatcttccttggcatttagcatccctggcccttggtagtacccctcaatcattgtgctgatcaaaatgttctctgccccacttccaaacactgcccagggaactgaacctttcctggttgaggaccacagagagaccaatcacaaagttgcatagttttcttcagtcacattcagatgttggcagggactatgcaaaatctgggtttatgagtgttagggttagacagaaaaggacagtgaaaatagacagagtcaaaggaattgaaagtgtatgtaatgcagtaattataacagattttatgaacaacaaaatacctctgctggcctgaggcaactcaggacaccacagtgggaagggaattcctggctaccattgatgaacatttggacatgtgtccaattttgggctattattaataaagcttatatgaatattttacacatatctttgggtcgacatatgcatttatttctgttagtaatatacacagagaaatagagttctcttgggacttgcttgatcaaagggaatacgtatctttagctttatttaaaattgctgtatatttccttaaaaattacacatacacatactatgacttagccattccatttctggtatttacccaagagaaaataaagtgtatgtctgcacacacaaagacttgcaaattaatattcatagcagctttatttgtaacagcaaagaaccagaaacaacccaaatgttcaccagcaggtaaatggataaacaaattgatgtgtagccatacgacagaataacattcaataaaaaacaaagcaaacaaaatgacttctgatacacacaacatgggtgaatctcaaaataattgttttgggtaaagaagctagacacaaagaatacatactatgtgatttcatgtatataaaattctagacaatacaagctaattcatagtgctagaaagcagatcagttgttggctgcgtgtagtgaggattgattagagagaaagggaagaattgcaaaaggcatgaggaaacttctgggaatgtggacatgttcattttttttggcatggtaatggattcatgggtatatacatatgttaaaataaaaatatcaaattgtacacattaagaatgtgcaattgggctgggcatggtggctc

SEQ ID NO: 339680 - DNA, 364 bp, Homo sapiens
catcttgccctgaaatctgtctccttcttcctgctctggaacctgctactccttcttcctgctctgaaactgctgaaactcgcctctgtattcctgttctagagccacctacttcttcccgagctggaacctgcctcttccttctggcactgggatctgactcctccttcctgctctgaaaactgcctcctccttcttcctgccctggaacctgcctcctccttcctgagctgggaactgccttcttcctcctgctctgaaactgccaaaatccaccttcacatttctgctctggaaccaactccctcttcttgctctggaacctgcctcctcttttctgctctggaacctgtcttctccttcc

SEQ ID NO: 339681 - DNA, 307 bp, Homo sapiens
tgatacagtccaagaaacactagggagcttggcaggatctggggagctagctgatcagacttttcactgtcccagcctgagtgtatttgtgctatgctttttccagttctactggctgatgcacaattcaggtcccctgttttcttattttttatttgttttgtttgacaggcacatttactctctggcagcacattcttctaaaggcctggtcataaccaattagggacttctcatccatattatgaattaacctgtattagtattttagcagagattatttaaatcatttgttaggtgaataggg

SEQ ID NO: 339682 - DNA, 332 bp, Homo sapiens
tgttagggcataatagagaggaagaaaataaaactacagcaaagatgtaaatgacaaatcaagtagggctttttcacatcactgagcagagaggtacatgccagcttacacagctccactaggtcttccgtatccttgtatacttccattctatggtgttccatgtgcaaaaactgtaccaacaaagtaaatacaaacaactctcttctttttcatagctaaagcaaaataacgatcttcttgaaatctgtactggtcaggaggcatgagtttggggattacctgtaccgtaattaggtaagatggcagtgaccatgccactgataacacct

SEQ ID NO: 339683 - DNA, 112 bp, Homo sapiens
tcaaaaacacactcctttctcatctctttgagtattttaagacaaggcaaaggtataaggtcctaatttgtttttatataacccatgccaaggccataggcccaggcctgat

SEQ ID NO: 339684 - DNA, 548 bp, Homo sapiens
ctctcctattggtgctccactcccgaaaacatgagtgaaaggtaaattcacgtgtggtctggtgcctggtgaaacctactaggaggtgggagtcaccatgcagtggctcctggtttccatcactgtacttgcaaaccctgaggccgtgtgccacacagttgaaaacgaacacaggctgggcttcaagacaactagttctgttactctctgcgtgatctcaggtaaagccctgaactgctccaggcctcagattctcacctgtgaaataactaaagtagactagatcatcgctagatcgttgctgatgtccttccagcttcttttttttttttttaattttttactttttgagatggagtttcgctcttgttgcccaggctggagtgcaatggcgtcgtctcagctcacggcaacctctgcctcacaggttcaagcgattctcctatctcagcctcctgaggagctgggattacaggcatgtgccaccatgcccagctaatttttgtatttttagtacagatgtggtttcaccatgttggtcaggctgg

SEQ ID NO: 339685 - DNA, 522 bp, Homo sapiens
ggcaccaggccctcatggatgggcaacagtctaatagagaggaggcagaaggtcactgtgggcaggcagtccagcagagcagcacgcagggtgcaccaaaaggagcctggaggcccagagcttctggagggtgagaggagaaggtgggtgcagagggcagagtggatcccataacgtccaaaattttttcaagacagaccaactctacatctactcctcttatccgctgagtacctccaaaactcactgaaaaactccatagatttagctgaagttcttagcacttctgcccattcttcaatagaccagaaagaagaaaggaagcagcaggaaatgggcggaagtgttaagttgcaaatcctggcagcatgcccagaatgggaccaactcagcagacaggaagcgaaggcaataaaagagcaatctacgctacaggcaggctggagcagaaactcgggaaaggagggaagacagattactggaacagccagtttgcagggccatgaaacccgaactcttttc

SEQ ID NO: 339686 - DNA, 240 bp, Homo sapiens
gagggatgagggcagtggctttggcatcctgcaggctgggttccaaatctccattctgcacccgtgtgaccttggacaagttacttaactcagcctccatgtctttacctgcaaaataggggtgacgctgcctactgcttggggtggtcgtaagagagtcagatgaggtctcctgtgtgaagcatcagcacagagcaggcactcattgacatcagctataccacaccacttcctctgctg

SEQ ID NO: 339687 - DNA, 200 bp, Homo sapiens
agatttatcagcacgtcctaggtcaagaaggacccttcaacagtgcagtgtcaaggtcctggaaccagatctcagttcaaatcctaactccaccctttgctggctataggactttcagcaacacatggctcaattctctctgaacctctgtttcctcagctgtaacatgggagtaacagcaacctggccaggtgcggtgg

SEQ ID NO: 339688 - DNA, 233 bp, Homo sapiens
caacagttgccttctgcaggggtggggacagggagggaggtagggccaaggcgaggagcattttacatcagtgacctaacctggggagctatcagggcctatcttcagctggccttaagaggaaaaccagatcgctgatgggagaatccacaggagggagaggggaaaagggaatgtggctggcaggaggcaatagccccttcctttctgggcacaggaaggcagtcagggca

SEQ ID NO: 339689 - DNA, 274 bp, Homo sapiens
aatcgcttgaacccaggaggtggaggttgcagtgagctgagatcgtgccattgcactctagcctgggcaacagggcgagactccgtctcaaaaaataaaaacaaaaaaaactctgccctgctcacccttcagttgtcaggccaggcaggggcatcgccagcctcgggggtctccagctggcaaagaggcaccgagaagtctttcatcacaatgaatcttctcatatgtctaatctgggggctgtttatatgtagagtaatattctttcttaagt

SEQ ID NO: 339690 - DNA, 255 bp, Homo sapiens
taaaagcataaatttaaaaacgcaagaaccccaacaaatcccaagcaggataaacggaaagaaaaccgtacctaatcatgtcacagttaaacatctgaaaaccaaagatgaataatcttaaaagcagcaagaagaaaatgacacattatacccagaggaacaataacataaatgaatgctgacttctcatcaaaaacaatggaagggctggctgggcaaggtggctcacgtctgtaatcccaggactttgggagg

SEQ ID NO: 339691 - DNA, 564 bp, Homo sapiens
tcttgagagagaaggagtcttcctctgttgcccaggctggagtgcagtggcgcaatctccactgcttctatttgctgtcacagggacttccatcccagcatagactttcattgatcagtttccacagttccccctgcagaagctccccgggccacctccagggggcgtcctggaccctcccctgactggctggagtccccccaggggtccagagacacccacgtcctcttagccaggagcgggtggcagcgccaagggaccctgatggggcctggctctggcccatgtcgtgctgcactacccgcccaccacacactccaggcagctgtcaaggacaaggggccctgggggagcgtggcggggatagcttcttgcagggcctctggtccccgtggtcctccaggcggcgcagacagctccatctgcatcccccattctgcccctgtcacagtgttttcctgacaggctgggggtggtcagcctctggtgcagcaaggataggtcctagccacagcgttcattgagtgcttactgggtaccaggcacggttcagctcccagaccc

SEQ ID NO: 339692 - DNA, 698 bp, Homo sapiens
tctatcctggaagctgaagaaaatggctgtgatacttgtgatatggaatggaactatcaggactgcttattatgcaaagtggggtgccaacatctaagttggccttcagcatacagagtctcttaattgtcacatttccctgttatggaacctgagttgaccttatttttccatgctaaggattgtttatccctcacttaagtcagatgaaagttgaagccacactatgcattgtgctgcctgtctatacccaaagcatacctccttgctaaaataattgattcagaaatttgcccgtaagagtcacaactttattttgtgcatgttagtatattaaccagagattccattcacagctggaaaattcagctgaagtgcctctagcttattgcatctgcctccacctggaaatgttgactagaagcagcctatatttttaacatacatctacctactttataatgctaagaaaaaagggcccaagaggaaggggcatggatgccactttgcatgctatggtttaactctaatcaatttgtttgccatccggtacagtagttacgatgcttggcaggctaaccttgtttatatatttggcctcggaacttatcaggataacatttcccactaggagctctattccctaacctctcagacaccaaagattgcagaggaattctttctttcaacaaacatct

SEQ ID NO: 339693 - DNA, 168 bp, Homo sapiens
ttgtgcagtacccaacctgctcaactgtccatggcaggctgcatacggagcagccactgtactaagtcctttacgtacatgaactcatggctgtggccctgtgaggacttgcacagatgagaaacccaattccccttttgctgacaggctaggaggtctcagctaagg

SEQ ID NO: 339694 - DNA, 426 bp, Homo sapiens
cagcctcccaagtagctgggattacaggcatgcaccaccacacctggctaatttttgtatttttagtagagacagggtttcaccatgttggccaggctggtcttgaactcctgacctcaggtgatcctcttgccttggcctcccaaagtgctgagattacaggcgtgagccatcgcgcctggccagtagtcagtatttttaaatgagcagctcatataaattgagcatttcatcttttctagaaaaaaaagatttgggaacgtttgctaacatcagttcctgtgtagccacaatggactgctaaagctaggcagcagctactcccttagacaaattccatattctccagttagccacattcctacctctccttactgtctctggcatacagctgcatcacacctttccactacgtgccgacctttg

SEQ ID NO: 339695 - DNA, 731 bp, Homo sapiens
  misc_feature (440)..(440): n is a, c, g, or t
ttacaaattcttcagtaattggtgttataagatattttagttcatttcagagcagctgatactgatgaagccagttctgtctgcccagtttagggactggaaaggaacatttttcagctgcgttgttttttgttgttgtttggattttttaagatggagtctcactctattgcccaagctggagtgcagtggtgtgatctcggctcactgcaacctccgcctcccgggttcaagcaattctcctgccccagcctcctaagtagctgggattacagctgcccaccaccatgcccagctaaattttgtatttttagtagagacggggtttcatcatgttggccagggtggtcttgaactcctgacctcaagtgatccgcctgcctcagcctcccagaagtgctgggattacaggcatgagccagtgtgccccgccatcaggntgcattgtgtcacatgtttatataaatgccatttcagaagacatattttaaaatcaacacttttcactactattatatctttacaaagaggtgaaaattgtcaccttcttaggtggcttattcccagaggcctactagtcttacctcacgtctgggggcaagacaagaatggccaggtagcagcagggccagaatgtcatcttgttaggcatatggagatcagaatttcacaccacatccctgagcgtgctgtttgaaccaaagttttgtgtggcacacggtgtagttgtg

SEQ ID NO: 339696 - DNA, 919 bp, Homo sapiens
ccccaaactatgtcataaacaatcactctcccggaatcctatactccccccaaccctcctccattatctcccaattccactagaagcctccaacagcagacgaactctttgaaaacacaaaagctccctaacactttaagatgaatcttaaaccataaaaatgtttcacaaagccaaaaaaaaaaaacaaagaaacctcacaaatgttacaatagcagacatgtgcttactgcacgctcgctgcgagcttactaggtaggtactgcgctaacaattcctaatcctcctcggtccctaggaagcaggtagtgttattaatgcctagttcccgatgagacacaggtgaaatctcctgtccgggttaagacaggtaggaagtcaagacgcgagcccagacattccacctccaggactggtactctcgggctctttgcttctgtctctccgggagctccccaaattctatgcccaacaaacactccaaaacacaaagggaacccgatcccgaaaacacaaccgaaccttccgcattacaaacgaacccaaactccaaggtgccccttaagcgcgagagaaccccaaaagtatcccctaaacccacgttaaaacttccccaagccccagaacattttgcaaatggaaaaggaacccccaaatcttgtaaccgcccccccaaagaaatcttccaaacccctcaggtgaccctcgaaacctacacacgcccccaaagagccctcacccgcagcccccccaggcggcgggagaaggctgcagcccacacgcatgcgcgcgaaaggtaaaagggcccgccccctcgctccttccctccggccaccgcgcgggcagactagcaactagcttccctccgcccttttgttgacagacgcgcgcgtgacgctctcagccaatgagcggccgc

SEQ ID NO: 339697 - DNA, 618 bp, Homo sapiens
ctttatctccactccataatccccaatcccacctacccctcaaatacttacagtccctgctgtaatctcagctcagtgttaaaaatatcactccacagcctccaaaacctatagatggctgtttaccaaccaccaattcacatacatgttgagtatctcaaatctgaaaatccaaaatgctcccaaattcagaactttttgagtgccaagatgacactgataggatatgctcattagagcatttcagatttttcagacttggcatactcaactgataagtataatgcaaatactcaaaatccgaagaaatccaaaatccgaaacactttttagtcccaagattttcgggtaagggatacttgacctgtataaccaactgcccagggaggcaggctaacacagcaaaagccagtctctacagatgccatcctgctacaacctggccaccccctcaagtcccctaatcagttccaaccttacccccagcatctcaatgtcctcccccaaatatcgaaaagctttcaaatactactttaaaccaccgaacctaaaaatatcctctccagcactgaagggccgaatctcagtcaatctctcacagatcccaacacagcaatt

SEQ ID NO: 339698 - DNA, 352 bp, Homo sapiens
ctgtacaaccccttactgatatgaccccatttgttgagctgttgtggatgaaaagaacttaattgggttagtaaactggagaactgttttgttttggtgttgcaaacccatttgggtagaattagaagtgaaccctgaagatgtgactgaattgctgcaatctcatgatcaaacttcaacagatgaggagctgcttcttacgggatatgaaaagaaagtgttttcttgagatggaatctacagctggtgaacatgctgtttatttttgaaatcacaataaaggatttaaaatattacataaacttagttgataaatcagtgtcagggtttgagaggtaggaaggttgtaggg

SEQ ID NO: 339699 - DNA, 356 bp, Homo sapiens
ctgtacaaccccttactgatatgaccccatttgttgagctgttgtggatgaaaagaacttaattgggttagtaaactggagaactgttttgttttggtgttgcaaacccatttgggtagaatttgttccatgggtcaacaactctgtatcccctggccatgtataagaacatcacaattatgtattaccagccatatatccgaatactatatgctacttctcctgaagtcggcagcagattgtatatcctaataaacacatctgtgggaagctatcttaggacaacaagatcttcattataccccaagaagatctccagacctagggtgattaaaacattaactgcagacattaaa

SEQ ID NO: 339700 - DNA, 408 bp, Homo sapiens
ccttgtgcaggcagccagagtcctgggctactcctgacttgctgggtaatcccaaggagggcctttttcctctcttagtttcatcgtttgtctaatagcaaagagcgggaaggctggggtgggtgtgctgacttgagaatccactgtagatgagagtttccctcacctgcccctccttaactacattggaggtgtgtcattcgctgccattgaaatggtttgggtggactagctggccttgatgatagggtgcggtggaggggacatgcaggggttgaaagcagacacctgagatggaagcttgtggtaccttatgtgatttgaggcagggccagctagccgtccaccaggatgggtgcatctggtgccacagggtgagtcatcactgcacaacaattgctcagccag

SEQ ID NO: 339701 - DNA, 306 bp, Homo sapiens
ctgggattacaggcgcctaccaccacgtctggctaatttttgtatttttagtagagacagggtttcaccatgttggccaggctggtctcaaactgctgacctcaaatgaactgtctgcctcagcctcacaaagtactgggattacaggcatgagccacctcacctggtggtgaagactctaaaggctcttctcagatcagcctttgtcctgaatttcacatgcccgtgtccagttccctccccagcatcttttcaggagttccatggactcacctcttcattatccagggttaagctgcagatatt

SEQ ID NO: 339702 - DNA, 4487 bp, Homo sapiens
gagcagctctctgaagatcaactgcctccacattgcattctttgccccaaaactctttcctttggttgtgctaagaggtgatgcccaaggtgcaccacctttcaagaactggatcatgaacaactttatcctcctggaagaacagctcatcaagaaatcccaacaaaagagaagaacttctccctcgaactttaaagtccgcttctttgtgttaaccaaagccagcctggcatactttgaagatcgtcatgggaagaagcgcacgctgaaggggtccattgagctctcccgaatcaaatgtgttgagattgtgaaaagtgacatcagcatcccatgccactataaatacccgtttcaggtggtgcatgacaactacctcctatatgtgtttgctccagatcgtgagagccggcagcgctgggtgctggcccttaaagaagaaacgaggaataataacagtttggtgcctaaatatcatcctaatttctggatggatgggaagtggaggtgctgttctcagctggagaagcttgcaacaggctgtgcccaatatgatccaaccaagaatgcttcaaagaagcctcttcctcctactcctgaagacaacaggcgaccactttgggaacctgaagaaactgtggtcattgccttatatgactaccaaaccaatgatcctcaggaactcgcactgcggcgcaacgaagagtactgcctgctggacagttctgagattcactggtggagagtccaggacaggaatgggcatgaaggatatgtaccaagcagttatctggtggaaaaatctccaaataatctggaaacctatgagtggtacaataagagtatcagccgagacaaagctgaaaaacttcttttggacacaggcaaagaaggagccttcatggtaagggattccaggactgcaggaacatacaccgtgtctgttttcaccaaggctgttgtaagtgagaacaatccctgtataaagcattatcacatcaaggaaacaaatgacaatcctaagcgatactatgtggctgaaaagtatgtgttcgattccatccctcttctcatcaactatcaccaacataatggaggaggcctggtgactcgactccggtatccagtttgttttgggaggcagaaagccccagttacagcagggctgagatacgggaaatgggtgatcgacccctcagagctcacttttgtgcaagagattggcagtgggcaatttgggttggtgcatctgggctactggctcaacaaggacaaggtggctatcaaaaccattcgggaaggggctatgtcagaagaggacttcatagaggaggctgaagtaatgatgaaactctctcatcccaaactggtgcagctgtatggggtgtgcctggagcaggcccccatctgcctggtgtttgagttcatggagcacggctgcctgtcagattatctacgcacccagcggggactttttgctgcagagaccctgctgggcatgtgtctggatgtgtgtgagggcatggcctacctggaagaggcatgtgtcatccacagagacttggctgccagaaattgtttggtgggagaaaaccaagtcatcaaggtgtctgactttgggatgacaaggttcgttctggatgatcagtacaccagttccacaggcaccaaattcccggtgaagtgggcatccccagaggttttctctttcagtcgctatagcagcaagtccgatgtgtggtcatttggtgtgctgatgtgggaagttttcagtgaaggcaaaatcccgtatgaaaaccgaagcaactcagaggtggtggaagacatcagtaccggatttcggttgtacaagccccggctggcctccacacacgtctaccagattatgaatcactgctggaaagagagaccagaagatcggccagccttctccagactgctgcgtcaactggctgaaattgcagaatcaggactttagtagagactgagtaccaggccacgggctgcagatcctgaatggaggaaggatatgtcctcattccatagagcattagaagctgccaccagcccaggaccctccagaggcagcctggcctgtgactcagtccctgagtcaccatggaagcagcatcctgaccacagctggcagtcaagccacagctggagggtcagccaccaagctgggagctgagccagaacaggagtgatgtctctgcccttcctctagcctcttgtcacatgtggtgcacaaacctcaacctgacagctttcagacagcattcttgcacttcttagcaacagagagagacatgacgtaagacccagattgctatttttattgttatttttcaacagtgaatctaaagtttatggttccagggactttttatttgacccaacaacacagtatcccaggatatggaggcaaggggaacaagagcatgagtgtttttccaagaaactggtgagttaagtaagattagagtgagtgtgctctgttgctgtgatgctgtcagccacagcttcctgccgtagagaatgatagagcagctgctcacacaggaggccggatatctgataagcagctttatgaggttttacagagtatgctgctacctctctccttgaagggagcatggcagacccattggatggattggggtgaacagttcaggtcccatgcttggagcattgggtatctgatgtctgcaccagaacaagagaacctctgacggtggagaaccatgtggtgcaagaagagatcttaggtctcttcttttataccaagctcatcttttataccaagctgtgcaggtgactatgcctcctcttctgcacagaatgcttccaccagcatcctgagaagaaatgattacttctgtaaaacatccttttttccagcctctgggaatcagcccccccctctctgcactatccgatcctcatcaacagagggcagcattgtgttggtcagtgttcccttggcgagcaattgaaacttgtttaggccctagggttgagcaattttaaggttgagactccaagtctcctaaaattctaggagagaaataaagagtctgtttttgctcaaaccatcaggatggaaacagtcaggcactgactggggtgcttccaagaggcatgagagtgcctactctggcttgagcacttctatatgcaaggtgaatatgtactgagctaggagacttccctgcaaaatctctgttcaccctgggttcacatccccatgaggtaatattattattcccattttacaaataatgtaactgaggctttaaaaagccaagacatctgcccaaagtgatggaactagaaagtctagagctggtattctagcccaaatctgtctgaccgcaatacacagattctttattcctattcgacactggcttctactgaaaatgaaacggattgcagagggaataaatacaaagatggaaagccagtaaagaagtcagtatagaaccactagcgaatagtgttgctctggcacagaccactgtggttgatggcatggccctccaacttggaataggattttccttttcctattctgtatccttaccttggtcatgttaatgactttggagttattcagttaatgaccctttaattctcacaaccaaccagtcatgttgcttgaagccatttatagacgagcttcaaagcaactttaaaagattcttctgtagaagtatgagttcttcctttaattatcattccaactttcagctgtagtcttcttgaacacttcatgaggagggacattccctgatataagagaggatggtgttgcaattggctctttctaaatcatgtgacgttttgactggcttgagattcagatgcataatttttaattataattattgtgaagtggagagcctcaagataaaactctgtcattcagaagatgattttactcagcttatccaaaattatctctgtttactttttagaattttgtacattatcttttgggatccttaattagagatgatttctggaacattcagtctagaaagaaaacattggaattgactgatctctgtggtttggtttagaaaattcccctgtgcatggtattacctttttcaagctcagattcatctaatcctcaactgtacatgtgtacattcttcacctcctggtgccctatcccgcaaaatgggcttcctgcctgggtttttctcttctcacattttttaaatggtcccctgtgtttgtagagaactcccttatacagagttttggttctagttttatttcgtagattttgcattttgtaccttttgagactatgtatttatatttggatcagatgcatatttattaatgtacagtcactgctagtgttcaaaataaaaatgttacaaatacctgttatcctttgtagagcacacagagttaaaagttgaatatagcaatattaaagctgcattttaataaatatggtgcatagggcc

SEQ ID NO: 339703 - DNA, 434 bp, Homo sapiens
gtaaagataataatataatgaatatccatgttccccaaacctagcatcaacaatgatcagtattttgccaattctgtttcatatgtttctttccaattaaacattttaatacctggaaatgaatcatgcatttgcttttgagtttaaacgcactggtagaaacatacgtgtgcagacttgttaaataaataaaatacacttaaaatttttttaaagcactggtagaaatagaaaatgaccatatgattttctagcattgtcttttataagtaaataatgaaactttaaaatatgtcattgacatatgacttttccttgctttcaggtggtacaataagagtatcagccgagacaaagctgaaaaacttcttttggacacagtaagtctccttaacctgtcttttgacataaaataaaatgaattaagtgcactg

SEQ ID NO: 339704 - DNA, 276 bp, Homo sapiens
ctaatctcgaggtgttataaaattggtagcccttgatagactgacctggaaataactcttctgttggtgccaacctgtttcagaaacgaggaataataacagtttggtgcctaaatatcatcctaatttctggatggatgggaagtggaggtgctgttctcagctggagaagcttgcaacaggctgtgcccaatatgatccaaccaagaatggtaagagactgggaattccctctagtttttgtgaaatgaccataaaaaagtaaaagcttttggc

SEQ ID NO: 339705 - DNA, 6393 bp, Homo sapiens
cgcggccgctatatataatgcagcatcacaccatgtagggcatttactcttattttatacattcagatatgtttgaaacattcttaaggctacaaaacagaacatagaaaaataaacaggaatatattcaacacttacaaaaagtgatatgataaagaatataaagtactagtttccttttaacacttcaaaagatatgtatatatacttttttttacaagtaacatcacaaatgctcacatcttcacatgctcttaaagtattatttgtactcagtgtaaggctattatcgtttttcatacataaaattttctagctctgtaacacaatgcaatttttaatccattcagtaagttcaaccccaaagttgccgcttcccagcattaagacatgcacccacccctcttctaagattttctaaacttgtatttcggggagaaagacctcttttaaaaaataatccaattagtgggagagtaaatggctgacattagtagcaaaaccttagttatctgaaaataacatattggaaatgagacattattaggattttaaacaaacaatagcatttagacataaagtaggaagcaaaatacagtaaacagaaatagtgtagccaaatatcattctcttcagctaccttaagtaaaagacaaaacatttacctcatctaaaaatgaaggtaaaacgaaagaggcaaaaataaatattgctagtttctaggatggctgaatgttttctaaaccagaaatggttagaaaggaactttattgcaccaagtcaatcataagcaagtttgcagttcacaggcattttaattcaaccttgagtcacaaaggagaacaacacgctgcgagaatacagtctacagtctgcattaaataagaatatatcagcattgtggtctgggaaaacctatgcttgccaggacaaggcagggtgctgagcttaggtcatgccatgaaaatgaatttgtgggttatcagtaaacagtatgaggactacacagatgccagcatcctgctgccaaggagacatggggcaagagttgaagatttgagaggaaatgaagagacatacacaacaccaaaggaaaagggggctggaatcaagttcagccaaagcacctaacacaaaaaacaggtgagctttggtcagtctgttcttcaaaatatgtatgatcatatggtaatgaagtttcataatttccaactcaaaaatacaaatgatcctcagttctatacttttgcctctattctcttataaagaaatatgtcaacataacagtatgacataacagttaaaataaggacaaaagcttgcttatcttagtttgacctcagcataaggcaaaatcccctggagaatacatttaaaaacaaacttaaaaggaaaaaaagcgaaaccaacttcatgcaaagattccttttaaaactatcaaaagtcagttcttttattccagaggtcactgagaaaagtaccatctgctaaaattctctttcaagcacttcttccatcatatcctagaggtgagatatgggaaacagaaagcaaatcagtgttcctcaggagctatatctgttactcaattgagggtaagacaaagtgacaatgaagatatgagtagtatttccttccaatttttaaagattttcagaagctgagatcaaaccccactcaataaaatgcaggagactagaagcaacaacttattttggactcctgagatcaaacacattgaactttcaaatctgggtgtttctatcaaaatgtgattttcataaaatcagtaagctagtcctacataaaaaagcatgagctgaaagtggaggaccctctatcttctcattccttaactgagccaccgatgttaagaaaaaaatggcttaagcggtaccttcaacaactattctagttaagaaggtgacaacaaattgaggccgcgaattcggcgaaaactctttcctttggttgtgctaagaggtgatgcccaaggtgcaccacctttcaagaactggatcatgaacaactttatcctcctggaagaacagctcatcaagaaatcccaacaaaagagaagaacttctccctcgaactttaaagtccgcttctttgtgttaaccaaagccagcctggcatactttgaagatcgtcatgggaagaagcgcacgctgaaggggtccattgagctctcccgaatcaaatgtgttgagattgtgaaaagtgacatcagcatcccatgccactataaatacccgtttcaggtggtgcatgacaactacctcctatatgtgtttgctccagatcgtgagagccggcagcgctgggtgctggcccttaaagaagaaacgaggaataataacagtttggtgcctaaatatcatcctaatttctggatggatgggaagtggaggtgctgttctcagctggagaagcttgcaacaggctgtgcccaatatgatccaaccaagaatgcttcaaagaagcctcttcctcctactcctgaagacaacaggcgaccactttgggaacctgaagaaactgtggtcattgccttatatgactaccaaaccaatgatcctcaggaactcgcactgcggcgcaacgaagagtactgcctgctggacagttctgagattcactggtggagagtccaggacaggaatgggcatgaaggatatgtaccaagcagttatctggtggaaaaatctccaaataatctggaaacctatgagtggtacaataagagtatcagccgagacaaagctgaaaaacttcttttggacacaggcaaagaaggagccttcatggtaagggattccaggactgcaggaacatacaccgtgtctgttttcaccaaggctgttgtaagtgagaacaatccctgtataaagcattatcacatcaaggaaacaaatgacaatcctaagcgatactatgtggctgaaaagtatgtgttcgattccatccctcttctcatcaactatcaccaacataatggaggaggcctggtgactcgactccggtatccagtttgttttgggaggcagaaagccccagttacagcagggctgagatacgggaaatgggtgatcgacccctcagagctcacttttgtgcaagagattggcagtgggcaatttgggttggtgcatctgggctactggctcaacaaggacaaggtggctatcaaaaccattcgggaaggggctatgtcagaagaggacttcatagaggaggctgaagtaatgatgaaactctctcatcccaaactggtgcagctgtatggggtgtgcctggagcaggcccccatctgcctggtgtttgagttcatggagcacggctgcctgtcagattatctacgcacccagcggggactttttgctgcagagaccctgctgggcatgtgtctggatgtgtgtgagggcatggcctacctggaagaggcatgtgtcatccacagagacttggctgccagaaattgtttggtgggagaaaaccaagtcatcaaggtgtctgactttgggatgacaaggttcgttctggatgatcagtacaccagttccacaggcaccaaattcccggtgaagtgggcatccccagaggttttctctttcagtcgctatagcagcaagtccgatgtgtggtcatttggtgtgctgatgtgggaagttttcagtgaaggcaaaatcccgtatgaaaaccgaagcaactcagaggtggtggaagacatcagtaccggatttcggttgtacaagccccggctggcctccacacacgtctaccagattatgaatcactgctggaaagagagaccagaagatcggccagccttctccagactgctgcgtcaactggctgaaattgcagaatcaggactttagtagagactgagtaccaggccacgggctgcagatcctgaatggaggaaggatatgtcctcattccatagagcattagaagctgccaccagcccaggaccctccagaggcagcctggcctgtgactcagtccctgagtcaccatggaagcagcatcctgaccacagctggcagtcaagccacagctggagggtcagccaccaagctgggagctgagccagaacaggagtgatgtctctgcccttcctctagcctcttgtcacatgtggtgcacaaacctcaacctgacagctttcagacagcattcttgcacttcttagcaacagagagagacatgacgtaagacccagattgctatttttattgttatttttcaacagtgaatctaaagtttatggttccagggactttttatttgacccaacaacacagtatcccaggatatggaggcaaggggaacaagagcatgagtgtttttccaagaaactggtgagttaagtaagattagagtgagtgtgctctgttgctgtgatgctgtcagccacagcttcctgccgtagagaatgatagagcagctgctcacacaggaggccggatatctgataagcagctttatgaggttttacagagtatgctgctacctctctccttgaagggagcatggcagacccattggatggattggggtgaacagttcaggtcccatgcttggagcattgggtatctgatgtctgcaccagaacaagagaacctctgacggtggagaaccatgtggtgcaagaagagatcttaggtctcttcttttataccaagctcatcttttataccaagctgtgcaggtgactatgcctcctcttctgcacagaatgcttccaccagcatcctgagaagaaatgattacttctgtaaaacatccttttttccagcctctgggaatcagcccccccctctctgcactatccgatcctcatcaacagagggcagcattgtgttggtcagtgttcccttggcgagcaattgaaacttgtttaggccctagggttgagcaattttaaggttgagactccaagtctcctaaaattctaggagagaaataaagagtctgtttttgctcaaaccatcaggatggaaacagtcaggcactgactggggtgcttccaagaggcatgagagtgcctactctggcttgagcacttctatatgcaaggtgaatatgtactgagctaggagacttccctgcaaaatctctgttcaccctgggttcacatccccatgaggtaatattattattcccattttacaaataatgtaactgaggctttaaaaagccaagacatctgcccaaagtgatggaactagaaagtctagagctggtattctagcccaaatctgtctgaccgcaatacacagattctttattcctattcgacactggcttctactgaaaatgaaacggattgcagagggaataaatacaaagatggaaagccagtaaagaagtcagtatagaaccactagcgaatagtgttgctctggcacagaccactgtggttgatggcatggccctccaacttggaataggattttccttttcctattctgtatccttaccttggtcatgttaatgactttggagttattcagttaatgaccctttaattctcacaaccaaccagtcatgttgcttgaagccatttatagacgagcttcaaagcaactttaaaagattcttctgtagaagtatgagttcttcctttaattatcattccaactttcagctgtagtcttcttgaacacttcatgaggagggacattccctgatataagagaggatggtgttgcaattggctctttctaaatcatgtgacgttttgactggcttgagattcagatgcataatttttaattataattattgtgaagtggagagcctcaagataaaactctgtcattcagaagatgattttactcagcttatccaaaattatctctgtttactttttagaattttgtacattatcttttgggatccttaattagagatgatttctggaacattcagtctagaaagaaaacattggaattgactgatctctgtggtttggtttagaaaattcccctgtgcatggtattacctttttcaagctcagattcatctaatcctcaactgtacatgtgtacattcttcacctcctggtgccctatcccgcaaaatgggcttcctgcctgggtttttctcttctcacattttttaaatggtcccctgtgtttgtagagaactcccttatacagagttttggttctagttttatttcgtagattttgcattttgtaccttttgagactatgtatttatatttggatcagatgcatatttattaatgtacagtcactgctagtgttcaaaataaaaatgttacaaatacctgttatcctttgtagagcacacagagttaaaagttgaatatagcaatattaaagctgcattttaataaatatggtgcatagggcc

SEQ ID NO: 339706 - DNA, 338 bp, Homo sapiens
caacacagaagaggaatgtgaatgaatggtcagcaatcatataaggagatgtttaagacaggtacagtggctcatgcctgtagtcccagcactttgggaagccaaggtgggtggatcgcttgaggtcaggagtttgaggccagcctgggcagcatggcaaatccccatcttcaataaaaatactaaagtagccaggcatggtggcatgtgcctgtaatcccagctacttgggaggacggaggtgggaggatcacttgagcccaggaggtcaaggctgcagtgagctgagatcacgccattatactccagcctgggcaacaagagtgaaactctgtctc

SEQ ID NO: 339707 - DNA, 328 bp, Homo sapiens
attctaagaaacaatgttaaaagggaggatgatgaaattgactttcagtcctttaaataaatgattattgaaatagtttactcctgggctaaagataaaagttttgagcttcgattctcctatgtcatgctgcaggactagcgacagttttctgagtttattaaacaagtacttttaaaagtataaatagaatgtgtgtgagctgtattaggaaaaaggaaacgtaaagaaggattgtgttttcaattaactccactcatggaaaaaaaccttccatcttaacctttctcacctaaggggcaggatgttcagttatttcatatttttg

SEQ ID NO: 339708 - DNA, 656 bp, Homo sapiens
tgaaaagggttctgcttattggaaaaagaaatgtttgaaaatgactggtatccaatatctttgtttcatagatgagaaaactcaagtccttggtcctcagtcatgtagccaattcatgacagagcaggactgaacctcagcctcctgacaccaggctagtggacttttcccaatgccttcctgccttgtggggtagaaagacaacagaggttctcactgctgtgttgcccaagagtcttacaatgagtagcctgcatatgaagatggtacttgtgacggaccacattgcaccagagcacataactggagggacaggagatggtggatttgggctcatttttcatccagcatattctcagcctccctcttcaataagcctgtaaagacctagtaatcctctatggcctgaactgttcctgggttctccaatgctctccccaccctctcaccccaccattccattagctgttcaatggctgacctttgctggggggccaattctatcaagggttattctgagacaatgaaatccctgccactagccctccaaaactagtattagccatccctaccccatatgtgtgcacccaaagcacccagtgcacctggagcacctcatacttccttgcacctactgctgtcaaataagagtctgt

SEQ ID NO: 339709 - DNA, 696 bp, Homo sapiens
gctgccactctaagcaaacagatcccgagccctggactctgaagcttgggcccagttctccttttctccgggtttcagatcccactgtgaagtgagggggcccttctgattcaggacccggggaagccaggggcatgagcatcggtgcctcttctctatttcaaggacccttctgggtgtaaagttctctgagatgccttacatggattcccaccactgcaagataaccatcgtatgtaaagtgttatgaccagcagagcgtaattgaagtgcattccagagggaaagacagcggctcagagttatgagaccctaagcagtcatggcccagttcagccactcccggactcctgacccagggaacctgtcagatggtcctttggaagatgaggatgaagctcttgtgaatggaattcgtgaccttatagaagaagcccaagagagctgccttgtcctttttaccacgtgaggacacagcaagaaggtgctgtctgtgaaccaggaagcaagctctcactagatttggaatctgccgatgcctccgtcttggacttcccagcctctgggacagggaaggagtgacagcttccaaactgttgatctgtcagtgctgaaaccagcaggtcccttcagcgagggccaaatgagcggaactctccaggatacgtctgatttatatgatgccctctctgggtc

SEQ ID NO: 339710 - DNA, 720 bp, Homo sapiens
ttgaggaggcatgttcaagatttgtcaaattacaagaatttgttacttgaatcacatgacatcactcagatgacgccactcagactgataatacagctcagccagttctgcgatcccacccaggaatgaatctgactctgcttgaattactctctctccattgcaattcccctgtctggataagctggccctgtctaggcagcaggcaaggtgaacacttgattacaaaaggatgaagaaactgaagaatcaacaactcttagatcgatcagagaagcgagggcacagggcaaaccactgcctccaaaactggaaagcctgtgtggatgaatattgcttccaggagtcacataattacatctaaaatcatagaatgttagagctggaggaatctttagagtttgcccaaggtccttcaccagcattttacagaagattcttcgatttaactgctcttaattacatcccgttgcactggccccatcaagttgctttaaacagcccttctagtcaacagagctgcagagaaaaaccttggttggttcaggtcactaggatgcaggaccatgggcagccagctagcagcagtgtgatctgacagcccctttcttcagctgaaacaattctccactcctcatatctgaagttgcttccaaaaatgagctgcccacacacagcccttgccccaggctttgctctctgagaaacttaggctgagaa

SEQ ID NO: 339711 - DNA, 599 bp, Homo sapiens
ctcagcccgtctgtacccaggcgctcattagaacagcgtgttgctccacaccgccttgtggtgtttgttaccgcgctcttggggttcgaaccgatacagcaggcttgcagctatttcattggtttaaacttttatttttttattgcaaatgaaaattactatcaactatcattacaaagctgtagaatatgaagttcgaaggaaaacgctgaatcagtatacaaaagcgtctcaatcagactcatccattttgaagcaattcctctgccattttgccacctcctctcaaattcagcgacttaccagaaagcctgtgtggatgaatattgcttccaggagtcacataattacatctaaaatcatagaatgttagagctggaggaatctttagagtttgcccaaggtccttcaccagcattttacagaagattcttcgatttaactgctcttaattacatcccgttgcactggccccatcaagttgctttaaacagcccttctagtcaacagagctgcagagaaaaaccttgagctgtcacacttcatttgtgagaacactccagagcttcctccagctgctgattccaaaccagcttcac

SEQ ID NO: 339712 - DNA, 398 bp, Homo sapiens
aaaaaaaacaaacagaagtttattaacatgtatttcatatacacatgggagatacccagggactgagtaattcttcaacaggtggcttagaactccaggctcactatagcatctttaacaaagaagaatacattttagagaaggataatacattttagacgagacaaaggaagaggaccttgagtgtctagggacagcaaattgtgggaaggcaaatctatgggaaactaattgtgataaaggctagttagcaaagtttgttatgtagagtcctctggtatcttctccaggctgataaagatctaaagtcatttccagtgattagcttttgttctttctattagagagggaaggagagacacctttgtaaatttatgtcttctttttaggcaaatagc

SEQ ID NO: 339713 - DNA, 1113 bp, Homo sapiens
gctcagcgggactttgcctgggaggacacgtacatcagctaaagtgtgccccctccccatgtccctagtgggtgacccttgccccttgctcttctgctcacctcccaagttaattaccctagtgagcacactcccttattaaaacatcagggcagctgggggaggatcctaactcacgggaggctgtgggggaacagcctcgttgacccgtgtgtgacacagcggctgtcgtggaaggcaaactcggtgtggtctgtggggctcccatggtggggtgaggcgtggagtcccggcctagctgccccacctgagaggagggtgcccgggcagcctctgagacttgggctgggacccttggtctggaatctgcacgctacagccagaatctgataggatcccatgttactcggggtgggctgtttttgaagcagcatccacctttcctccagccccaggctgcggctgctgccactggaatatttggggtcttcctacgcacgctgctgtgctcccttgcgttctcctgggtgccgaggtcctggcacgtcgtagtttagagaggccccatcttcagactgcagcacagtgacccacactgagggagtttatgtccacagagacctctttgttggggacaggacctttctgagaattctctggggcgaccacaggcaattctaggccagcgggtgggttgtggaacctgactgggctgacacctgggctccacaacccactgttagggcaggaggatcccacctgtaccttcttggatcccaggccactcgaatggagtctggcgtccttcctcctcatgcaggtgaccaaaccctcaaagtcactccagtgtgcaaaggcctttggccaccacagctgttcaaaatctgctgtaactaacaggctctggtcttcaccctgatgtatttattccacccacggtggcccatctcatgtggattcccagtaggccagcccgttttcaacaagaacagtcttctatcttcacattagaaacccattagatttttggacttcacaactaaattgtgggacagttttccaggctaacattttgtatggtttctggcatgttttcccagtgtgaatggggcc

SEQ ID NO: 339714 - DNA, 1143 bp, Homo sapiens
cctttaaagggtgactcgtcccacttgtgttctctctcctggtgcagagttgcaagcaagtttatcggagtatcgccatgaagttcgtcccctgcctcctgctggtgaccttgtcctgcctggggactttgggtcaggccccgaggcaaaagcaaggaagcactggggaggaattccatttccagactggagggagagattcctgcactatgcgtcccagcagcttggggcaaggtgctggagaagtctggcttcgcgtcgactgccgcaacacagaccagacctactggtgtgagtacagggggcagcccagcatgtgccaggcttttgctgctgaccccaaaccttactggaatcaagccctgcaggagctgaggcgccttcaccatgcgtgccagggggccccggtgcttaggccatccgtgtgcagggaggctggaccccaggcccatatgcagcaggtgacttccagcctcaagggcagcccagagcccaaccagcagcctgaggctgggacgccatctctgaggcccaaggccacagtgaaactcacagaagcaacacagctgggaaaggactcgatggaagagctgggaaaagccaaacccaccacccgacccacagccaaacctacccagcctggacccaggcccggagggaatgaggaagcaaagaagaaggcctgggaacattgttggaaacccttccaggccctgtgcgcctttctcatcagcttcttccgagggtgacaggtgaaagacccctacagatctgacctctccctgacagacaaccatctctttttatattatgccgctttcaatccaacgttctcacactggaagaagagagtttctaatcagatgcaacggcccaaattcttgatctgcagcttctctgaagtttggaaaagaaaccttcctttctggagtttgcagagttcagcaatatgatagggaacaggtgctgatgggcccaagagtgacaagcatacacaactacttattatctgtagaagttttgctttgttgatctgagccttctatgaaagtttaaatatgtaacgcattcatgaatttccagtgttcagtaaatagcagctatgtgtgtgcaaaataaaagaatgatttcagaaatacgact

SEQ ID NO: 339715 - DNA, 343 bp, Homo sapiens
ggctcacacctgtaatttcagcacttttggaggccgaggcgggcggatcaagaggtcaggagatcgagaccatcctggctaacacggtgaaaccctgtctctattaaaaatacagaaaattagcctggtgtggtggcatgctcccagctactctggaggctgaggcaggagaatcgcttgaacccgggaggcagaggttgcagtgagccgagattgcgccactgcacactccagcctgggcaacagagtgagactctgcctcaaaaaaaatcaagcctaggtcccaggtggggtttgaaggccatggcgtggtctcctgtagggaagagcaggttgtagagtg

SEQ ID NO: 339716 - DNA, 502 bp, Homo sapiens
gcatctttttttcatagataatggctactgaagtcatattatgaaatattactaacaagtaaaataacttggtgtaagatacctattcagtgttctctatatcccattcaacagaagagatgtcctttgctggttttgggtatccaagacctcacatctgggataacttggggtaggtctttgtagaagtggcctccaatgaattatgcatctctgtagccacacccttgggtagttcctccccgctgaccctggactgggtcatgtgacttgctttaggcaaaaggatcttaacaaataggatgcaggcagaggcttgacaggtttggtgaggtagggcgcatcctctctaatttctggaaacctttgagcctccatctgaataacctcagcccagcctccgtggaggatgagaaaacactaagagagctccagcatcccagccgaggacccaggcatggaagcaaggccacctggaaccatctagcctcagtcaagccag

SEQ ID NO: 339717 - DNA, 372 bp, Homo sapiens
acacagcacctaggatctatgaacaacttaagattccacaaaaatgtctgagattccagaagttattggctctaaaaatatgaaaagtaaaacctcaaaaccgaaatcaataaatttttaattaaatgcttaccaaatgcaaaatttttcagttagccaatggcaactcttctgagtttaacctgaaggcaaaaattttttcctgctactttgcagactgttataaaatgatatacaaagtatacataatacagtaggtacatcttaatatgttttaaataacatgtggtctggtgcttccagcttagggaaatcttaaaaatgccttgggtatggatattcggggaagggtataaaataccagaaaaatca

SEQ ID NO: 339718 - DNA, 453 bp, Homo sapiens
cctgaatcgtaagcatctaattaaatacaaataggttacttatatttatgtaagagctcttcagcttgtctatgaggcaaaatgccaacaagtgaagaagtacaggatggctctccagtatcaaatgaaacgatgtggagtgtgtgagagggcatgatttgaccttgacataagggtgataatgattctcagaagaactggaagttaggacactccagtaactcccctgagattcaacagtctaatttgtattagtaggaatagggctatatacatctctaacattttgtccagcttaaaatgctacctagcattattacattatctcataagccagtataaagcagctctagtataccatgaattcagtttcccttcaagttaaaaagcacatttctcgtgatctgtgacgtacgtttttctggttttttttttttagtccaagctaagcat

SEQ ID NO: 339719 - DNA, 383 bp, Homo sapiens
cccaggagacacaagccatgttctgctccagttggttcacgtagggtaaactgatgcctgtgacttctgcccaacacagtggcttgggaaggaaacacagggggtatccccaaaaccctctaaacaaatgctgaataacagtccagaaatgggttagttttggccaggcatgatggctcatgcttataatcccagcattttgggaagccgaggcaggcaaatcacgtaaggtcagttcaagaccatcctggccaacatggtgaaaccccgtctctactaaaattataaaaattagctgagtgtggtggtaggcgcccgtaatctcagctacttgggaggctgaggcaggagaatcacttgaactggggaggaagaggttgcag

SEQ ID NO: 339720 - DNA, 384 bp, Homo sapiens
tactttcaacaagacctatgtagacatggaactaatgaataaaaagaagtggtctggaatgatagaattttacagctaaaaaggacctgtaaaatcatgtacatcattctgcatgattcacggactaggagtccctggtcaaaaacttcaaaaactaagtgatgggtcccaagttactcagtggcagaaacttgattcagtaacatgtcagcttgtgggcttgaaaagtcttaagtgtctctacttcttctatccttgtgctttcccgggactttacacaatcccacctcccactggacaattgtcaaatcccagagagtatgggaagtctgttcatctctgatcaccataaatacgtatgcacatacacacactgcaatcggg

SEQ ID NO: 339721 - DNA, 222 bp, Homo sapiens
gcttgagccaccgtgcccagcctattcttaactttcaattgcagaaggctctctactcacaaggtccagcaattacatctgagtgctcattaataaaaatgatttcttgctatgtcacaatgaaagcactgtgaaattaatagccaagttttaagacatgaaatttctttttttttgagacagggtctcactctgtcccccaagctggagtacagtggcgca

SEQ ID NO: 339722 - DNA, 188 bp, Homo sapiens
ccaccccaatcacacgtgctttcatgccatcttctcatttgatgctcacaacaaaccaaggtgtcaggacaggatgtcatgcctgtccctaacctcagagaagtagccagcccagcactgcacagctcgttaccagcagagcctggatcccagccatctgcccatcgtgctcagtctagtcaccctag

SEQ ID NO: 339723 - DNA, 392 bp, Homo sapiens
gctaggtcagatttggggcccgggcagtccaggagaagtgcatttatgtcagcttggggaggtcgcaaatccgtgctgtgtccaagcccaccaggaatggattcaggtgtttataggtgtggggattcaccaggttaaacccaggcccgtgtgagcaccactggccctagaattagcctcacctggcgccggcctttttgtgatggctcctgattaaatacccactaattctggatctgctggtgaccacagagttcacctgatgggtcccctacaggcagcattcaatccaggaagtgccagcatcacatggtgacttctggtagctgtaacatttagtgactgtctccatgtcatgcacaggggtgacatcgagaccctcttatgcctgg

SEQ ID NO: 339724 - DNA, 184 bp, Homo sapiens
gaggtcccataggttctcccttgagaacccatcccaatcggccactgttcaccaccctgtccttgcccacccagccagtgctgtagccccgccatggtctcctggcagctgccttcacctgcctaaggtctatcttccgcttggggccacagggacccatgaaatcattccatcagtccacact

SEQ ID NO: 339725 - DNA, 153 bp, Homo sapiens
ctcttcacatcttactgtccacctcaatccggatactcctcaggtacctgaaattcaacatggcttcatctgagctaaccactttccttccccagttcttactttctcctttattgcctgaatgacatcatcattttctaagtcactcaagtt

SEQ ID NO: 339726 - DNA, 172 bp, Homo sapiens
ctataataggatagtgattcatattaggagttctaagacatctttttaaatagattgatttttaaaggtggaaataaaggttcagggtctgacaatacaacagatatcagagattttgttggagttttcaccatgcactgataagtctaggtcttggtgttaggagcattgg

SEQ ID NO: 339727 - DNA, 277 bp, Homo sapiens
ctgtgcccattatgcatcaggccctgctggggttgtacccacagaagacacaaaagtcagctgctatatgtctgcaagtagctaacatgttacccttcaaagaggaggcagtacactgagcatgcaaaaaaaacaaaacaaaactatttcagggagtgggctgggcacggtggctcacgcctgtaattccaacactttgggagaccacagagggtagatcacctgaggccaggagttcaagatcagcctagccaacatgatcaaacactgtctctac

SEQ ID NO: 339728 - DNA, 170 bp, Homo sapiens
attctagtttatacgtgactgtaggataaaggagaaacagccttgaataatttctacaaatgatcctcaacttgcatttaacagctgtttctaacctactctcatgcaaacttgagaggctcactaagagagaaatggtcatattccattcccctctcatctcttttttt

SEQ ID NO: 339729 - DNA, 326 bp, Homo sapiens
caaaagaaataacagattttatctgacttattatacatctgtggcttgatttttgcatgtacttagtggttgctttaagcctatagtataaaatgcagatttctaaaaatcatcaattcacttatataagaaagatttactgcagatgcatggtatgccagacatttttctggttgtaggaaatacgagtcagttaagtccctcgaggagaaaaacaataagcaagaatgtaagaaaaatgagtgagatattttcagataattacaagttaaaggaaattacacaaggtcatatgagagagggtgatggttgttggggattgcgga

SEQ ID NO: 339730 - DNA, 734 bp, Homo sapiens
tctcactgtcactcaggctgaaatgcagtggcatgattatagctccttattacctcaaactccttggctcaagtgatgcttctacctcagcctcccaagtagctgtgacttagcgggctactggggaggctgaggtgagaggatcattcttctaagaatgcaccaccaccatgcctggcaaatctttttctttaatttttttaagagatgggggatcttgctatgtttcccaaactggtcttcaactgttggcctctattgattctcctgcctcagcctctcaagtagctgggattacagacacaagccattctgctccctattttaagatttctctgtggtattccttattgttttctgtctgctatctttagaaaagataaggtcttccataccttttttttaaggaacaaaaggtatttttaaatgctacactgactgataggaaaatatgcagatccaatctttttaattctcttgaatctaaaagtaccgggttaccatatggaaacaataccaagccatccttaaaaaagagtttaaattctaaattgtaagagcagttataacaactttcagtactttcttcaataactatattttgattagcatttctgtgacattagtaactctgataaaatgatttcatgaaacaggaggaaacgaccaactcaatagctagaaaagaaacatttcaactagattaaaacaaagttaaaacttgtactgagacc

SEQ ID NO: 339731 - DNA, 330 bp, Homo sapiens
ctggcaacctttgcttctatgagttagattattttagatagcttatataagttgagtcatgatatttatccttgtgtgacccacttatttcacttagtataatgctctcaaagttcatcatgtcacatattgcaagatttccttttttaaagttggataatatttcattgtatactacatatatataccacaattttaaaaaagtatttgttcatccattgatggacattagattaatttcacatcttggcaatgctagtatcccttcaatatcattatttcttttttctttttttttttttttttttggagatgggagttttgctcttt

SEQ ID NO: 339732 - DNA, 3217 bp, Homo sapiens
gggagaccgtccaaggagggcttcagcggcagaggggagaccgtccaaggagggcttcagcggcagaggggagaccatccaagggagtgagtggggactaaaattcagcctgaagttctggcctacgtctgtgtcaaaggtgccccctttcaaaggtctcagcatcctcacgctacctcctgccgccacttccacctgggccccccgcagccgcagcagctcgctcccgacttcccgctggcccaccccgtgcagtcgcagccaggcctcagcgcccacatggccccggcccaccagcacagcggcgccctgcaccagtcgctgaccccgctgcccaccctgcagttccaggacgtcacaggtccctccttcctacctcaggccctgcaccagcaatacctcctgcagcagcagctcctggaagcccagcaccgcaggctggtctcgcaccccaggcggagtcaggagcgtgtatctgtccacccccaccgcctccatcccagcttcgacttcggccaactgcagacacctcagcccaggtatttggctgagggcactgactgggatctcagtgtggatgctggcttgagtcctgctcagttccaggtgcggcccatccctcagcactatcagcattacctagccactcctcgaatgcaccactttcccagaaactcctcctccacacagatggtcgtccatgaaatccgaaactacccttaccctcagcttcacttccttgctctccagggactaaatcccagcagacacacctccgccgtacgggagagctatgaggagctgctgcagctcgaggacaggttgggtaatgtgactcggggagctgtacagaacaccattgagaggttcaccttcccccacaagtataagaagcgaagaccccaggatggcaagggcaagaaggatgagggggaggagtcagacacagatgagaaatgcacaatttgtctgtctatgctggaagatggagaagatgtgagacgcctaccctgtatgcatctctttcaccaactgtgcgtggaccagtggctcgccatgagcaagaaatgccccatctgccgagtggacattgagacacaactgggagccgacagctgagggaggaattagccagtggacaccccatttccttcaccaggtccccccacggccatagcccttgcagccaaactttgccttctgagccatttgacgtagaggaaaagcctgcaagcacattttgtggaaagaggagttggtggtatcggtgtcgagggagaggagggggttggggaggacccacctctccagaatggcgactgtccccatccgcctggctgagcaggagagagggagctggcggtgcccagcgcaagggcgggaaggaggggcccaggctgcggagaacccaggtgggatcctgaaggcactagctgacagacgggcccctcaatcctgtcctctgaaggattgtatatatacctctcgaccacgtaggaaccatgtaggggtctctagctatttctgtggatggcagccggagcatgttagcttaagaaaaatgttgtgtgtggtgctctagtcatcttgtggtggacatgtcgctattaccgaattcgcaccaaatatttctcattgagtttcttgttttggtgcctgaccgaaccaacgacagccccaatcttcccgtctttatgagagaaaaggaaaaaggaatcaaaggtggaagaaaaaaaaagccaattctctgccccaggctaatattagggactggggaggggaccaccagaggggagagggaagctgcttactttgggggtagaccctgaagcccctcctccttcccccacagatggggacaggaggtgatggggtgctcagaaccctgcagctcccacttctttagccgggcagctgtttgggggacaagagagggccagggtctgtgcttctgctcccggcactggtcagggagtctgggaagagtggagaagaggcagggtcaggcctcagcatctcacatccaccacctccaggaggggagaccactggtaagtcctcctcctgctcaactcaagggactcagaccctttcttgactgagacgcatgagtgccttctggggtgagagcagccccagggtttaagttgggcgtcctagcagctgcagcagctgtgccgccgcgggtccaccgaggacgccaatcaatcaacccaacaccacaagcttggttgggtgcaagcagagggtgagcaggggctgcccctccacctggccaggacccccttcggcacccagttgcccttggccaccacctgtggcaggactcaagctcctcttctgcaaatgttcccagcctccgtgcaagtattcttaactctttacgcctaatgaacaagcacagtttttcaatggtgaagaaaaaagcaccagactttttttctttttttcctaaagaaatcccctaagccccccgcctgtaggcgggacaaacactccctgcgtggggctgtagcaacgtctgtcaggcccccttgtgtttcatctcctgcgcgcgtagagcaaatgctagagcgatttcagctgatagaaaaacaaaaatgaaaaaaaaaacacaaaaaacaaaaaacatggcacgttgctagtttacagggttttgtgagtttaaatgccttatatttaacaatcataatttatgactaacttgtagatatcgtgggttcttatttaattatttttatagttgttttgcatttttaattataatttatttatttagaaaggatactaattttttttattactcctattacctcattttggcgttgtttctgggagtggaatgctttgcatgcattggtacgatgacaaacaactacgaatacaaaaaaaaaatttaaataaaattctgcaaactttatttcgtccgaactatcagggtgtgtgattgcaagctgtcctaccgtggtgctggcctctttggatacattccatacgaaatgcaaacctttgattctgtatgctgtgatctagtgaaaaactccaatatagtgactgtatttagcacatatataaatataatttgcacttgtcagcagactggggtaatcctttcacttgctacacttggcacccccccgcccccaccacaaccctgcctctccatcatgaacctgcctttcctcctccctcgctcctcccacaacctcagcccacc

SEQ ID NO: 339733 - DNA, 171 bp, Homo sapiens
accgtggagagagagggagacgagagggagagggagagggagagctgtttcacagtttttgatgattgtgaataacgctgcctatgtgtgcaggtgcttttttttgtttgtttgttttgaggtggtgtctcgctctgtcgcccaggctggagtgcagtggcgcgatcttgg

SEQ ID NO: 339734 - DNA, 366 bp, Homo sapiens
gatagcacaggtcaggaaggctagggcgttggagcaggtttctcagcggtccaggctctaaactaaagctgtccctctcaaaagaatggaaatgatttcagattgtattcagcagcacgaagcaatgattcctaaatagttaaaaatctagaaagaaacactaagaattgtattgggctttgtagaagagaccccagaattttaggatttgggatgtatccctgcagtcaggcccagtccccagtgcacctgcagatctttgacagctgctggttgagcttctgctaagaggtttccttccagggactccatgttcactgcctcacaaaggcaggccagcctcatgctttagacatccttgctctt

SEQ ID NO: 339735 - DNA, 347 bp, Homo sapiens
attgttcttaatacacatttttatgtttggtggcctcattcctattttaggagatgcagaaatcaaagcctcaaagaatcaaaaatgatagaagagcttttcagaggaataacactccattgttgagactcagaacttaagtacaaactgaagcaaacccaaaacaaattgctctgtttagcccagtgccaatctgagaagcgctctttttattcaagatgagatgtgctgtgacgtcaaccaaggaaacagaaacatcaaaagtggacagtattcaaatgatttctgtgggaagatgcagagcaggatccaaaacactgatctatatatttctgcatatgtttgct

SEQ ID NO: 339736 - DNA, 304 bp, Homo sapiens
acaaatctgtaaagaattccaagacctcttgagccaagatagatcaccactgggatcctccagacccactccaattctagaccttgacatccagagacatttaacacatttcagtttgatcactcatggctttgggactccggcaatatgtgcagctctaagcactttccaaacagttctcagtgaaatgctgaactacttggaaaaacacactactcacaagaacggcggagcggcggattctggccaaggacatgccaactcggagaaagctcccctgcggaaaacttcagaggctgccgtg

SEQ ID NO: 339737 - DNA, 1174 bp, Homo sapiens
tgagcctggctcagcatggtttttaaaataacaacaaaagtgtaaaactgtgctcgcatttcgagggccaaagagctacagctatctatgcccccaaggggcacagaagcttttttaaaaattgaggtaaaatctataacgcatggagtgcatgggctttaagtatatgaggttttggtaaatgtgcaaatccatgtgaccaccaccccagtgaagacacatttctatcacgccaaaaagtccccttccaattcttaacaatcattccctccaccccaccctggcaaccaatgttttgattttgacaagagagattagttttgcttattcttgaattttgtgtaaagggaacataaagtatgttttcttttgtgtctggcttcttgggctcaacatattttcttaaagattaagccacgttattgtgtgcgagtagatcattctgtttttattgctcagaagtagtctgaattgtatgaatatgccatagtctgtttagccattctcctcttgatgtgcatttgggctgcttccagtttggggctgtcatgaataaagctgtagttaacatgcatacatatgtcttttcatggacatgtgtttctgtttctcctggggatgccatcggaatggaactgctgggtcacagatagatgcttgtttaacatcgtaaggccatatggttttccggtgttgtaccatcttacgcccatcagcaatgtatgtgaattccagttgctccacatactccccagcatttcatccattctagtggctgggaacataaccctatgtatgcttgctttcctacctgtttcactctgcactttcctgatgggacgaagatggccagtcttcgtcccatcaggaagaaatgtgtgattaaaatccaaattcatgctgttttttttctctgcaactcgttagcagaggaaaacagcatgtgggtatttgtcgaccaaaatgatgccaatttgtaaattaaaatgtcacctagtggccctttttcttatgtgtttttttgtataagaaattttctgtgaaatatccttccattgtttaagctttggtttgggtcatctttatttagttggcatgaagttgaaaattaaggcatttttaaaaattttacttcatgcccatttttgtggctgggctgatgggagcaagatgg

SEQ ID NO: 339738 - DNA, 87 bp, Homo sapiens
agcaggagcaagagagagtgagaggggagatgcttcacacttttaaagaccagatcttgagagaactcagtaccatgagaacaacac

SEQ ID NO: 339739 - DNA, 338 bp, Homo sapiens
ctaactaaaactattccatcagtgaatgtaatttttcaaaaaaacatttaaggacaaaaaaattctcctataacttcccattacctagagattcaaggcaacttccctttgttggctttgaaatcaaacagacctgttttcacatcctggcttcctcacttcatgtccgtgtgatcttgggcaaaattacttaagctctctaagacttaatttccacataaggttgtttgagaattaaatgtaatatatataatatatttaaaacatatatcctatcagcacaatcgacagtagctgatgatgatgaattatggatgtgaattatgatccgcagggca

SEQ ID NO: 339740 - DNA, 217 bp, Homo sapiens
ttatttatttaaggttttgtgttttaacttctttgagctttagttacccttattaattgattaaaagtgggattgagttagtatatagtcttacaggtctaaaaattttcattcctttttgttgtatttttggtgagtttttttcaagatgagaaactctttatcaggaaacatttgtttaaagccagttacatgattatatatattttcttagcct

SEQ ID NO: 339741 - DNA, 546 bp, Homo sapiens
gcataaagctattgctttttgtctatcttataactgctgttcacttagccttattatatctaagtatttttagtttaattctcttgaattttctcagcagacaatcatatcacaggtagagatttatatcatccaggtagtggttaagagtaaaagctctgggttcaggtaaacctagattcaaatactgtgtgaccctgagtgagcatgttacctcagtttctttatccataaatttgcaattattagagggcctatctcacagggttgttgtaaacatcacattattcattaagaacggtgcatgaggccgggcgcagtggctcatgcctgtaatcctagcatcttgggaggccgatgcgggtggatcacttgaggtctggagttcgagaccagcctggtcaacatggcaaaacctcatctctactaaaaatacaaaaattagctgagtgtggtggctcgcacctgtattcccagctacttggggggctgaggcaggtggatcgcttgagcacaggaggcagaggctgcagtgagccaagattg

SEQ ID NO: 339742 - DNA, 300 bp, Homo sapiens
aagaatggggaccagggctgcgagaaagcaggacagtggctttccttcagcccttggtgctccagggacaaatcccactgagcacgtccctcaggaaaccatgcagggtcagaaccagcccccggcttcccctctgactgggctttcccgacccaggctctcaagccacagcctgtcagcatcacaggaaccagggcctggtctaggaccggctgttcaaaggccctgggtcacccctcaccagagagaccccagcacagcccaaaagagagaagcgatgcccctttccgggaagcccgg

SEQ ID NO: 339743 - DNA, 396 bp, Homo sapiens
gtagctgtatcacaaagagtttgaaataataacaaatgctctcatgatactatcgagtgaaaaaaggaaggaagctataacttacatatacagtatagccttgagaaagttaaaaaaaagcataggaaaaaagatgaaggaattacatacaactcttaaccaataatagtgatttatggattgtggtaagaatagacttttactctcttccaaattttgtacttgactaattttctatgataagcatatagcagcacacaacaatgaaggggaaaacggtgaaaaaattttagtagggcacatatttatttctggttatcacatccactgcatgcatgcattcattcattcattttcttgagacagagtctttctctgttgctcgggttggaatgc

SEQ ID NO: 339744 - DNA, 669 bp, Homo sapiens
ttcaagaccagcacgggcaacatagcaagaccctatctctacagaaaaaaattaaaaattagtcaggtgtggtggcacatgcctgtagtcccagctactcaggaggctgaggcaggaggattgcctgagcccaggaggtagaggctgcagtgagccacattcacaccactgcactccagcctggatgacagtgcaagagcctatctccaaaaaaaaaaaaaaaaaaaaaaaaaaaaagacatgaatgaatgatatacagagaaggaatagcttctccttgcaaaacaactccaattagcaaatgtggaagaaacaaaggaacagacaatcaccattaggtaagcaccacagaactgctgcaggccaatggaatgaatgctaaagatgggtaaaagttcaaggagaaatgccctattttcacagtctcaaagttatcgtccccaagatatgtattaattacaaagtgaaaagtagttactttatggtggaaaaacttggcagacatccccgtaaccaagtgattacagttaatatcaccagtaattagacaacatcatataccccatctataagcgacccactgaaatgtatgggctgagctgcagtcccctaaaactcctatattgaagccctaaccattataacctcagaatgtgaccacatttgaag

SEQ ID NO: 339745 - DNA, 883 bp, Homo sapiens
  misc_feature (69)..(69): n is a, c, g, or t
  misc_feature (83)..(83): n is a, c, g, or t
  misc_feature (87)..(87): n is a, c, g, or t
  misc_feature (96)..(96): n is a, c, g, or t
cccactgacctgcgcccactgtctggcactccctagtgagatgaagccggtacctcagatggaaatgcngaaatcaccgtctnctgngtcgctcangctgggagctgtagaccggagctgttcctattcggccatcttggctcctctccctctttaaagtgaatgtgattttgaagaaaggaggaaagatgtgaaaagtgattggtcagccacattcatggtgttgagaaaagaatttgcttttctggaacatagcctgtgatagcagaacaacacctggcaagaaacaggttatgtttggctggagagtcattggcactatcaagaaatattaaagtgtagatttgagagaggaggagaaagacccaagcaaaattgaaaaccaggtgggacccagacagcagcaaagcaatggaagcatgtattttggtcaatatagagttaatacacaattttgcccctcttcttctgatcatgggactcatattaccagtcttcacatttcctttaaattcaggaatcaggaagaatttccagagtttgcagatggacacatttgctgcttccattctaaacataagttagaagaacctttcaactggattccaactttaatatgtcacaaacataaaaaagaaagctatttcctggacttttcttcattagaaattaatagattgtcacattggcatagggaacaagataatcaacagatgccaaccccaagttaacagaaatgctacaaattataagacaaagacttcaaaatagctattttaaattttgcctagtgaggtaaatgcaaacatgctcactatgaatgaaaacaggtaatctcagcagtcatgtaaactataaaaataagcaaatataaattttagaa

SEQ ID NO: 339746 - DNA, 932 bp, Homo sapiens
cagatggaaatgcggaaatcaccgtcttctgtgtcgctcaggctgggagctgtagaccggagctgttcctattcggccatcttggctcctctccctctttaaagtgattgctcactgatgccttatctagttctcttggtgaggtcatgttttcctggatggtcttggtgtttgtggatgttcatcaatgtcagggcattgagaagttagaatgtgattttgaagaaaggaggaaagatgtgaaaagtgattggtcagccacattcatggtgttgagaaaagaatttgcttttctggaacatagcctgtgatagcagaacaacacctggcaagaaacaggttatgtttggctggagagtcattggcactatcaagaaatattaaagtgtagatttgagagaggaggagaaagacccaagcaaaattgaaaaccaggtgggacccagacagcagcaaagcaatggaagcatgtattttggtcaatatagagttaatacacaattttgcccctcttcttctgatcatgggactcatattaccagtcttcacatttcctttaaattcaggaatcaggaagaatttccagagtttgcagatggacacatttgctgcttccattctaaacataagttagaagaacctttcaactggattccaactttaatatgtcacaaacataaaaaagaaagctatttcctggacttttcttcattagaaattaatagattgtcacattggcatagggaacaagataatcaacagatgccaaccccaagttaacagaaatgctacaaattataagacaaagacttcaaaatagctattttaaattttgcctagtgaggtaaatgcaaacatgctcactatgaatgaaaacaggtaatctcagcagtcatgtaaactataaaaataagcaaatataaattttagaa

SEQ ID NO: 339747 - DNA, 847 bp, Homo sapiens
cagcaagggagtaggcttccatgtcttcagtcccttgccatggtgttggaggaagtcactcccttccagatttcttggctacctgagaagactctttggagcaacttagtaaacagcaatgggatttcatggagtttacagatgacatggccaccactatatatgatggagctcagtggagaattgctgattttcatgttttaactaggatgtccctgataaaagaatgggatatatgggttagcacatttgattgtacttcaggcagtcattatcactagatgccccagccaacaattagatcatttttacaaactcttgggccattgcctaggagttgccctccatcgcgagttgaattgtgtcctccagaaaagctacgttgatgtcctaacgcctcatatttcagaatatgactgtatttgtaaataagatcattgcagatgtaattagttaagataaggtcacagagaagggtgggctccaaatccaatatgactggtttctttacaagaagacagtcatgtgaagacacagagacacagggagaatgctatatgaagatgagaacagagattgaagttatggtgctacaagtcaaggaatgccttccaagctaccagacctgcaagaggcaaggaaggatcctcccctggaagcgtcagagagagcaaggcccagccaacaccataatttcagacttctgtcctacagaattgcgagacaattaatctctgttgtgttaagccacccagtttgtggtgtttgtgacagtcctagtaaaaaatatatatatcttgtttggactaaaatctctggaaatttcctacctcacagatactcaaaa

SEQ ID NO: 339748 - DNA, 387 bp, Homo sapiens
agagggaaagagtgtgcatgtgttttcgatagtttccctgggaactcttctacctgcagagctatcgtgtttcctgtggccctgatcccctatatcccctccctttttctgtgctgctttcagtctgatatccgctaagaaagaaaataacaatgcttgatagaacagtgtgtacattaacatagaactgcctctgagtaggcaagcaaggagccctgacaggtgccagggtgctgtgacaccttcctcggtggttcagacccttgtgtcctcagtcctgctcactcttgtagatggccattagcatttgtggtttcgactctttgcagggacccctgagatctgtagtatatggtgatagtgattctgccgaggcacacgtcttga

SEQ ID NO: 339749 - DNA, 633 bp, Homo sapiens
gtaatgaattaagcaggttattaaatctctgcaggctggaaacagcctttgtctatcttaacatcaccttttcattagttcataggcctggaatcctcacgggggcatcaaaaagttgtcaggaggtctctgaattctggagttggtgtctgaatttgtgcttcaggattacgtttcttgacagctcctcatgcattacacagtggaggggaatggcggatgtgtgtgtgcttgtgtgtgtgtgtgtgtgtttacaggtttctcaaacaaattagttatgtacattttctccagaggtggcatacaaataacttgtcagtgaagggtgaaaacatgcattttaggttgcgtcagccatcttgcctctgcattcataagtgggaagacaagattgtctgagttctgatttaataggtttttttaccctcatttgagactacatctctaaggagcaatcatttaatacaaacaaaactatttttctacttttgtgatttatatgtgaagatgcttatacagtaatcccctttacccatgggggatatgttccaagaccccccatggttgcttgcaagtgtgatagtacctaaccttatatatgctgtattttttctatacacccatgcctaccta

SEQ ID NO: 339750 - DNA, 265 bp, Homo sapiens
attccaaggtgcatgcgggctgtgaggtgccttagagaatacatgtgttagataacctttgtttagtcatgagttatagtgctgttgagtgggagttagatgatgatgagtcatcactatttattattatattttttgagatggagtctcactctgtcacccaggctggagtgcaatggcataatctcggctcactgcaacctcctcctcccgggttcaaacgattctcctgcctcagtcttcccagtagctgggattataggca

SEQ ID NO: 339751 - DNA, 543 bp, Homo sapiens
ttcaggcctaagagtattcaaaaacaggagggtgcggtgagagacagttaggaggagattggtaggtgcagtggagataaataaactgtagaagggctagtttgctggagagaaccagggaaatgaagagctgggaggagtctttttggggtcagaacaaatctcaaacattggcccccgaaactattcctttaaaggaacccagatttgttttgattgacctgtgaagcaatttatgcttcagcacattgttgaaaacaatggagtaatcagccagcaattggtgatgcctaacaactggatgtggtcaaagaaagaggaaaagagtgccctgccaaaaccactgtcatttcatggtgactttgggactatccaaggctgtgcctcctgaggaggaacatgaggggcttcacacagaggggagattgggagaaatatgcttcactaaaacaatccagccagtgactaaagaaataacagtaacataccccagagtggggcaatcaatatccagagtggctataatatataaaatggtcagtt

SEQ ID NO: 339752 - DNA, 259 bp, Homo sapiens
cgtggcttcccaaagtgctgggattacaggtgtgagccactgctcccagccgagtgcctacttaataaatgttaacaagaaaaacccaccccaaaaaaggaaagaggacaaacacaaggcaagggtgtttcagcagaggcaaacatcgcgagcaaaagcttgcaggtgggagaggccaaggccagttgctgaagtccttgccagctggcagggactgtgccctgtaagtgggggatgagtccagaggcaggcagggacc

SEQ ID NO: 339753 - DNA, 424 bp, Homo sapiens
ttctaggtgtggacaaactgaatacagttagtctgtgtagatcataatctgataccacaatacattggatattaaagaaaaattattgttccagtgaatactccttgttgagaacattgctgctgtatctcattttggccactccttatggtttctaggctggagggaaaagtgagatgatatctgtatctgcactgcatatgccctttattaaaggcacagccatggcctatgtatttacatcagtaagacatgttttctcaaagcagcaaacacaccacaagagcatcagcaagaagcattccttggttacggtgcgggtatttcagtggcagctgcagttgattaaggattctcaagccctggatgggggatgaagattggaagcacagcacccccgctgccacctttttttttttttttt

SEQ ID NO: 339754 - DNA, 449 bp, Homo sapiens
tccgtctacacatctcatccctttgtcttctgttcctgttacaactacatcttctcactcccaactactgctaactatagcaacatctccttacagtatttaaagaattattctgtaaaattgactttcatgaaaaagaaactctacatatcactgatagattaccagtttccttagttaggacatgtaaaaattcatttctcattaaaaccacattgaacttaattgcctttcactgatgagtcagaagaaaccgcatggttataataatgaatatccactaacactgttgggtgtgtggtgtccatgatggagaaagagaatgaatttccctataaatggaatttacagacacatagagaccttacaatatgcgttctttggagatcgttcttatgcttttgcacttgcactgtgacagtccagtgctcattcaagtctcttcgtag

SEQ ID NO: 339755 - DNA, 417 bp, Homo sapiens
ggaatatattaaatagtcagtaaacatatgaaaaaatgctcaccaatatggtcattagagaaataaaaatgaaatcactatatacccacaataatgtctaaaatttaaaaacaagactgtggagcaacaggaaccctcacacagatttgatggaagtgtgcattgttacaaccatcttgcaaaactggttggaagtatcttttaaagctgaacatctgcaaaccttatgacccggtaatttctttcctaggtatctatccagaacaattgcatatacacatgtataaaaaaagatatgcatcagaatttcatctacagtgttatttgtaaaaacactatactagaaacaatccaaatgtgaatttatgaaagaaagaattaatacattgcaacacggtctctcagggtaccgagctc

SEQ ID NO: 339756 - DNA, 293 bp, Homo sapiens
ggcacagagaggggaagtaactggccccaaatcacatggctgatcccccagccaggccaacaccagcagcctccctcatcagactgtgggcccacagggcagggccagtctgcctggccacctctaggtcccagtactgggatacggggcctgacacagagcactaactcaggtaatagttgtagattttttttttgagacagaatcttgctctgtcacccaggctggagtgcagtgacacagtcacagctcactgcagccttgatctcctgggctcaatgattctcccacct

SEQ ID NO: 339757 - DNA, 427 bp, Homo sapiens
tccttcccatggcaatcactttcactctgtttagctgattcttttatattacctttatgtcttaaatgactaaataatatgcctgtattcctaggaatgaaccaaaggaatgaaaaaaaaagtgcctgtattgctacctcctgatttttcaatttgaggcattttctattgacttcccccaatacaggaagtgataacttgactctttttttcccccttcccaccttaattcctcataatacacatgacatgcatcctatctcctatcttctcagggttatacatggtaacttaaattaacattcagtttctacattattatgattatacaaatactatttatagctaaggcatattattaactatgattacttttccttacttgcacatttttttttgttttccctgagtttttcagtttgcttgg

SEQ ID NO: 339758 - DNA, 420 bp, Homo sapiens
aagacccaggatcagatgagattgcccagcatctgaatgcagatagagaagcagagaggggtaccccaacatctagaagcaggggagaagagtagaaaccagaagaggaggtcgaggagacaccagtggggtagaggagaccaggtgagtggggtgttctggaagccaagggaagaaagagttttgggggaaggaaggagaggtgacccccagggtcaaaggctgcgagagaccacagtaaatcaggactgagagtggccatggaatggacatccttattttcaggtttctggagaccttgacaagtggtttccacggagggctgcagagaggaaattgagacatgatacaaacaactctttgctggagagagcagagaatggggaggtgggaggcatggagggtgcagcacagaggaag

SEQ ID NO: 339759 - DNA, 501 bp, Homo sapiens
aagcaatgaataagtaaatgggatagaacagaaaaattgggaatatcatttttttttaaatacgaagtcaacatctcctaaatgtggctgcaagtggggcaggaggcactacacgcacacctgcagtgctggagaagaaatacagcctcctctgccttagtgcctgtcttgtctcacacgtgcacaatactcataactggggacaaaacactgcctggctgcgtctcctttaacacatacagcaagatgtcgagctttatctagcttttattttttaagtatttacactgtggcactgactttccccacttgtgctgccctctagaggagcccaccactcattcactctgtgctatttggtttttaagtgcagataatggcaagttactgattgaagtaaaggaaccactaccacctcttctttaaaaggagtaaaaatcagccactttagaatgttccttctgcacacatgtgttagatccctttgcaatttttcactgc

SEQ ID NO: 339760 - DNA, 366 bp, Homo sapiens
gtcattgtttaattcaggagatccaaaactatcctgtagttccaaactacaaatgtagttaacttgggggctattgaaggttaaatctaaactcaaaatgaaggagccatgcccagagaagagctgttcaggcccgctggcagggtttgtacgtgggtggccaggtctgaccccaggcagccaggatctgggtctggtttctccatccagcaagccctgcctctggctttgctcagccctgtgtttcctgccaagcggaaatccctggtcactgacttggggagaggtcagggagggaagattcttctcccctgatgtcacccagctgtttgtaacccaagcagcagcagaacaagcacacttgat

SEQ ID NO: 339761 - DNA, 457 bp, Homo sapiens
tgtgtcccaggaaccgaagaaagcacaggttacagcaatgagcgaacacagttgtgtgtctcctgcctgcaggtagctgcggcctcgtggagaaaattgaagtcagatgattatcgtgcggggtgagaaaggagggtgagaaccaagtgctgttcactcatcattcattcattctcttgttcagggggtgtggagcactggatgggagctagacatccctctagacctgtgctggctggaagagtagccgctgccatgtatggctatttacattgaattaaaattagaccaaagtaaaaattcagcttgtgaggcacgtagccacacttcagtgctccgtagccacgcgtggcgaacagctcttgtactggagagtgccgatgtagaacattccctgcatcgcgagagctccctggatggtgctgggctgcaaaggccactcccccgggagtgcaca

SEQ ID NO: 339762 - DNA, 278 bp, Homo sapiens
gctgctcgcctatggagtagccattctttatttctttattttcttaataaactggtttcacttgtctctatggactcgctctgaattctttcttgcgcgagatccaagaacgccctctgggggtctggatcgggacccctgtctggtaacaactgcagatatctccctccaacacattgagctgtgtgttgatgtcttggaacttgctagctgtgaattaacctaacaatgccatcccccaccctgcaacccacaccctgcagctcaacggtgcacag

SEQ ID NO: 339763 - DNA, 988 bp, Homo sapiens
accccacctgctgtgtgttctcctcgagtataatgctcaggcaatcttcaatagggtatggacacagataatttcaagatttagataacatttgagaatatgaaggctcttaactggcactcactactggaactcttaggtctgccttgattctagccccactggacattgacaacttaggggaaagactgccttttagtattttcactatggaatggtatactgtatttattacttcaacacatattaattgagcacctgctatctgccaagcactgtattaggtaagtaggatacattagaaaataaaggcaaagatctataccctctaggaacttacgttctagtcaaggagacgtgaaataaacacaataagtaaaacacactttattcaaagagaagtgtgtcaaaaaagaaaaagtagacagcagaacaagagtaccaggggtcgggtaagttgcagttttatattatgtagtcaaggtaagcctctgaaatggattgttgagcaaaagcttgaaggagttgaaggaaataaagaatgtggatatttaggggaaagagtattccaggtggaggcaacaccattgaaaagcctattaaagtgaggatatgcttactgtggtttgaggactagcaagaagatgaagtcagagaggtagcaggagccagattatccatggtcattttaaggactgcagattttactcttaaatgcaaagggggcaggggagcagtgtagtgttttcagcaggggggtaacaaatctgacttttgtttttaaaggatcaaattattatgtgggttcaggaagtcaagggtggtagcagggtaggtgatgaaaagatgttagattgtgagtatattttgaagttaaaggtggcggcatttcgtgattgataggaaggtgaagaagggttgagacaaactctagggttttcagtctgagtggagctgacatcactggggctgtatttggaggagattt

SEQ ID NO: 339764 - DNA, 374 bp, Homo sapiens
ccagatgagctaacattttagtaacacctgataaaatgaaattgtgttcagcccaaaatgaagctatcaagtccattaaaaaaacaaaatttcaaaaacttgtaggggtagtcttaaacatcctggcttatgctcatgccatgaaccaagccatgaacatctgtgattactgtcttaaatcaatgaaacacatgaaaagggaaacggaatttggagacttaactgaaatatccctaatacatgctctgtcagggcagggacaaggcctgttttgcccaccactgtattcccagcccttataccacagtgccgagcacacagaggaagccctctaaatgtttgatgaataaatgactacatgactgacccatgca

SEQ ID NO: 339765 - DNA, 244 bp, Homo sapiens
ctgattgagcaaaaagcaggaggtgagggggtcagaggtttgaaaaatagggcttgaggtttgaaaggattattgcaggaagtagcattgtcacacagtaaggagagatgatttgtgctggaaccatgaagaccagtgagtgcactctgccctgctgtggaactctctccagcactgctggctttcagatgcagtgtacaggaagtaggtaagtagggtcttccaagacttgccagagagttct

SEQ ID NO: 339766 - DNA, 394 bp, Homo sapiens
aaaacaataccatctattgttttatttataaaacctgttgatctagtatctactcaataataaaattcaaaacagaaaaaatcctccccatatcattttcattcttttaaacctttcaatggcctctgatgaattctaaaatgaaagtcaaaccttgtatcacggtctgttctgtattactcccactcctttacaaatttcaagtcttgctgatccctcactcagccacgttaatcttttatttacattgctattccccttcaagctcaaacagtccccagaacttcctgcagctgatgagtctgaatgtattgtcataaaatgccttccctctaccctctccctggcttctaaggtatttaccagtgattttctcttccattatcctgtttac

SEQ ID NO: 339767 - DNA, 330 bp, Homo sapiens
gcccttaagctgagtgtttgcaacccttgacttagagggccaattacaattcaggtatcttagttgctaattaagtaggtctaggatggagccgagaatttggatttctaacaagttcccaggtcatgacgatgctgttgatacaacatttggagactcattttctttgcattgacttagaaaatggccatgagacattaggttcaaaaagcaggttaacaagcaccatgtgcggtaatatcttcgttcctgcctttagtcactccttgaagcacttgtcacatcactcacacctttcccgtcaccccccatgagtcagtctttgagagg

SEQ ID NO: 339768 - DNA, 357 bp, Homo sapiens
tgaagtccagatatacagacacagaatgaatacatgagcatgtctataaagtcgactgctcagtaaaaggggaaaacacacagtttatgttgctttatgatatttttaacacagatcttcaaagttacaggttaagacaacatctgctgggtacacctaccctctaaatttttataccaagtagctcacagggcctcattccatacactgtacatgacgaaacacgctgataccaggtaccatttttattggcaccacttctgcttatgaaattgataagaaaaaaagactgtcagaatataggaattttatgctccagaattcatacaagaccgttttaaataacactcttcactc

SEQ ID NO: 339769 - DNA, 370 bp, Homo sapiens
cagggctgggggcccagaggaagcatgaggcgtcgtgggagagaggcctgggggcagcagaggaggcatgaggtggaggcctgggggcagcagaggaagcatgaagcatgagagagagagagagagagagagagaggcctggcaccagaggaagcgtgaggggttggtggagagaggcctgagggcagcagaggaggtgtgaggtgtccacgagagagaggcctgagggcagcagaggaggcatgaggcgtccatgggagagaggcctgagggtgggagaacccatcacaccacagccgcttctcctcagagatggcaccaccacacccaggcccctgtatccagcaaaacaacctttcaaaaacaaagg

SEQ ID NO: 339770 - DNA, 189 bp, Homo sapiens
aatagaaccatcacaaacactgacgcaacatcacggtcctgtcactgcttttcagagtgagcacacagtgaagtcggtttaatagtaaatactaacgcctctgaaggtgatttagccagagccaattcagtgagcaagcgccaaggattaaaaacgcctcccttccatatccttgttctgcacctgcca

SEQ ID NO: 339771 - DNA, 272 bp, Homo sapiens
ggtgtgcacatggaggtgatatctcagttcccgcatttgcagattcagttagacattgtttaatattaaacacattcccaatgcatgttgggttatattcatttggtcacttaaaggagtgtggatcagaaaaggaatgaaaacactaaaagctaaccaacagaaagattatatcaaaaacaaatcttctacgaaaaattctttcataggagaaatattccattatttccaagttcccatttatttccttcccagtccacatgcaaatacac

SEQ ID NO: 339772 - DNA, 190 bp, Homo sapiens
cggtaccccgtcccaaggatgagaaatatggtgtaagacatcacaatcccattagttcagagcgcgtaatggagtggaaacgcttgtagggcttcaccagggctggtgaattaccagatctccgtcaagtgcagtaaccagttcctcatccttcagtttctcatcttgggagcaattccgcagctgggga

SEQ ID NO: 339773 - DNA, 466 bp, Homo sapiens
cggtaccccgtcccaaggatgagaaatatggtgtaagacatcacaatcccattagttcagagcgcgtaatggagtggaaacgcttgtagggcttcaccagggctggtgaattaccagatctccgtcaagtgcagtaaccagttcaagttggaagtgtgtcttttgaatgcagaaaacaaggtcgtggacaaccaggctgggacccagggccagctgaaggtgctgggtgccaacctctggtggccgtacctgatgcacgaacaccccgcctacctgtactcgtgggaggtgtggctgactgcacagaagtcactggggcctttgacttctacacactccctgtggggctccgcactgtggccgtcaccgagagccagttcctcatcagcgggaaacctttctatttccacggcgtcaacaagcatgaggatgcggacgtgcgttggggctcctgggtcgtcgtggg

SEQ ID NO: 339774 - DNA, 775 bp, Homo sapiens
cggtaccccgtcccaaggatgagaaatatggtgtaagacatcacaatcccattagttcagagcgcgtaatggagtggaaacgcttgtagggcttcaccagggctggtgaattaccagatctccgtcaagtgcagtaaccagttcaagttggaagtgtgtcttttgaatgcagaaaacaaggtcgtggacaaccaggctgggacccagggccagctgaaggtgctgggtgccaacctctggtggccgtacctgatgcacgaacaccccgcctacctgtactcgtgggaggtgtggctgactgcacagaagtcactggggcctttgacttctacacactccctgtggggctccgcactgtggccgtcaccgagagccagttcctcatcagcgggaaacctttctatttccacggcgtcaacaagcatgaggatgcggacatccaagggaagggcttcgactgtccgctgctggtgaaggacttcaacctgctttgctggcttggcgccaacaccttctgccccagccactatccctacacggaggagatgctgcagatatgttaccggtatgggattgtggtcatcgatgagtgtcctgctgtgggcctgatgctgccatgagtccctgctgcgcacccgctctgcctggccagccctcgggccacaccgtgaccctctgtcccttccctcctggcccgctggcaactcttcaacaacatgtctatgcatcaccatatgtgggtggtggaggaaccggtgctaagagacaagaacca

SEQ ID NO: 339775 - DNA, 313 bp, Homo sapiens
cgactcacttttaatgaagagcatttagcaaaagcaatgaaatgccaattctgagattaggttatcaaagaagtctggcttccatctttccccctctcatggaaaccagctgtcctgtagtgagctgccatatggaggggccacatgacaaataactgagggaggcctccagacaacagctagtgaagaagtgaggcctgcagttcaacagtccacgaggagctgaatcctaccaagaaccagcttaacaatcctaccaacagcaagcttagaggcagatcctcagccaagcatggtggctcatgcctgtaat

SEQ ID NO: 339776 - DNA, 437 bp, Homo sapiens
atttgcaagtcctatttttccattctgtgagaaccagcattaaatatttttaaaatatctaaattcctctgactttatcacgaacatacttctttaagaagctgtgcttgcttatagtatagaggcatcaaacttgagggattaataatctcatctcaaacctccccactctattcaactatacaattttccttgataattataatatgtcaaacgtggcctttttccagtcatcaatggcttttagaagcccttcggaatatttcaatcctaatgtcttcatgcttcatcaactccagtccttaacttttctagagtaaagccactttagcaagcttacctgaactgaagcattctgccctgggataagtcattaaagtatacatcaatcattttcatcattttcttttctttttttctttctgttttgttttttt

SEQ ID NO: 339777 - DNA, 807 bp, Homo sapiens
cagccctgacagccccctgcgctgttgtgatgtgacactgtgatatcatgtcatatatagccatgtcttgctacagaatcattggcctggacctcagtgcctggagttccttacattctgaataacaattaagggtataatcctggggatagggacccaggataccggaacaggtctccaagcaaatccatttttctggggtaaggcattttactattttgaagcaccaggaagttttactgtcagccagccacactcttaactggccctggaaccaaaggcttacatttaagagatgactgggtaggggtctatgtatataaccatgtgacactaaacgacagggatacaatctgaaaaatgtgtcattatgcaattttgtcactgagcaaacatcatagagtgtacttacacaaacccagatggtatagcctactgcacacctaggcatatagcctattgttcctagactacaaacctgtacagcaggttactataccgaacaccatatgcaattgtaacccaatggtgtttgtgtatctcaacctagaaaaggccaataaaaatacagtattataatcttatgggtccacaattacatatgcagtccattgttgactgaagcatcgttgtgcagcacatgactatagtctgctgtcctgaaaaggtcagaatgaaaagttatactgagatctgactatgttcttacaaactcccctgcctgacccacttcagtttatcaacagggctagatagtagtgctcagtaatccagtctccattatctgcaataaaattttttaacttt

SEQ ID NO: 339778 - DNA, 426 bp, Homo sapiens
cctgggtgactggatagctggtggggtcccaaaccaggaaacaccgcaacacatggaaatagagatgtcattttcttttaagagcatggaggcaagtattatttacataatctcaaaagagaaaagaaacacttattgtggtattttccagaattctcaagccggggaggtagggcgagggtgcaataaagtcacacctggaaaccaggcctgagctcttgttcacgacaataaataaccaccaacatggcagagccccatttccccacagcatgcgggcctcgaagccaggcgcctgggttccaatccctgctccgtcgccaacagcacagagcagtgactgccctgggcctccctgctgcatcaacagcaccttcccagggagggcttggtgagctcacccagcctggcactcagcaccacaag

SEQ ID NO: 339779 - DNA, 276 bp, Homo sapiens
cgacacagtgagactgtctaaaaaaaagagagagagagaaaatagttgacagagagaaaatagttgagaacagttagtagacgtagtagacgagaaggctgttgcctgaggaagtcgcagtaactaagaccgtatgattcagatgaaagagaatgtcagatcagtgaaacagaataaatgaacccagaccagaatctcgtacatgcgggcagaagacaggaagggcagaggtgtctagggcagaggtggaactagaacaaatggtagttacttggg

SEQ ID NO: 339780 - DNA, 336 bp, Homo sapiens
cttataaatagagagaaaattagtgtttgccagaaattaggaattgggagtgggggcgggggtggttgtaaaaagaaaaacagaagggatccagtggtgatggaaatgtttgttatcctgactgtggtgttggatgcacagacctacatgtgcggtaaaattctacaaaaccagataaaactaccaccactgcaaacacacacacacacacacacacacacaattaatgcaagtaacattggggaaatttgaataaaatcactgggttgtaccaacatcaatatcctagatgtgatcactgtactttaattttgccaaatgttaccattggggaaa

SEQ ID NO: 339781 - DNA, 381 bp, Homo sapiens
acatggtagaagaatgttcacagcagcttcattatcaggagaatggaaaaataacttgtggcatatccacacaatggaatactactcagcaatgacaagggaaaaactatgaatacacacaaccacatgatgagtctcaaaactacaacgtggggataaaaggccagacacacaaaacataaatcatacaagtccatttagagcaagtgtaaaatcaggcaaaatcagtttgtggtgagagaaatccaatcagttgctcctaggagggatgaggatagtggaaaattgactggaaagggacacggggaagttttctgtgggaatgggaatgttctgtcttgttttgggtggtggttcacatagggtatatacaataatcac

SEQ ID NO: 339782 - DNA, 298 bp, Homo sapiens
ttccttggtaatggcattaatccattcatgaagatagatccctcatagcctaatcacctattaaaggtctcactttgtttgtagagacagggtctcactctgtcatgtagggtggatggaatacattggcacaatcacagctcattgcagccttgacttcccgggcctaagcagtccttccacctcaacatcccaagtagctgggaccacaggcatgtgtcgccacacctggctactgatttttttaattttgtagagacagggtctccctatgttgcccaggctagtcagggactct

SEQ ID NO: 339783 - DNA, 351 bp, Homo sapiens
tccagggagttttgctggtaaggaattataagagtttaaagggactctcaaatatgtattcagtttctatggaatgcccttttacagtttctgtttccataaacatattttgctttcctaaagcaagatttacccaaaatgtaaaagtgtgcaaagagttggcccttcctcctaatcatagatgtgtgttttaaaatattttaaatgtatttccttcttggtgatgtatatgttggactggtttcttgggtctgggcattatttatactcaagaacagttgttgccacgtgattggaaaagcgctattgatgtcattctcatcccatatgctttgacagcaaaggagttag

SEQ ID NO: 339784 - DNA, 417 bp, Homo sapiens
tgccctttctccttcatttgtcatgctaatgcaacccttttccactttgtacctggaatattgtgaaagttttctagccggtgacatcactagattacaaatgttctgacctctaaccctatcttacaagtcccaattgaatctttataaagcattagatgtgatgttataggtaatgaaattaaactcttccacagggcccttcagctcattcatatcctgactccaccccctccatctaactttattccccactgcaccctaacacttcatctccatctccaaggtcaaggttccttcctggccactataccacatcatgctattcctccttcctgagattttgaccactggcctctccaaacatttttgatcatacattcttatcagaatgtttttttttagatcagaaacaac

SEQ ID NO: 339785 - DNA, 665 bp, Homo sapiens
ccttcttaagctgcctcagatctagatcccacaccagttgctcctacatctggtaaaactaaggtgtcttgtaaaaataagagatctaagacagacagaccttcgctgtcaagacaaaatatcaagatgcaaatgcctggctgaaatggattaaataatccattagcacttcaaataaaagcgattattacacttgtacgcacagtaggccagaatcccagattatcccctttccactcagataaggactgtatggtggctctttttcaaaatcccattgcttgggataatccaacatactgagctctctctgctatttcctgaaatttaacaccctgcaggtcagccccctatggcaatccggcttccacctctgaatgctgaatgctgaatgcacaaagtttactttgtgcgtctcaggtcaggaggaaaatttagtgttccttggaagcattaaacgatgatggaaagagctcaagcctttccaagactttgcccatcagtccatgcttagccatccccaaacaaatgtatagtggtaagtggaagacctttactggacactctgccaaataattggagcagtacttgtgctgtaatccaattgggtatccccttcatcctggcatttcatcaatctacaaaggtaaaaacaaaacaccaca

SEQ ID NO: 339786 - DNA, 155 bp, Homo sapiens
tgtggagcagtaagggtggaagcagggaagcccttcagaaggcttttgcagtaatccaggtgacagagatgatagaacttggtggaagcagcagaagtggtgagaaatggttatcatcctagatgtattcttttttttttttttttttttttttt

SEQ ID NO: 339787 - DNA, 704 bp, Homo sapiens
ctctctccagttccccacttctgcctccatatgtttaatgacatgactgtcctaaactacttcagtatccttgttttcaaacatctcctgaaattttttcctcctctaagaaatttttctcctctgtgcaggaagggatatttttagtacaatgcagcagatggttacctttttgatacacgccaacctctgtctcttcagagcttctatgccaggtggctccagtgtagaatgcctctaaaagattcttcatgaccctaaatctaattgttccctttctgaaagaggctgaccgaattgattacatttccagacattggtagaatagatctaagtaacttcttggcaatacagcagtccactgtggagcagacatgaatatatgtatgtaagctttaacttgcaaggtggatgttgtttgtcttataaattacacaaggctaagatagacacccatgacccttgaattgttattccctgatatgttggaggacgggcagtgaaggaagagcctgaaggtcgtgaaggtaatggttgtttgctaggcttcttttctttaccacatttctttatgccaagacgttgattttaagtatcctctaaggactgagatggagttcattttataacgttgttgttactggatgatgtatctataccatagatcaaatcccttaaccataattactattataaggaaaagt

SEQ ID NO: 339788 - DNA, 552 bp, Homo sapiens
catagccccagtaaataaggccagtgactaacatggagaagaatacatctcagttttactctctacgtatccattttatcacccccagattccctgtacacgtgttcagtccctccccattttctcctccccgtccctggcaaagactcatgtttctgtcaccgtagagtcgcctattctaaacatttcgtactcacggctcataggcggtgttttgtgactggctctttcactcagcatgatgttttcaaggtttctctgcatctgagcaggcgtcagcgcttcattccgtctgatgaatgagtcacggtcccctgcacatacctggcattttgtgtatcacgcgtcctctgtggatggacatttggggtgtttccactctttggctgtgtcagatgttgcccactgctgtgcttggtggctccgccacgctcctgccggcggcccgtggtgcctccctcgccatgccctctcccgcctttcacatctgaaagcccatctggtgggtgtgaacaccaatgttctcagcagcatattcataacagcccgaga

SEQ ID NO: 339789 - DNA, 525 bp, Homo sapiens
aggctgtacagaagcatggctgggaggcctcaggaaacttacagtcatggcggaaggtgaacaggaagcaagcgcgtcttaccatggcggagcaggagacagagcgcacaaaggagaagtgccatacacttttaaaccatcagatctcgtgagaactcactcactatcacaagaatagcaagggggacgtctgtgcccatgattcaatcacctcccaccaggcccctcctctgacatgtggggatcacaatttgagatgagatttagatggggacacagagccaagctgtatcaaccaccactgcagttggcagtgttcagcagataacaagacacctgagaggtggaagcatgagaggcatcttgtctcctctagctcctcacaccttatacacaaggagagtccagtctgttccatattaaggaagaaaacatgggacaaggtactaaataaatgattaaaaattgaaaccaagacagctgccattacaagctatttgaaagcccccagagttgtaaaatctc

SEQ ID NO: 339790 - DNA, 584 bp, Homo sapiens
ctccatcagcatcataaaaggacttgttagaaatgcaaattttcagaccccatctcagacctactgagtcagaaattcaagtaatggggtcctgcaagctgtgttcacaagacctccaggcatttgatgcaccccaaagttagagaacactgtctcgggaaatacttcatatttcatttctttcattgaaaagacttaagttctcaaggacaatgatataagaaatatcatgatgtattattcagttaggtacctttgtagtcatggataaaaaaaaaatctgtgtatttgttactgatttttcttttcttttcttttcttttttttgagacggagttttgctcttgttgcccaggctgagagtgcaatggcgcgatcttggttcactgcaacctctgccttccaggttcaagtgattctcctgccttggcctcctgagtagctggactacaggcacgtgccaccacatccggctaattttgtactttcagtagagacagggtttcaccatgctggccaggctggtctctaacccctgacctcaggtgatctgcccgcctcggcctcccaaagtgctgggatta

SEQ ID NO: 339791 - DNA, 1872 bp, Homo sapiens
ctctgtcctagccgtgagtgccccgcctgcccctagcggtccctggcgtcccggttcctgtcgcgctcacctgcgccggtagcgaagaaatcgccccgggacatggactcagtggtctttgaggatgtggctgtggacttcaccctggaggagtgggctttgctggattctgctcagagggacctctacagagatgtgatgctggagacctttcagaacctggcctcagtagatgatgaaactcaatttaaggccagtgggtcagtttctcagcaggatatttatggagagaaaatacccaaggaatctaaaatagccacgttcaccagaaatgtttcctgggcctctgttttaggaaaaatttgggacagtcttagcatcgaagatcaaaccacaaaccaggggagaaatctcagtagaaatcatgggttggagagactctgtgaaagtaatgatcaatgtggagaagccctcagccagattccacatcttaatctgtacaagaaaattccacctggagtaaaacagtatgaatacaacacgtacggaaaagtcttcatgcatcgccgcacatccctcaagagtcccatcacagttcacactggacacaaaccatatcagtgccaggaatgtgggcaggcctacagttgtcgttcacacctaagaatgcatgtgagaacccacaatggagagagaccctatgtgtgtaaattatgtgggaaaacctttcctcgtacttcctccctcaatcggcatgtaaggattcacactgctgagaaaacctacgaatgtaagcaatgtgggaaagcctttattgacttctcaagtcttactagtcatctcagaagtcacaccggagagaagccatataagtgtaaggaatgtgggaaagctttcagttattcctcaacgtttcgaagacacacaataacacacactggcgagaagccatataaatgtaaggaatgtgcggaagcctttagttattcctcaacttttcgaagacatatgatttcacacactggagagaagccacataaatgtaaagaatgtggggaggccttcagttattcttcggcttttcgaagacacatgataacacacactggagagaaaccctacgaatgcaaacaatgtgggaaaaccttcatttatctccagtcctttcgaagacatgaaaggattcacactggagagaaaccctacgaatgcaaacagtgtgggaagaccttcatttatccccagtcctttcgaagacatgaaaggactcatggtggagagaaaccctatgaatgcaaccagtgcgggaaagcattcagtcacccctcctcctttcgaggacacatgagggtgcacactggagagaaaccctatgagtgcaagcaatgtgggaaaactttcaattggcccatatctttacgaaaacatatgagaacacatactagagagaaaccctatgaatgtaagcagtgtgggaaagccttcagcttgtctgcttgctttcgagaacatgtgagaatgcaccctgaagacaaatcctatgaatgcaagctatgtgggaaagctttctattgccacatatccttacaaaaacatatgagaagacataccgcagagaaactctataaatgcaagcagtgtgggaaagctttcagttggcctgaacttttgcaacaacatgtgagaacgcacactgtagagaagccctatgaatgtaaggaatgtgggaaggtcttcaaatggccatcatctttaccaatacatatgagactgcacactggagagaaaccttatcaatgtaagcattgtgggaaagcattcaattgttcctcatccttaaggcgacatgtgagaatacacactacagaaaaa

SEQ ID NO: 339792 - DNA, 1619 bp, Homo sapiens
gtcaaaccatcttccagggcattcagtttatttcattttcagacagttcccatggggtgaaaaacctatgctttcactgaaaatggttaagatgcagtcctaatcctaataaatactaacaaatcattattaatcaaaccaataacatgcttctcatttttagtagaaatcatgggttggagagactctgtgaaagtaatgatcaatgtggagaagccctcagccagattccacatcttaatctgtacaagaaaattccacctggagtaaaacagtatgaatacaacacgtacggaaaagtcttcatgcatcgccgcacatccctcaagagtcccatcacagttcacactggacacaaaccatatcagtgccaggaatgtgggcaggcctacagttgtcgttcacacctaagaatgcatgtgagaacccacaatggagagagaccctatgtgtgtaaattatgtgggaaaacctttcctcgtacttcctccctcaatcggcatgtaaggattcacactgctgagaaaacctacgaatgtaagcaatgtgggaaagcctttattgacttctcaagtcttactagtcatctcagaagtcacaccggagagaagccatataagtgtaaggaatgtgggaaagctttcagttattcctcaacgtttcgaagacacacaataacacacactggcgagaagccatataaatgtaaggaatgtgcggaagcctttagttattcctcaacttttcgaagacatatgatttcacacactggagagaagccacataaatgtaaagaatgtggggaggccttcagttattcttcggcttttcgaagacacatgataacacacactggagagaaaccctacgaatgcaaacaatgtgggaaaaccttcatttatctccagtcctttcgaagacatgaaaggattcacactggagagaaaccctacgaatgcaaacagtgtgggaagaccttcatttatccccagtcctttcgaagacatgaaaggactcatggtggagagaaaccctatgaatgcaaccagtgcgggaaagcattcagtcacccctcctcctttcgaggacacatgagggtgcacactggagagaaaccctatgagtgcaagcaatgtgggaaaactttcaattggcccatatctttacgaaaacatatgagaacacatactagagagaaaccctatgaatgtaagcagtgtgggaaagccttcagcttgtctgcttgctttcgagaacatgtgagaatgcaccctgaagacaaatcctatgaatgcaagctatgtgggaaagctttctattgccacatatccttacaaaaacatatgagaagacataccgcagagaaactctataaatgcaagcagtgtgggaaagctttcagttggcctgaacttttgcaacaacatgtgagaacgcacactgtagagaagccctatgaatgtaaggaatgtgggaaggtcttcaaatggccatcatctttaccaatacatatgagactgcacactggagagaaaccttatcaatgtaagcattgtgggaaagcattcaattgttcctcatccttaaggcgacatgtgagaatacacactacagaaaaa

SEQ ID NO: 339793 - DNA, 210 bp, Homo sapiens
cactgcacccagccctatatttaactcttaactgccaaataaatttagaaaatcattgtaacatttttcacttttgcctgcaacatatgagagttccggtggtgcctcatccttgccaacatttggtgttgtcagtctttttcctgttagccatggtagtggctgtggagtggtagcccacatgcttccttgaatacttcttgactgatg

SEQ ID NO: 339794 - DNA, 523 bp, Homo sapiens
tgcagtgccacaagatgcttggcgtaaagggggaagagaaagcatagaccaagcacaactgggtttcacaaggacccctctttgccttcggagaagtcggtattggcagaaacggcacagccttgagagcctcagcggggcgccactttctgcaaggatgcccttccgttctcagttccagcagtccctgactgtccactgtgagaattccttttaacatcagagatctctttcggtaagataattatgctctcaatagctgtggatagaaaaaatatgaccgaaaggatcgatgcagtaaaattttttttttttttttttgagacggagtctcgctctgtcacccaagctggagtacagtggtgtgatctcggttcactgcaatctctgcctcccgggttcaagcgattctcctgcctcagcctcccgagtagctgggattacaagcgtgcaccaccacgcccagctcattttttgtatttttagtagagatgggatttcaccatgttggccaggctggtct

SEQ ID NO: 339795 - DNA, 361 bp, Homo sapiens
ctctgataatctctgctcctgttctttgagaccatcccccacactctccactctccaacgtgacacctgtaaagtctcttccagggatctggggctgcattccagggtctctttgctctgagctctctgaggcctcagactgttgtaataaatcaaatggcagggatcttctccaacatcatccttcttccttctgctttcctatgagggctgaaattcaatgtgtttgcagaggactccgtgtgagggtctcaagggaatttccaatttggcgcaagggaaggaagggagagagagactaaaaattgcttgatggccaccatgtgccgggtgctcccaatatagtctcaaactcatgaca

SEQ ID NO: 339796 - DNA, 385 bp, Homo sapiens
tgagaaactcgagctcggttcccagcctgggtgacagcagagtgacacctcgtgtccacgcagctaactctccactctccaacgtgacacctgtaaagtctcttccagggatctggggctgcattccagggtctctttgctctgagctctctgaggcctcagactgttgtaataaatcaaatggcagggatcttctccaacatcatccttcttccttctgctttcctatgagggctgaaattcaatgtgtttgcagaggactccgtgtgagggtctcaagggaatttccaatttggcgcaagggaaggaagggagagagagactaaaaattgcttgatggccaccatgtgccgggtgctcccaatatagtctcaaactcatgaca

SEQ ID NO: 339797 - DNA, 472 bp, Homo sapiens
cgctgcggcagtccagatcaaaaatggcggcagttggtgtgttctcggtttctcggctgctgggtcggtcccgcccacagctggggcggcctatgtcgagtggcgcccatggagaagagggctcagctcgcatgtggaagaccctcaccttcttcgtcgcgctccccatctccgcatcaggaccaagccgtttccctggggagatggtaaccatactctattccataaccctcatgtgaatccacttccaactggctacgaagatgaataaagagaatctggaccactacccgggcaccagggaccacagcactggtttggaccattactctgcacatggaccagaaaaagtatatgggaccttaagctcaccttctttacttgtatcaaatgatgactggtatactggtctcccatccctttgcttgtggcgggagatggcttaaataaataacttaaacttaaaaaaata

SEQ ID NO: 339798 - DNA, 364 bp, Homo sapiens
gtcagtgccccgacaccagaagcaccacctccctcggcccccgcgggctccccgcctctgtgctggctccaactcagacacagccaggctgggcagctccaacagtgaccatgggccaaggatcatggccagccccgagctaatgccaccgcacagaggagcccggggccacgccccatgcagccttgaagctgggtctcctcagccattggacaggctgacgccactcccgacctctctcacagatggccaggtgcgatggttcacacccgtaatccttgcactttgggaggctgtggagtgtggatcacctgacgtcaggagtttgagaccagcctggccaacaaggtgaaactccgtcttt

SEQ ID NO: 339799 - DNA, 424 bp, Homo sapiens
gcttcttgatcactaagactctgtagtactactttttgtatttatcacatgcttaatacttactgatgcacaaattattttaataagtacattaagctagtactgaaagtaagtgaaatctgattatatcgtctttaggcatcctaacaaaatccattatgcctttatagtcattaaattattcccagctctggaatattatttgctttgttaatactattctagctgaaataaaacacattatagatggtatcactgatgcaaagaagaaaaatctcctaagtcttccatctgaaagtcaataaagtgggtggaaagaaaaacaaaacattaactaaaaattgtcttaaattttctagcatacattgtttaatcttgaatttgtgacactgaagccacggctggggttgatggatgcgtgctt

SEQ ID NO: 339800 - DNA, 375 bp, Homo sapiens
tttctgctatcctccctgtcactctcttttctccaaatctctggccccttactgtctgctgagcatatcaggcatgcttttacagggcctttgcccttattgattcctttgttattttgcctcagatagtcactggtctgcctgtccaactatttgtttgtttttcaaccatcattttgctgaggtgtcccttatcaccctatttaaaaaaacaatcactcttctcacctccctggcattccttgttcctctacaccctccactttcttttcttacaaatatcaccacttgatattgataatctcactacactaaaaggtaaattccatttttgtctctttgtatcactgatgtttagaatagtatctggcacat

SEQ ID NO: 339801 - DNA, 244 bp, Homo sapiens
tagagacgggtttcaccatgttggtcaggctggtctcgatctcgtgacctcgtgatccacccgcttcagcctcccaaagtgctgggattacaggcgtgagccaccgcacccggccacacctgtagtttttacagttttacctcttacacttatctgtatgattcattttgaattaatttgcatgtgaatatccagttgttcaagcaacatttgttaaaaagaccatcctttcctcatgtgtttt

SEQ ID NO: 339802 - DNA, 760 bp, Homo sapiens
caaggccggacgcatcaccaagtgtccccgttagccaagttagcctgctgtggcagctctttactttttccccccgaagccccttcagctctgttttctctttcggggtcatgaagtttgtccacggcccctactcctgacagcctctgggatgggtgctgcggaggcagcagcagccacacagaaagaggcagatcagcgttgtcacccctacttttgtaaaaggaaatctggtattgccaggctgtgtggttagcgactcacatatgttctcgaaatctcacaaaagccctgtgaggtagaaattattttacccattttataggaaggaaattgagactgagcgagccggcttcggattggctcaaggtcacatatagtcatcattcgaacctcactcagtctgcttctttctgaagtctgtgcagcttaatcacttcagaatgggaaggaaacgggggcccagggaagttaagcaacttgcccactcactcagtctaattggtgccggggcagggacagaactcactcaattccactgctttccccagtttctggtgagtgatgtgtgcctggcactgtgtgcacctggcactgtgtgtagtaggaatgctgtttcttctgtctgtaacctcctcccagttctgtaaacaaagacaaaccatgccctgcccttaaagctatagggtcaaatgccactcttgatgatgcttcctatacacatttgtactctcatggacttgcagtaatgcacgagagg

SEQ ID NO: 339803 - DNA, 242 bp, Homo sapiens
aacatattacatggtcacatcttctcactataatgggttagagaagtgagactctcttttatttccagaaaagtatacagaaactttatattagcaatcagttgtaagaacatgagaatagtctgtgaagtcgtttaaaaatatttcaaacacatgttcatacattatcaattaacaaataactgcaaaatacacaagggagttgttatctttatacatgtgtaaatggaagaatcggtacc

SEQ ID NO: 339804 - DNA, 385 bp, Homo sapiens
tgtggcccgcgccctctttcggagcctgaactaagtcccactcttcagaagcctcttgggtcccttattctgtcgccattggcctccggagggcgcaggtctggctgtcacacgggctccctggttttgcatgggacacaccccacttgtcacgttgtcagttttactgtgatgcctcgggcttcaccgtctgctctggagctctcccaaggcagggatggcatcttcctggtatctgcggcccctacaagccccagctctcagcacagggtgtggcccgtgtttttaaatgagaaagccagatgccacatcactgttgggaatgcgatccaggcccaaagtcagaaggtccccacctgagggtgtcatgcctgttccagcagga

SEQ ID NO: 339805 - DNA, 374 bp, Homo sapiens
atctcgctgggggattctccaaggagggcacggggccacgctgtcaagaactcatctcatgtggaccgacgttccatgccctccatgggttacatgacccacaccgtcagcgctcccagtttacatggaaaatcggctgatgatacctacctccagctgaagaaagacctggagtacctggatctaaagatgacaggccgggaccttctcaaggatcgaagtctgaagcctgtgaagatcgctgagagcgacactgacgtcaaactgagcatcttctgtgaacaagacagggtcctccaggacttggaagacaagatacgagcccttaaagagaacaaagaccagctagaatctgtgctggaggtgttgcacag

SEQ ID NO: 339806 - DNA, 512 bp, Homo sapiens
ttcaagcgattctcctgcctcggcctcccgttcgctacattagaccatgcctgtctaatttttgtatttttattagagacggggtttcaccgtgttagccaggatggtctcaatctcctgacctcatgatctgcctgcctcggcctcccaaagtgctgggattacaggcaaaagtggcttttaacttatttttcaggtgtaaagttagagactagttcctgctttattagatagtaagaagagttttgaatcaattccgtgtctttttgcaacctatccatgcctacacttccggagagacagtggccaaaatcaaaggcaaagaagcagtaacagaatgtaaacaggtggcaggcagcctgagagcaccactgatccttctcagcatatgggccagaatttaagaaaagatctagcaagggcgatgattgaccttttcgacatactccacattctagcctggagtgcagaggatgcctggtaagcatgaaaaatccttctccttactgtca

SEQ ID NO: 339807 - DNA, 452 bp, Homo sapiens
ctcaggtgatctgcccgcctcagcctttcaaagggctgggattacatatatgagccaccgtgccctgccttaatttttgtattttcagtagtcctgatctcaagtgatctgtccacctcagcctaccaaagtgctgggattacaggcatgagccaccatgccggctcagtcttccttttaatatgcccagacacaccgggcatgtggctgcatttcatcctggcctgctgaagcctttgattctactgcaggatcacaactcttgctctccagccctgttgtgtagctttttgctatctgcagcagactccctcctggcatagagcaggccctgcagaagagctccctgtcccagcggatctcctcatggcctcgtgccggatcttggcctcgtgccggatcttggcctcgtgccggatcttggcctcgtgccggatcttggcctcgtgccc

SEQ ID NO: 339808 - DNA, 603 bp, Homo sapiens
tgtgccctggcaggccctatggacgttgccaagtgagatggtgtgaaaatatgtcagcaagtggtagactaggaaactgcgggctctcgttctcctagagagctcaatgttaaagctataggagaccaaaacatcgtgagaattctagaaactagttaggatgctgcaatgccagctagtgcagagccagggagggactgcactgggaagggtagtcaagttggagcattttgcttgttcttgcccttccccctgccaggcatagcaatgctactgggagagaccctccaattcccagctcctcccatgggatgggtttctgctgggtccgactcaagagtgctgagtggtggggtctgtctgccctcagagcagcacctctgcgtttccacagctgcaaggggacggggttatgggcagtggaatagttgtgtctgggtatcctggaggggattggtgccaggacccccggtaaataccaaaacccaaggatgctcaggttccttatgtaaaatggcatagtatacctatgcaaatgctcctgtatactttaaatcatctctagattatttgtaatgcctaatacagtgtaaatgctacata

SEQ ID NO: 339809 - DNA, 384 bp, Homo sapiens
ctctcgttgcccaggctggagtgcaatggcaggatctcggctgactgcatcctccgcctcccaggttcaggcaattcatctgcctcagcctcctgagtagctgggattacagacatgtgccaccacgcccagctaattttgtatttttagtagggacgaggtttctccacattggtcaggctggtctcgaactcccgacctcaggtgatctgcccgcctcagcctcccaaaatgctgggattacagacgtgagccactgcgcctggccaacaatttaagttttaagctaaactgaaatttttatccccaggtatataattttatagataaccaagaatcaggaataaaattttctcccaggtgaaaattctaggtacattcttt

SEQ ID NO: 339810 - DNA, 272 bp, Homo sapiens
cttcatataaagatttaaaaaatgcaacattttattacatcatatggaaatatttgccaatattatataatattggatgatggactctatgacttattcattcatttcacaaatattgagtatgtactatatgtaaatattgtgcatatttacaaaaataagatgcgtattctgcataaaattgttgtaaaaaaatagaatttatgctctctgaaggtagggatttttttttttttttttttggttggattgaaaaatcttcgcggggggaa

SEQ ID NO: 339811 - DNA, 500 bp, Homo sapiens
cactggaaatactcttcagtctgctttgttctaaagtttctacttttcccagtataacctgttgaaaatttagtccttcatgagaaatacggctggaatttcttgtggcaggctggccgccggtgttcatgtagttacaccttttgttgctatttcaccactgatcaaaaaataaaattgtattttttcaaaagaaacatggaatgacatgaagaaagtccttaatatatcatggagtgaaaaacagcaagttgccatgcaaatgtcaaatagatcctatatttttaaataagcaactgcatatgtatcatttaaatatatatgtttagatatttgctaaattatgaaccgcagttacccctggggagtgaggttaggaaaagtaaagtgagattttcactttttacattatactttttactttacccacttctgtattgtttgaatctttaaaatgaacaagtgttattttgtaattaaaaaaaacaacaactgacaaa

SEQ ID NO: 339812 - DNA, 428 bp, Homo sapiens
tgttgctcggggttacctagaggatccccgtgctgcacaaatgatgcctacctccagaaacatgcacattcctgggctcatctggcctcggggactccctgaacatagggatgacctccccatttctcaagagcacaaaccacagccaggagttcagagctcacacaagatgttactattgaagaaagaagctgaccttgaggctactgcttctcttctcagtccctggggagaaaattctcttgttggcagtctatattccatattagcccaaggaaatcatatgattctccacctccatgcccccatcctcaggtggctgtctttgagattttcacctgacattctgcagctaaccacctttctatctgtcatctccctgggagacatggtcattagcagagagcaccatgtaggtgtctaattaa

SEQ ID NO: 339813 - DNA, 436 bp, Homo sapiens
aacctaacttacagggtgctggaaaaacaccgggttgtcctccactccaggatgcctacctccagaaacatgcacattcctgggctcatctggcctcggggactccctgaacatagggatgacctccccatttctcaagagcacaaaccacagccaggagttcagagctcacacaagatgttactattgaagaaagaagctgaccttgaggctactgcttctcttctcagtccctggggagaaaattctcttgttggcagtctatattccatattagcccaaggaaatcatatgattctccacctccatgcccccatcctcaggtggctgtctttgagattttcacctgacattctgcagctaaccacctttctatctgtcatctccctgggagacatggtcattagcagagagcaccatgtaggtgtctaattaa

SEQ ID NO: 339814 - DNA, 239 bp, Homo sapiens
aatcatactgaattttataggacatgtgctactatatgtgttggttatgtaaggtccttaatactgtttgaaattgtgtgtgtatgtatttcttgagacagggtgttgctctgtcgcacaggcagtggtaaaatctcagctcactgcaacctctgctgttgggctcaggcaatccacccacctccgcctcctgaaaagctggggacacaggcaaacactaccacatttggctaattttt

SEQ ID NO: 339815 - DNA, 577 bp, Homo sapiens
tcggaacacttgtgttcggctgccagccttggttactgcaatagtctcctgtttccacggtcattcattccacaaacatttactgagtgccagttatgtgtgggcaccatgctaggtgctagggttagagtgatgaacaagaaggtacttggggctttgccctctcttgttccctccaatcggttctctcaggctgagcaagagtgatctttctaagtctgattttgttggtctgctgagaacccgctggctgtcccattacccttctgataaaatccaagctcatgactgcgtctttcagagccttcggtgatccagctgttgtctccctgtctagcctcattctgttcccttctcttgctcagtctctgttctcggaatgcatcaaatttcctgttgcctcaggatcttcacatacgtgtttccttctgcctgcaatgccttgcttcccctttcacttgacatacttttggacagtctttaggtctgtttaagatgtcatttttttcagaaggcctctgttggccctcccctccaagtccgccccccatgaactgtgtcctcctgcagcacttca

SEQ ID NO: 339816 - DNA, 444 bp, Homo sapiens
tggagagcttgaggggtgagagttgtatgtgcagagacagagactgaaatgataaagcaatgtgcttaatgactaatggtgatattcggcaaaccagaatcaggaatgaaagaaccatttaatgcagcttctgaaatgatttcaaaagaaatcttttgaatactttcctatgttcctgtaataacagttgccttccatttattaaaggagccttggtcctcagtgtcttttctcctgagtaagcatttttactttagttagttttaaaatgcctaggcatgaacaccacaaatgaaagatcaaagagtaactagatgctgtctaatttaaaaaactgtactcagcaagtgcaaatccttttttaattgctaaactgaacatctgggttttttctctacttcttttcagcctgtgagttaagtgagttaaatatcctcaaacaaa

SEQ ID NO: 339817 - DNA, 757 bp, Homo sapiens
gttccgggctctgctgcccaagtctgccctgcaggtagaagaggaatcctggaatgcctacccctacacccgaacccggtacacctgccctttcgtggagaaattctccattgaaattgagacctattacctgcctgatggggggcagcagccaaacgtcttcaacctaagttcagagccaggctctgaacttaggggagagggtactatcttgatggataacttctttaggaacaaattattaagcatccatctgtaggtgtcaaagtggtgaggggttttataatcaaaattgagccactgtctcctaaggataaatagcccaaggcagatgcagacagataataatgattattagcatttattgaacatttactaagtgccagaacctttcataaattttttgtgggtataatcttatttactcctgtgacgaacccatgaagaaggtccgtatattatcccgttttcacagatgggggaatgaaagcacagagaggttaagtttctcacccagagtcccttaggtagtaactggtggagccgggattggaactggggcagtctgactccagagccaaaaatctcaaggctaatgcggattcaactcaataaaaataaacgaaaggattagctggtaggatgatgcatgagaagggaatttcaagttgcacaactaacataaagtgggaagaaagctggctttgggctgtgtcctgggctctaatcccagttctctcacttcctaactgtgtag

SEQ ID NO: 339818 - DNA, 323 bp, Homo sapiens
ctccagcccaacattactgaatgccttcttcctgtggaggggtaagccaaccccagcagatggcctatgactttccatagctctcatctctaagttccttctgtttggctaatgtactcttcctaggtttactgataagctactgatttgaccaaaataaatacatgggctctaacttctactctttgagactactttaaaaattctggcaaacgaatacatcaggaataagaattattaagaaaaaaagtcttcatacatattatcattaatctcttactttattatctgtgaaatgtggaaataaaatagatctctcagat

SEQ ID NO: 339819 - DNA, 597 bp, Homo sapiens
agtatcaattctatgccttaattttgttgataattaaagtgttaaaaattagtgagaaatttacatgtaggagcttggtctgtaagaaaatgccattaattattacacttgctgtactttttctctgattaaatctcatgatttgcttttctttctaagacattatctgttggaacattcactagcctttaagaattcccttaatttctcctgacaggtgaagtgctccctaggtatgaatttggagttctgatgatttttaaaaatccttccctgattttccagagatttcctaaggaaaattggaccaaatacagtggagaccccccccccccactttgccgtgcactttgttctagagcaagggtggcagctacaggcatttgcgtgcccctgcctgcaggcctggctgtagcgcatcatcctttgtgctccctttcctctgagctgggccagggccccatccttttccgcaggcctctgggcagcaccaggtagacaacagtgcatctctaggatggggccagctgctccatgagctggggaggtggggtcttcgttagggttcagaaggatgcctgttccttctggcctcct

SEQ ID NO: 339820 - DNA, 349 bp, Homo sapiens
cgttgttaatccaatgagccaggcgaatgagtggtagaggagtgggatctgtgtcgcagtttaaaaaaattccaccagatctaaaaacattgcagtcaaacagagagattttcagactacttgtggaatgtcactgcctcggggtatttcacaagacaggtcacctcttgtgaaagtccgaagtaattctctgaaagctccttccacgcatgtcacaaaaccatcgcaaaataacataacataatcataacaccaaagggatatacagataaccaattaagcacatgcaaagatgctgaacatcactatcattacagatatgcacattataaccataatgagttaccac

SEQ ID NO: 339821 - DNA, 4990 bp, Homo sapiens
cgttgttaatccaatgagccaggcgaatgagtggtagaggagtgggatctgtgtcgcagtttaaaaaaattccaccagatctaaaaacattgcagtcaaacagagagattttcagactacttgtggaatgtcactgcctcggggtatttcacaagacaggtcacctcttgtgaaagtccgaagtaattctctgaaagctccttccacgcatgtcacaaaaccatcatttagccagaaatcatttgtttctatgaaagaccaaagaccagtaaatcacttgcatcagaacagtctgttgaatcagcagacatgggtaaggactgacagtgcccccgatcagcaagtggagactgggaaatccccctctttatctggagcctctgccaagcctgcccctcagtcgagtgaaaacgctggtacttcagatttagaactacctgtcagtcaaaggaatcaagatttaagtttacaagaggctgaaactgagcaatcagatactttagataataaagaagctgtcatcctaagggaaaaacctccatctggacgccagacaccgcagcctttaaggcatcagtcttacatcttggcagtaaatgaccaggagaccgggtcagacactacctgctggctgcccaatgatgcacgtcgagaggtccacataaaaagaatggaggaaagaaaagcctcgagtaccagtccgcctggcgattctttggcttccatcccatttatagatgaaccaactagccctagcattgatcatgatattgcacatatccctgcctctgctgttatatcagcctctacctctcaggtcccctccatagcaacagttcctccttgcctcacaacttcagctccattaattcgccgtcagctctcacatgaccacgaatctgttggccctcctagcctggatgctcagcccaactcaaagacagaaagatcaaaatcatatgatgagggtctggatgattacagagaagatgcaaaattgtcctttaagcacgtatctagtctgaagggaatcaagatcgcagacagccaaaagtcatcagaagactctgggtccagaaaagattcttcctcagaggtcttcagtgatgctgccaaggaagggtggcttcatttccgaccccttgtcaccgataagggcaagcgagttggtggaagtattcggccatggaaacagatgtatgttgtccttcggggtcattcactttacctgtacaaagataaaagagagcagacgactccgtctgaggaagagcagcccatcagtgttaatgcttgcttgatagacatctcttacagtgagaccaagaggaaaaatgtgtttcgactcaccacgtccgactgtgaatgcctgtttcaggctgaagacagagatgatatgctagcttggatcaagacgatccaggagagcagcaacctaaacgaagaggacactggagtcactaacagggatctaattagtcgaagaataaaagaatacaacaatctgatgagcaaagcagaacagttgccaaaaacacctcgccagagtctcagcatcaggcaaactttgcttggtgctaaatcagagccaaagactcaaagcccacactctccgaaggaagagtcggaaaggaaacttctcagtaaagatgataccagtcccccaaaagacaaaggcacatggagaaaaggcattccaagtatcatgagaaagacatttgagaaaaagccaactgctacaggaactttcggcgtccgactagatgactgcccaccagctcatactaatcggtatattccattaatagttgacatatgttgcaaattagttgaagaaagaggtcttgaatatacaggtatttatagagttcctggaaataatgcagccatctcaagtatgcaagaagaactcaacaagggaatggctgatattgatatacaagatgataaatggcgagatttgaatgtgataagcagtttactaaaatccttcttcagaaaactccctgagcctctcttcacaaatgataaatatgctgattttattgaagccaatcgtaaagaagatcctctagatcgtctgaaaacattaaaaagactaattcacgatttgcctgaacatcattatgaaacacttaagttcctttcagctcatctgaagacagtggcagaaaattcagaaaaaaataagatggaaccaagaaacctagcaatagtgtttggtcccacccttgttcgaacatcagaagacaacatgacccacatggtcacccacatgcctgaccagtacaagattgtagaaacgctcatccagcaccatgactggtttttcacagaagaaggtgctgaagagcctcttacaacagtgctaggtggaaagcgacagtagactcccagccagtgccaaacatagatcatttactcaccaacattggaaggacaggagtctccccaggagatgtatcagattcagctactagtgactcaacaaaatctaagggttcttggggatctggaaaggatcagtatagcagggaactgcttgtgtcctccatctttgcagctgctagtcgcaagaggaagaagccgaaagaaaaagcacagcctagcagctcagaagatgaactggacaatgtattttttaagaaagaaaatgtggaacagtgtcacaatgatactaaagaggagtccaaaaaagaaagtgagacactgggcagaaaacagaagatcatcattgccaaagaaaacagcactaggaaagaccccagcacgacaaaagatgaaaagatatcactaggaaaagagagcacgccttctgaagaaccctcaccaccacacaactcaaaacacaacaagtcaccaactctcagctgtcgctttgccatcctgaaagagagccccaggtcacttctggcacagaagtcctcccaccttgaagagacaggctctgactctggcactttgctcagcacgtcttcccaggcctccctggcaaggttttccatgaagaaatcaaccagtccagaaacgaaacatagcgagtttttggccaacgtcagcaccatcacctcagattattccaccacatcgtctgctacatacttgactagcctggactccagtcgactgagccctgaggtgcaatccgtggcagagagcaagggggacgaggcagatgacgagagaagcgaactcatcagtgaagggcggcctgtggaaaccgacagcgagagcgagtttcccgtgttccccacagccttgacttcagagaggcttttccgaggaaaactgcaagaagtgactaagagcagccggagaaattctgaaggaagtgaattaagttgcaccgagggaagtttaacatcaagtttagatagccggagacagctcttcagttcccataaactcatcgaatgtgatactctttccaggaaaaaatcagctagattcaagtcagatagtggaagtctaggagatgccaagaatgagaaagaagcaccttcgttaactaaagtgtttgatgttatgaaaaaaggaaagtcaactgggagtttactgacacccaccagaggcgaatccgaaaaacaggaacccacatggaaaacgaaaatagcagatcggttaaaactgagacccagagcccctgcggatgacatgtttggagtagggaatcacaaagtgaatgccgagactgctaaaaggaaaagcatccggcgcagacatacactaggagggcacagagatgctaccgaaatcagcgttttgaatttttggaaagtgcatgagcagagcggggagagagaatctgaactttcagctgtaaaccggttaaaaccaaaatgctcagcccaggacctttccatctcagactggctggccagggaacgcctacgcaccagtacctctgaccttagcagaggagaaatcggagatccccagacagagaacccaagcacacgagaaatagccacgaccgacacacctttgtctcttcattgcaacacaggcagttcttccagcaccttggcttcaacaaacaggccccttctttccataccaccacagtcacctgaccaaataaacggagaaagcttccagaacgtgagcaaaaatgctagttctgcagcgaatgcccaacctcataaactgtctgaaaccccaggcactaaagcagagtttcatccctgtctttaaactgggggtatgtccactctagcaagtaaaaaaactactgttacacgttccagtaactctgtcaatattttcttgtatcagaattgttattatgcagccttcatttgggctggtttcatcattttgcactgtgaaatagctttacagtgcattactacagccagaagaacatatatatatatatatatttaaaaatatatcggatagttgtatacaaatgagcaaggtatttgttgcaacttactacatagcatatacccaaaatcactgaagaaaatcgctggcatcagtgtgcagcaaatttgttcttttggtttcatcactaacaaaagtgcctcatcataaaaatacagttggtttttagggtgccatattgttaaaattagataacttacttacattgaataaacgaatgcgttttattggtaacagatatcattacatttaccagttttaacacaggtggatacagaacttccattctttagtcattccaggtggatctgagttttatattcaaacttttaatacagtttttgagttttgtgtgacttgaatttttaatctttctgtaaaatacgtaacttaaatgaacatattaaatgtgtatcttttcttcagataccagatttgatataatgttgtaacataggtgtgtagatagtggatcctggatggaactggcttctttatcgagaagaatataattctgcatgaggacttaatgaatccaaacctgtgtcatgcctgtgtgcatacccaattaaacactggaaataaaaattgttttggtgaa

SEQ ID NO: 339822 - DNA, 4848 bp, Homo sapiens
cgttgttaatccaatgagccaggcgaatgagtggtagaggagtgggatctgtgtcgcagtttaaaaaaattccaccagatctaaaaacattgcagtcaaacagagagattttcagactacttgtggaatgtcactgcctcggggtatttcacaagacaggtcacctcttgtgaaagtccgaagtaattctctgaaagctccttccacgcatgtcacaaaaccatcatttagccagaaatcatttgtttctatgaaagaccaaagaccagtaaatcacttgcatcagaacagtctgttgaatcagcagacatgggtaaggactgacagtgcccccgatcagcaagtggagactgggaaatccccctctttatctggagcctctgccaagcctgcccctcagtcgagtgaaaacgctggtacttcagatttagaactacctgtcagtcaaaggaatcaagatttaagtttacaagaggctgaaactgagcaatcagatactttagataataaagaagctgtcatcctaagggaaaaacctccatctggacgccagacaccgcagcctttaaggcatcagtcttacatcttggcagtaaatgaccaggagaccgggtcagacactacctgctggctgcccaatgatgcacgtcgagaggtccacataaaaagaatggaggaaagaaaagcctcgagtaccagtccgcctggcgattctttggcttccatcccatttatagatgaaccaactagccctagcattgatcatgatattgcacatatccctgcctctgctgttatatcagcctctacctctcaggtcccctccatagcaacagttcctccttgcctcacaacttcagctccattaattcgccgtcagctctcacatgaccacgaatctgttggccctcctagcctggatgctcagcccaactcaaagacagaaagatcaaaatcatatgatgagggtctggatgattacagagaagatgcaaaattgtcctttaagcacgtatctagtctgaagggaatcaagatcgcagacagccaaaagtcatcagaagactctgggtccagaaaagattcttcctcagaggtcttcagtgatgctgccaaggaagggtggcttcatttccgaccccttgtcaccgataagggcaagacatctcttacagtgagaccaagaggaaaaatgtgtttcgactcaccacgtccgactgtgaatgcctgtttcaggctgaagacagagatgatatgctagcttggatcaagacgatccaggagagcagcaacctaaacgaagaggacactggagtcactaacagggatctaattagtcgaagaataaaagaatacaacaatctgatgagcaaagcagaacagttgccaaaaacacctcgccagagtctcagcatcaggcaaactttgcttggtgctaaatcagagccaaagactcaaagcccacactctccgaaggaagagtcggaaaggaaacttctcagtaaagatgataccagtcccccaaaagacaaaggcacatggagaaaaggcattccaagtatcatgagaaagacatttgagaaaaagccaactgctacaggaactttcggcgtccgactagatgactgcccaccagctcatactaatcggtatattccattaatagttgacatatgttgcaaattagttgaagaaagaggtcttgaatatacaggtatttatagagttcctggaaataatgcagccatctcaagtatgcaagaagaactcaacaagggaatggctgatattgatatacaagatgataaatggcgagatttgaatgtgataagcagtttactaaaatccttcttcagaaaactccctgagcctctcttcacaaatgataaatatgctgattttattgaagccaatcgtaaagaagatcctctagatcgtctgaaaacattaaaaagactaattcacgatttgcctgaacatcattatgaaacacttaagttcctttcagctcatctgaagacagtggcagaaaattcagaaaaaaataagatggaaccaagaaacctagcaatagtgtttggtcccacccttgttcgaacatcagaagacaacatgacccacatggtcacccacatgcctgaccagtacaagattgtagaaacgctcatccagcaccatgactggtttttcacagaagaaggtgctgaagagcctcttacaacagtgctaggtggaaagcgacagtagactcccagccagtgccaaacatagatcatttactcaccaacattggaaggacaggagtctccccaggagatgtatcagattcagctactagtgactcaacaaaatctaagggttcttggggatctggaaaggatcagtatagcagggaactgcttgtgtcctccatctttgcagctgctagtcgcaagaggaagaagccgaaagaaaaagcacagcctagcagctcagaagatgaactggacaatgtattttttaagaaagaaaatgtggaacagtgtcacaatgatactaaagaggagtccaaaaaagaaagtgagacactgggcagaaaacagaagatcatcattgccaaagaaaacagcactaggaaagaccccagcacgacaaaagatgaaaagatatcactaggaaaagagagcacgccttctgaagaaccctcaccaccacacaactcaaaacacaacaagtcaccaactctcagctgtcgctttgccatcctgaaagagagccccaggtcacttctggcacagaagtcctcccaccttgaagagacaggctctgactctggcactttgctcagcacgtcttcccaggcctccctggcaaggttttccatgaagaaatcaaccagtccagaaacgaaacatagcgagtttttggccaacgtcagcaccatcacctcagattattccaccacatcgtctgctacatacttgactagcctggactccagtcgactgagccctgaggtgcaatccgtggcagagagcaagggggacgaggcagatgacgagagaagcgaactcatcagtgaagggcggcctgtggaaaccgacagcgagagcgagtttcccgtgttccccacagccttgacttcagagaggcttttccgaggaaaactgcaagaagtgactaagagcagccggagaaattctgaaggaagtgaattaagttgcaccgagggaagtttaacatcaagtttagatagccggagacagctcttcagttcccataaactcatcgaatgtgatactctttccaggaaaaaatcagctagattcaagtcagatagtggaagtctaggagatgccaagaatgagaaagaagcaccttcgttaactaaagtgtttgatgttatgaaaaaaggaaagtcaactgggagtttactgacacccaccagaggcgaatccgaaaaacaggaacccacatggaaaacgaaaatagcagatcggttaaaactgagacccagagcccctgcggatgacatgtttggagtagggaatcacaaagtgaatgccgagactgctaaaaggaaaagcatccggcgcagacatacactaggagggcacagagatgctaccgaaatcagcgttttgaatttttggaaagtgcatgagcagagcggggagagagaatctgaactttcagctgtaaaccggttaaaaccaaaatgctcagcccaggacctttccatctcagactggctggccagggaacgcctacgcaccagtacctctgaccttagcagaggagaaatcggagatccccagacagagaacccaagcacacgagaaatagccacgaccgacacacctttgtctcttcattgcaacacaggcagttcttccagcaccttggcttcaacaaacaggccccttctttccataccaccacagtcacctgaccaaataaacggagaaagcttccagaacgtgagcaaaaatgctagttctgcagcgaatgcccaacctcataaactgtctgaaaccccaggcactaaagcagagtttcatccctgtctttaaactgggggtatgtccactctagcaagtaaaaaaactactgttacacgttccagtaactctgtcaatattttcttgtatcagaattgttattatgcagccttcatttgggctggtttcatcattttgcactgtgaaatagctttacagtgcattactacagccagaagaacatatatatatatatatatttaaaaatatatcggatagttgtatacaaatgagcaaggtatttgttgcaacttactacatagcatatacccaaaatcactgaagaaaatcgctggcatcagtgtgcagcaaatttgttcttttggtttcatcactaacaaaagtgcctcatcataaaaatacagttggtttttagggtgccatattgttaaaattagataacttacttacattgaataaacgaatgcgttttattggtaacagatatcattacatttaccagttttaacacaggtggatacagaacttccattctttagtcattccaggtggatctgagttttatattcaaacttttaatacagtttttgagttttgtgtgacttgaatttttaatctttctgtaaaatacgtaacttaaatgaacatattaaatgtgtatcttttcttcagataccagatttgatataatgttgtaacataggtgtgtagatagtggatcctggatggaactggcttctttatcgagaagaatataattctgcatgaggacttaatgaatccaaacctgtgtcatgcctgtgtgcatacccaattaaacactggaaataaaaattgttttggtgaa

SEQ ID NO: 339823 - DNA, 3286 bp, Homo sapiens
tttggatgaaaggggcattttagctgtgatatacaactactaaacatttgtgctgcattaaataaaatgtttatttcttgttttgcagtatattccattaatagttgacatatgttgcaaattagttgaagaaagaggtcttgaatatacaggtatttatagagttcctggaaataatgcagccatctcaagtatgcaagaagaactcaacaagggaatggctgatattgatatacaagatgataaatggcgagatttgaatgtgataagcagtttactaaaatccttcttcagaaaactccctgagcctctcttcacaaatgataaatatgctgattttattgaagccaatcgtaaagaagatcctctagatcgtctgaaaacattaaaaagactaattcacgatttgcctgaacatcattatgaaacacttaagttcctttcagctcatctgaagacagtggcagaaaattcagaaaaaaataagatggaaccaagaaacctagcaatagtgtttggtcccacccttgttcgaacatcagaagacaacatgacccacatggtcacccacatgcctgaccagtacaagattgtagaaacgctcatccagcaccatgactggtttttcacagaagaaggtgctgaagagcctcttacaacagtgctaggtggaaagcgacagtagactcccagccagtgccaaacatagatcatttactcaccaacattggaaggacaggagtctccccaggagatgtatcagattcagctactagtgactcaacaaaatctaagggttcttggggatctggaaaggatcagtatagcagggaactgcttgtgtcctccatctttgcagctgctagtcgcaagaggaagaagccgaaagaaaaagcacagcctagcagctcagaagatgaactggacaatgtattttttaagaaagaaaatgtggaacagtgtcacaatgatactaaagaggagtccaaaaaagaaagtgagacactgggcagaaaacagaagatcatcattgccaaagaaaacagcactaggaaagaccccagcacgacaaaagatgaaaagatatcactaggaaaagagagcacgccttctgaagaaccctcaccaccacacaactcaaaacacaacaagtcaccaactctcagctgtcgctttgccatcctgaaagagagccccaggtcacttctggcacagaagtcctcccaccttgaagagacaggctctgactctggcactttgctcagcacgtcttcccaggcctccctggcaaggttttccatgaagaaatcaaccagtccagaaacgaaacatagcgagtttttggccaacgtcagcaccatcacctcagattattccaccacatcgtctgctacatacttgactagcctggactccagtcgactgagccctgaggtgcaatccgtggcagagagcaagggggacgaggcagatgacgagagaagcgaactcatcagtgaagggcggcctgtggaaaccgacagcgagagcgagtttcccgtgttccccacagccttgacttcagagaggcttttccgaggaaaactgcaagaagtgactaagagcagccggagaaattctgaaggaagtgaattaagttgcaccgagggaagtttaacatcaagtttagatagccggagacagctcttcagttcccataaactcatcgaatgtgatactctttccaggaaaaaatcagctagattcaagtcagatagtggaagtctaggagatgccaagaatgagaaagaagcaccttcgttaactaaagtgtttgatgttatgaaaaaaggaaagtcaactgggagtttactgacacccaccagaggcgaatccgaaaaacaggaacccacatggaaaacgaaaatagcagatcggttaaaactgagacccagagcccctgcggatgacatgtttggagtagggaatcacaaagtgaatgccgagactgctaaaaggaaaagcatccggcgcagacatacactaggagggcacagagatgctaccgaaatcagcgttttgaatttttggaaagtgcatgagcagagcggggagagagaatctgaactttcagctgtaaaccggttaaaaccaaaatgctcagcccaggacctttccatctcagactggctggccagggaacgcctacgcaccagtacctctgaccttagcagaggagaaatcggagatccccagacagagaacccaagcacacgagaaatagccacgaccgacacacctttgtctcttcattgcaacacaggcagttcttccagcaccttggcttcaacaaacaggccccttctttccataccaccacagtcacctgaccaaataaacggagaaagcttccagaacgtgagcaaaaatgctagttctgcagcgaatgcccaacctcataaactgtctgaaaccccaggcactaaagcagagtttcatccctgtctttaaactgggggtatgtccactctagcaagtaaaaaaactactgttacacgttccagtaactctgtcaatattttcttgtatcagaattgttattatgcagccttcatttgggctggtttcatcattttgcactgtgaaatagctttacagtgcattactacagccagaagaacatatatatatatatatatttaaaaatatatcggatagttgtatacaaatgagcaaggtatttgttgcaacttactacatagcatatacccaaaatcactgaagaaaatcgctggcatcagtgtgcagcaaatttgttcttttggtttcatcactaacaaaagtgcctcatcataaaaatacagttggtttttagggtgccatattgttaaaattagataacttacttacattgaataaacgaatgcgttttattggtaacagatatcattacatttaccagttttaacacaggtggatacagaacttccattctttagtcattccaggtggatctgagttttatattcaaacttttaatacagtttttgagttttgtgtgacttgaatttttaatctttctgtaaaatacgtaacttaaatgaacatattaaatgtgtatcttttcttcagataccagatttgatataatgttgtaacataggtgtgtagatagtggatcctggatggaactggcttctttatcgagaagaatataattctgcatgaggacttaatgaatccaaacctgtgtcatgcctgtgtgcatacccaattaaacactggaaataaaaattgttttggtgaa

SEQ ID NO: 339824 - DNA, 2622 bp, Homo sapiens
aactaggtccagagagaccttaattttgaccatggctgtttcttggggataaactcacgcccattgaaccctcattattctccttgggtgttgcctgagatacaactactagtgactcaacataatctatgggttcttggggatctggaaaggatcagtatagcagggaactgcttgtgtcctccatctttgcagctgctagtcgcaagaggaagaagccgaaagaaaaagcacagcctagcagctcagaagatgaactggacaatgtattttttaagaaagaaaatgtggaacagtgtcacaatgatactaaagaggagtccaaaaaagaaagtgagacactgggcagaaaacagaagatcatcattgccaaagaaaacagcactaggaaagaccccagcacgacaaaagatgaaaagatatcactaggaaaagagagcacgccttctgaagaaccctcaccaccacacaactcaaaacacaacaagtcaccaactctcagctgtcgctttgccatcctgaaagagagccccaggtcacttctggcacagaagtcctcccaccttgaagagacaggctctgactctggcactttgctcagcacgtcttcccaggcctccctggcaaggttttccatgaagaaatcaaccagtccagaaacgaaacatagcgagtttttggccaacgtcagcaccatcacctcagattattccaccacatcgtctgctacatacttgactagcctggactccagtcgactgagccctgaggtgcaatccgtggcagagagcaagggggacgaggcagatgacgagagaagcgaactcatcagtgaagggcggcctgtggaaaccgacagcgagagcgagtttcccgtgttccccacagccttgacttcagagaggcttttccgaggaaaactgcaagaagtgactaagagcagccggagaaattctgaaggaagtgaattaagttgcaccgagggaagtttaacatcaagtttagatagccggagacagctcttcagttcccataaactcatcgaatgtgatactctttccaggaaaaaatcagctagattcaagtcagatagtggaagtctaggagatgccaagaatgagaaagaagcaccttcgttaactaaagtgtttgatgttatgaaaaaaggaaagtcaactgggagtttactgacacccaccagaggcgaatccgaaaaacaggaacccacatggaaaacgaaaatagcagatcggttaaaactgagacccagagcccctgcggatgacatgtttggagtagggaatcacaaagtgaatgccgagactgctaaaaggaaaagcatccggcgcagacatacactaggagggcacagagatgctaccgaaatcagcgttttgaatttttggaaagtgcatgagcagagcggggagagagaatctgaactttcagctgtaaaccggttaaaaccaaaatgctcagcccaggacctttccatctcagactggctggccagggaacgcctacgcaccagtacctctgaccttagcagaggagaaatcggagatccccagacagagaacccaagcacacgagaaatagccacgaccgacacacctttgtctcttcattgcaacacaggcagttcttccagcaccttggcttcaacaaacaggccccttctttccataccaccacagtcacctgaccaaataaacggagaaagcttccagaacgtgagcaaaaatgctagttctgcagcgaatgcccaacctcataaactgtctgaaaccccaggcactaaagcagagtttcatccctgtctttaaactgggggtatgtccactctagcaagtaaaaaaactactgttacacgttccagtaactctgtcaatattttcttgtatcagaattgttattatgcagccttcatttgggctggtttcatcattttgcactgtgaaatagctttacagtgcattactacagccagaagaacatatatatatatatatatttaaaaatatatcggatagttgtatacaaatgagcaaggtatttgttgcaacttactacatagcatatacccaaaatcactgaagaaaatcgctggcatcagtgtgcagcaaatttgttcttttggtttcatcactaacaaaagtgcctcatcataaaaatacagttggtttttagggtgccatattgttaaaattagataacttacttacattgaataaacgaatgcgttttattggtaacagatatcattacatttaccagttttaacacaggtggatacagaacttccattctttagtcattccaggtggatctgagttttatattcaaacttttaatacagtttttgagttttgtgtgacttgaatttttaatctttctgtaaaatacgtaacttaaatgaacatattaaatgtgtatcttttcttcagataccagatttgatataatgttgtaacataggtgtgtagatagtggatcctggatggaactggcttctttatcgagaagaatataattctgcatgaggacttaatgaatccaaacctgtgtcatgcctgtgtgcatacccaattaaacactggaaataaaaattgttttggtgaa

SEQ ID NO: 339825 - DNA, 5629 bp, Homo sapiens
  misc_feature (5629)..(5629): n is a, c, g, or t
cgttgttaatccaatgagccaggcgaatgagtggtagaggagtgggatctgtgtcgcagtttaaaaaaattccaccagatctaaaaacattgcagtcaaacagagagattttcagactacttgtggaatgtcactgcctcggggtatttcacaagacaggtcacctcttgtgaaagtccgaagtaattctctgaaagctccttccacgcatgtcacaaaaccatcatttagccagaaatcatttgtttctatgaaagaccaaagaccagtaaatcacttgcatcagaacagtctgttgaatcagcagacatgggtaaggactgacagtgcccccgatcagcaagtggagactgggaaatccccctctttatctggagcctctgccaagcctgcccctcagtcgagtgaaaacgctggtacttcagatttagaactacctgtcagtcaaaggaatcaagatttaagtttacaagaggctgaaactgagcaatcagatactttagataataaagaagctgtcatcctaagggaaaaacctccatctggacgccagacaccgcagcctttaaggcatcagtcttacatcttggcagtaaatgaccaggagaccgggtcagacactacctgctggctgcccaatgatgcacgtcgagaggtccacataaaaagaatggaggaaagaaaagcctcgagtaccagtccgcctggcgattctttggcttccatcccatttatagatgaaccaactagccctagcattgatcatgatattgcacatatccctgcctctgctgttatatcagcctctacctctcaggtcccctccatagcaacagttcctccttgcctcacaacttcagctccattaattcgccgtcagctctcacatgaccacgaatctgttggccctcctagcctggatgctcagcccaactcaaagacagaaagatcaaaatcatatgatgagggtctggatgattacagagaagatgcaaaattgtcctttaagcacgtatctagtctgaagggaatcaagatcgcagacagccaaaagtcatcagaagactctgggtccagaaaagattcttcctcagaggtcttcagtgatgctgccaaggaagggtggcttcatttccgaccccttgtcaccgataagggcaagcgagttggtggaagtattcggccatggaaacagatgtatgttgtccttcggggtcattcactttacctgtacaaagataaaagagagcagacgactccgtctgaggaagagcagcccatcagtgttaatgcttgcttgatagacatctcttacagtgagaccaagaggaaaaatgtgtttcgactcaccacgtccgactgtgaatgcctgtttcaggctgaagacagagatgatatgctagcttggatcaagacgatccaggagagcagcaacctaaacgaagaggacactggagtcactaacagggatctaattagtcgaagaataaaagaatacaacaatctgatgagcaaagcagaacagttgccaaaaacacctcgccagagtctcagcatcaggcaaactttgcttggtgctaaatcagagccaaagactcaaagcccacactctccgaaggaagagtcggaaaggaaacttctcagtaaagatgataccagtcccccaaaagacaaaggcacatggagaaaaggcattccaagtatcatgagaaagacatttgagaaaaagccaactgctacaggaactttcggcgtccgactagatgactgcccaccagctcatactaatcggtatattccattaatagttgacatatgttgcaaattagttgaagaaagaggtcttgaatatacaggtatttatagagttcctggaaataatgcagccatctcaagtatgcaagaagaactcaacaagggaatggctgatattgatatacaagatgataaatggcgagatttgaatgtgataagcagtttactaaaatccttcttcagaaaactccctgagcctctcttcacaaatgataaatatgctgattttattgaagccaatcgtaaagaagatcctctagatcgtctgaaaacattaaaaagactaattcacgatttgcctgaacatcattatgaaacacttaagttcctttcagctcatctgaagacagtggcagaaaattcagaaaaaaataagatggaaccaagaaacctagcaatagtgtttggtcccacccttgttcgaacatcagaagacaacatgacccacatggtcacccacatgcctgaccagtacaagattgtagaaacgctcatccagcaccatgactggtttttcacagaagaaggtgctgaagagcctcttacaacagtgctaggtggaaagcgacagtagactcccagccagtgccaaacatagatcatttactcaccaacattggaaggacaggagtctccccaggagatgtatcagattcagctactagtgactcaacaaaatctaagggttcttggggatctggaaaggatcagtatagcagggaactgcttgtgtcctccatctttgcagctgctagtcgcaagaggaagaagccgaaagaaaaagcacagcctagcagctcagaagatgaactggacaatgtattttttaagaaagaaaatgtggaacagtgtcacaatgatactaaagaggagtccaaaaaagaaagtgagacactgggcagaaaacagaagatcatcattgccaaagaaaacagcactaggaaagaccccagcacgacaaaagatgaaaagatatcactaggaaaagagagcacgccttctgaagaaccctcaccaccacacaactcaaaacacaacaagtcaccaactctcagctgtcgctttgccatcctgaaagagagccccaggtcacttctggcacagaagtcctcccaccttgaagagacaggctctgactctggcactttgctcagcacgtcttcccaggcctccctggcaaggttttccatgaagaaatcaaccagtccagaaacgaaacatagcgagtttttggccaacgtcagcaccatcacctcagattattccaccacatcgtctgctacatacttgactagcctggactccagtcgactgagccctgaggtgcaatccgtggcagagagcaagggggacgaggcagatgacgagagaagcgaactcatcagtgaagggcggcctgtggaaaccgacagcgagagcgagtttcccgtgttccccacagccttgacttcagagaggcttttccgaggaaaactgcaagaagtgactaagagcagccggagaaattctgaaggaagtgaattaagttgcaccgagggaagtttaacatcaagtttagatagccggagacagctcttcagttcccataaactcatcgaatgtgatactctttccaggaaaaaatcagctagattcaagtcagatagtggaagtctaggagatgccaagaatgagaaagaagcaccttcgttaactaaagtgtttgatgttatgaaaaaaggaaagtcaactgggagtttactgacacccaccagaggcgaatccgaaaaacaggaacccacatggaaaacgaaaatagcagatcggttaaaactgagacccagagcccctgcggatgacatgtttggagtagggaatcacaaagtgaatgccgagactgctaaaaggaaaagcatccggcgcagacatacactaggagggcacagagatgctaccgaaatcagcgttttgaatttttggaaagtgcatgagcagagcggggagagagaatctgaactttcagctgtaaaccggttaaaaccaaaatgctcagcccaggacctttccatctcagactggctggccagggaacgcctacgcaccagtacctctgaccttagcagaggagaaatcggagatccccagacagagaacccaagcacacgagaaatagccacgaccgacacacctttgtctcttcattgcaacacaggcagttcttccagcaccttggcttcaacaaacaggccccttctttccataccaccacagtcacctgaccaaataaacggagaaagcttccagaacgtgagcaaaaatgctagttctgcagcgaatgcccaacctcataaactgtctgaaaccccaggcactaaagcagagtttcatccctgtctttaaactgggggtatgtccactctagcaagtaaaaaaactactgttacacgttccagtaactctgtcaatattttcttgtatcagaattgttattatgcagccttcatttgggctggtttcatcattttgcactgtgaaatagctttacagtgcattactacagccagaagaacatatatatatatatatatttaaaaatatatcggatagttgtatacaaatgagcaaggtatttgttgcaacttactacatagcatatacccaaaatcactgaagaaaatcgctggcatcagtgtgcagcaaatttgttcttttggtttcatcactaacaaaagtgcctcatcataaaaatacagttggtttttagggtgccatattgttaaaattagataacttacttacattgaataaacgaatgcgttttattggtaacagatatcattacatttaccagttttaacacaggtggatacagaacttccattctttagtcattccaggtggatctgagttttatattcaaacttttaatacagtttttgagttttgtgtgacttgaatttttaatctttctgtaaaatacgtaacttaaatgaacatattaaatgtgtatcttttcttcagataccagatttgatataatgttgtaacataggtgtgtagatagtggatcctggatggaactggcttctttatcgagaagaatataattctgcatgaggacttaatgaatccaaacctgtgtcatgcctgtgtgcatacccaattaaacactggaaataaaaattgttttggtgaaaaaaaaaaaaaaaaaaaaaaaaaaaaaaaaaaaaaaaaaaaaaaaaaaaaaaacaaaaaaaagggcggggcgcgtcccataaataaattacccgcaacggggggccccacggtagtgaggcagccacacccgcgttttttgtattgcaaaaagaggggcgcccccacattatagaggggcagtatacattataaaacgaagccagcagcgcgggccgacgattaacaacaacggcggccagagggaaaaacacatctacacaggaggggactaatttgtggggagaaggaccaccccactatgtccggggggcgggacacacatcagtggcggcacacaccacacccccaacagataaataacacggccccgagggggaaactaaacacaagcagcgcgcgatcgcggggaacacactcacggagaaatcccccgccgcgcgacaagaaaccttccgacgcacggagttataggagtacgaagcaatccatacccacggcggctgttactaagaataacaaagagaacgacaacaaacaccgacacgacagcaacgccagccacaggccagcgacgaagccaggcagacgtaacacagatgcgaggagccccaccgcagcaatacacaaaccagatagn

SEQ ID NO: 339826 - DNA, 1556 bp, Homo sapiens
aggatcccccttgatatgctgggatagtggaagtctaggagatgccaagaatgagaaagaagcaccttcgttaactaaagtgtttgatgttatgaaaaaaggaaagtcaactgggagtttactgacacccaccagaggcgaatccgaaaaacaggaacccacatggaaaacgaaaatagcagatcggttaaaactgagacccagagcccctgcggatgacatgtttggagtagggaatcacaaagtgaatgccgagactgctaaaaggaaaagcatccggcgcagacatacactaggagggcacagagatgctaccgaaatcagcgttttgaatttttggaaagtgcatgagcagagcggggagagagaatctgaactttcagctgtaaaccggttaaaaccaaaatgctcagcccaggacctttccatctcagactggctggccagggaacgcctacgcaccagtacctctgaccttagcagaggagaaatcggagatccccagacagagaacccaagcacacgagaaatagccacgaccgacacacctttgtctcttcattgcaacacaggcagttcttccagcaccttggcttcaacaaacaggccccttctttccataccaccacagtcacctgaccaaataaacggagaaagcttccagaacgtgagcaaaaatgctagttctgcagcgaatgcccaacctcataaactgtctgaaaccccaggcactaaagcagagtttcatccctgtctttaaactgggggtatgtccactctagcaagtaaaaaaactactgttacacgttccagtaactctgtcaatattttcttgtatcagaattgttattatgcagccttcatttgggctggtttcatcattttgcactgtgaaatagctttacagtgcattactacagccagaagaacatatatatatatatatatttaaaaatatatcggatagttgtatacaaatgagcaaggtatttgttgcaacttactacatagcatatacccaaaatcactgaagaaaatcgctggcatcagtgtgcagcaaatttgttcttttggtttcatcactaacaaaagtgcctcatcataaaaatacagttggtttttagggtgccatattgttaaaattagataacttacttacattgaataaacgaatgcgttttattggtaacagatatcattacatttaccagttttaacacaggtggatacagaacttccattctttagtcattccaggtggatctgagttttatattcaaacttttaatacagtttttgagttttgtgtgacttgaatttttaatctttctgtaaaatacgtaacttaaatgaacatattaaatgtgtatcttttcttcagataccagatttgatataatgttgtaacataggtgtgtagatagtggatcctggatggaactggcttctttatcgagaagaatataattctgcatgaggacttaatgaatccaaacctgtgtcatgcctgtgtgcatacccaattaaacactggaaataaaaattgttttggtgaa

SEQ ID NO: 339827 - DNA, 195 bp, Homo sapiens
cttcatttccgaccccttgtcaccgataagggcaaggtagtgtgttttctaagccaccctgagtgtcagaaatgcagaccctgacaaataaaccataaagcctgtatacataaaatggcatgatatccagattaaagagtgaaaaaaaaaaccatttataaatagatttttctacattaaaaaaagtattcctta

SEQ ID NO: 339828 - DNA, 4951 bp, Homo sapiens
cgttgttaatccaatgagccaggcgaatgagtggtagaggagtgggatctgtgtcgcagtttaaaaaaattccaccagatctaaaaacattgcagtcaaacagagagattttcagactacttgtggaatgtcactgcctcggggtatttcacaagacaggtcacctcttgtgaaagtccgaagtaattctctgaaagctccttccacgcatgtcacaaaaccatcatttagccagaaatcatttgtttctatgaaagaccaaagaccagtaaatcacttgcatcagaacagtctgttgaatcagcagacatgggtaaggactgacagtgcccccgatcagcaagtggagactgggaaatccccctctttatctggagcctctgccaagcctgcccctcagtcgagtgaaaacgctggtacttcagatttagaactacctgtcagtcaaaggaatcaagatttaagtttacaagaggctgaaactgagcaatcagatactttagataataaagaagctgtcatcctaagggaaaaacctccatctggacgccagacaccgcagcctttaaggcatcagtcttacatcttggcagtaaatgaccaggagaccgggtcagacactacctgctggctgcccaatgatgcacgtcgagaggtccacataaaaagaatggaggaaagaaaagcctcgagtaccagtccgcctggcgattctttggcttccatcccatttatagatgaaccaactagccctagcattgatcatgatattgcacatatccctgcctctgctgttatatcagcctctacctctcaggtcccctccatagcaacagttcctccttgcctcacaacttcagctccattaattcgccgtcagctctcacatgaccacgaatctgttggccctcctagcctggatgctcagcccaactcaaagacagaaagatcaaaatcatatgatgagggtctggatgattacagagaagatgcaaaattgtcctttaagcacgtatctagtctgaagggaatcaagatcgcagacagccaaaagtcatcagaagactctgggtccagaaaagattcttcctcagaggtcttcagtgatgctgccaaggaagggtggcttcatttccgaccccttgtcaccgataagggcaagcgagttggtggaagtattcggccatggaaacagatgtatgttgtccttcggggtcattcactttacctgtacaaagataaaagagagcagacgactccgtctgaggaagagcagcccatcagtgttaatgcttgcttgatagacatctcttacagtgagaccaagaggaaaaatgtgtttcgactcaccacgtccgactgtgaatgcctgtttcaggctgaagacagagatgatatgctagcttggatcaagacgatccaggagagcagcaacctaaacgaagaggacactggagtcactaacagggatctaattagtcgaagaataaaagaatacaacaatctgatgagcaaagcagaacagttgccaaaaacacctcgccagagtctcagcatcaggcaaactttgcttggtgctaaatcagagccaaagactcaaagcccacactctccgaaggaagagtcggaaaggaaacttctcagtaaagatgataccagtcccccaaaagacaaaggcacatggagaaaaggcattccaagtatcatgagaaagacatttgagaaaaagccaactgctacaggaactttcggcgtccgactagatgactgcccaccagctcatactaatcggtatattccattaatagttgacatatgttgcaaattagttgaagaaagaggtcttgaatatacaggtatttatagagttcctggaaataatgcagccatctcaagtatgcaagaagaactcaacaagggaatggctgatattgatatacaagatgataaatggcgagatttgaatgtgataagcagtttactaaaatccttcttcagaaaactccctgagcctctcttcacaaatgataaatatgctgattttattgaagccaatcgtaaagaagatcctctagatcgtctgaaaacattaaaaagactattcctttcagctcatctgaagacagtggcagaaaattcagaaaaaaataagatggaaccaagaaacctagcaatagtgtttggtcccacccttgttcgaacatcagaagacaacatgacccacatggtcacccacatgcctgaccagtacaagattgtagaaacgctcatccagcaccatgactggtttttcacagaagaaggtgctgaagagcctcttacaacagtgctaggtggaaagcgacagtagactcccagccagtgccaaacatagatcatttactcaccaacattggaaggacaggagtctccccaggagatgtatcagattcagctactagtgactcaacaaaatctaagggttcttggggatctggaaaggatcagtatagcagggaactgcttgtgtcctccatctttgcagctgctagtcgcaagaggaagaagccgaaagaaaaagcacagcctagcagctcagaagatgaactggacaatgtattttttaagaaagaaaatgtggaacagtgtcacaatgatactaaagaggagtccaaaaaagaaagtgagacactgggcagaaaacagaagatcatcattgccaaagaaaacagcactaggaaagaccccagcacgacaaaagatgaaaagatatcactaggaaaagagagcacgccttctgaagaaccctcaccaccacacaactcaaaacacaacaagtcaccaactctcagctgtcgctttgccatcctgaaagagagccccaggtcacttctggcacagaagtcctcccaccttgaagagacaggctctgactctggcactttgctcagcacgtcttcccaggcctccctggcaaggttttccatgaagaaatcaaccagtccagaaacgaaacatagcgagtttttggccaacgtcagcaccatcacctcagattattccaccacatcgtctgctacatacttgactagcctggactccagtcgactgagccctgaggtgcaatccgtggcagagagcaagggggacgaggcagatgacgagagaagcgaactcatcagtgaagggcggcctgtggaaaccgacagcgagagcgagtttcccgtgttccccacagccttgacttcagagaggcttttccgaggaaaactgcaagaagtgactaagagcagccggagaaattctgaaggaagtgaattaagttgcaccgagggaagtttaacatcaagtttagatagccggagacagctcttcagttcccataaactcatcgaatgtgatactctttccaggaaaaaatcagctagattcaagtcagatagtggaagtctaggagatgccaagaatgagaaagaagcaccttcgttaactaaagtgtttgatgttatgaaaaaaggaaagtcaactgggagtttactgacacccaccagaggcgaatccgaaaaacaggaacccacatggaaaacgaaaatagcagatcggttaaaactgagacccagagcccctgcggatgacatgtttggagtagggaatcacaaagtgaatgccgagactgctaaaaggaaaagcatccggcgcagacatacactaggagggcacagagatgctaccgaaatcagcgttttgaatttttggaaagtgcatgagcagagcggggagagagaatctgaactttcagctgtaaaccggttaaaaccaaaatgctcagcccaggacctttccatctcagactggctggccagggaacgcctacgcaccagtacctctgaccttagcagaggagaaatcggagatccccagacagagaacccaagcacacgagaaatagccacgaccgacacacctttgtctcttcattgcaacacaggcagttcttccagcaccttggcttcaacaaacaggccccttctttccataccaccacagtcacctgaccaaataaacggagaaagcttccagaacgtgagcaaaaatgctagttctgcagcgaatgcccaacctcataaactgtctgaaaccccaggcactaaagcagagtttcatccctgtctttaaactgggggtatgtccactctagcaagtaaaaaaactactgttacacgttccagtaactctgtcaatattttcttgtatcagaattgttattatgcagccttcatttgggctggtttcatcattttgcactgtgaaatagctttacagtgcattactacagccagaagaacatatatatatatatatatttaaaaatatatcggatagttgtatacaaatgagcaaggtatttgttgcaacttactacatagcatatacccaaaatcactgaagaaaatcgctggcatcagtgtgcagcaaatttgttcttttggtttcatcactaacaaaagtgcctcatcataaaaatacagttggtttttagggtgccatattgttaaaattagataacttacttacattgaataaacgaatgcgttttattggtaacagatatcattacatttaccagttttaacacaggtggatacagaacttccattctttagtcattccaggtggatctgagttttatattcaaacttttaatacagtttttgagttttgtgtgacttgaatttttaatctttctgtaaaatacgtaacttaaatgaacatattaaatgtgtatcttttcttcagataccagatttgatataatgttgtaacataggtgtgtagatagtggatcctggatggaactggcttctttatcgagaagaatataattctgcatgaggacttaatgaatccaaacctgtgtcatgcctgtgtgcatacccaattaaacactggaaataaaaattgttttggtgaa

SEQ ID NO: 339829 - DNA, 2659 bp, Homo sapiens
  misc_feature (22)..(22): n is a, c, g, or t
  misc_feature (27)..(27): n is a, c, g, or t
gccatcgtcatagctgactctngaggntacaacagtgctaggtggaaagcgacagtagactcccagccagtgccaaacatagatcatttactcaccaacattggaaggacaggagtctccccaggagatgtatcagattcagctactagtgactcaacaaaatctaagggttcttggggatctggaaaggatcagtatagcagggaactgcttgtgtcctccatctttgcagctgctagtcgcaagaggaagaagccgaaagaaaaagcacagcctagcagctcagaagatgaactggacaatgtattttttaagaaagaaaatgtggaacagtgtcacaatgatactaaagaggagtccaaaaaagaaagtgagacactgggcagaaaacagaagatcatcattgccaaagaaaacagcactaggaaagaccccagcacgacaaaagatgaaaagatatcactaggaaaagagagcacgccttctgaagaaccctcaccaccacacaactcaaaacacaacaagtcaccaactctcagctgtcgctttgccatcctgaaagagagccccaggtcacttctggcacagaagtcctcccaccttgaagagacaggctctgactctggcactttgctcagcacgtcttcccaggcctccctggcaaggttttccatgaagaaatcaaccagtccagaaacgaaacatagcgagtttttggccaacgtcagcaccatcacctcagattattccaccacatcgtctgctacatacttgactagcctggactccagtcgactgagccctgaggtgcaatccgtggcagagagcaagggggacgaggcagatgacgagagaagcgaactcatcagtgaagggcggcctgtggaaaccgacagcgagagcgagtttcccgtgttccccacagccttgacttcagagaggcttttccgaggaaaactgcaagaagtgactaagagcagccggagaaattctgaaggaagtgaattaagttgcaccgagggaagtttaacatcaagtttagatagccggagacagctcttcagttcccataaactcatcgaatgtgatactctttccaggaaaaaatcagctagattcaagtcagatagtggaagtctaggagatgccaagaatgagaaagaagcaccttcgttaactaaagtgtttgatgttatgaaaaaaggaaagtcaactgggagtttactgacacccaccagaggcgaatccgaaaaacaggaacccacatggaaaacgaaaatagcagatcggttaaaactgagacccagagcccctgcggatgacatgtttggagtagggaatcacaaagtgaatgccgagactgctaaaaggaaaagcatccggcgcagacatacactaggagggcacagagatgctaccgaaatcagcgttttgaatttttggaaagtgcatgagcagagcggggagagagaatctgaactttcagctgtaaaccggttaaaaccaaaatgctcagcccaggacctttccatctcagactggctggccagggaacgcctacgcaccagtacctctgaccttagcagaggagaaatcggagatccccagacagagaacccaagcacacgagaaatagccacgaccgacacacctttgtctcttcattgcaacacaggcagttcttccagcaccttggcttcaacaaacaggccccttctttccataccaccacagtcacctgaccaaataaacggagaaagcttccagaacgtgagcaaaaatgctagttctgcagcgaatgcccaacctcataaactgtctgaaaccccaggcactaaagcagagtttcatccctgtctttaaactgggggtatgtccactctagcaagtaaaaaaactactgttacacgttccagtaactctgtcaatattttcttgtatcagaattgttattatgcagccttcatttgggctggtttcatcattttgcactgtgaaatagctttacagtgcattactacagccagaagaacatatatatatatatatatttaaaaatatatcggatagttgtatacaaatgagcaaggtatttgttgcaacttactacatagcatatacccaaaatcactgaagaaaatcgctggcatcagtgtgcagcaaatttgttcttttggtttcatcactaacaaaagtgcctcatcataaaaatacagttggtttttagggtgccatattgttaaaattagataacttacttacattgaataaacgaatgcgttttattggtaacagatatcattacatttaccagttttaacacaggtggatacagaacttccattctttagtcattccaggtggatctgagttttatattcaaacttttaatacagtttttgagttttgtgtgacttgaatttttaatctttctgtaaaatacgtaacttaaatgaacatattaaatgtgtatcttttcttcagataccagatttgatataatgttgtaacataggtgtgtagatagtggatcctggatggaactggcttctttatcgagaagaatataattctgcatgaggacttaatgaatccaaacctgtgtcatgcctgtgtgcatacccaattaaacactggaaataaaaattgttttggtgaa

SEQ ID NO: 339830 - DNA, 2043 bp, Homo sapiens
acactcttaatggatgagttgtatggtatgggaattatacctcaataaaactgttataagaaattcagcagggcatagaaacgaaacatagcgagtttttggccaacgtcagcaccatcacctcagattattccaccacatcgtctgctacatacttgactagcctggactccagtcgactgagccctgaggtgcaatccgtggcagagagcaagggggacgaggcagatgacgagagaagcgaactcatcagtgaagggcggcctgtggaaaccgacagcgagagcgagtttcccgtgttccccacagccttgacttcagagaggcttttccgaggaaaactgcaagaagtgactaagagcagccggagaaattctgaaggaagtgaattaagttgcaccgagggaagtttaacatcaagtttagatagccggagacagctcttcagttcccataaactcatcgaatgtgatactctttccaggaaaaaatcagctagattcaagtcagatagtggaagtctaggagatgccaagaatgagaaagaagcaccttcgttaactaaagtgtttgatgttatgaaaaaaggaaagtcaactgggagtttactgacacccaccagaggcgaatccgaaaaacaggaacccacatggaaaacgaaaatagcagatcggttaaaactgagacccagagcccctgcggatgacatgtttggagtagggaatcacaaagtgaatgccgagactgctaaaaggaaaagcatccggcgcagacatacactaggagggcacagagatgctaccgaaatcagcgttttgaatttttggaaagtgcatgagcagagcggggagagagaatctgaactttcagctgtaaaccggttaaaaccaaaatgctcagcccaggacctttccatctcagactggctggccagggaacgcctacgcaccagtacctctgaccttagcagaggagaaatcggagatccccagacagagaacccaagcacacgagaaatagccacgaccgacacacctttgtctcttcattgcaacacaggcagttcttccagcaccttggcttcaacaaacaggccccttctttccataccaccacagtcacctgaccaaataaacggagaaagcttccagaacgtgagcaaaaatgctagttctgcagcgaatgcccaacctcataaactgtctgaaaccccaggcactaaagcagagtttcatccctgtctttaaactgggggtatgtccactctagcaagtaaaaaaactactgttacacgttccagtaactctgtcaatattttcttgtatcagaattgttattatgcagccttcatttgggctggtttcatcattttgcactgtgaaatagctttacagtgcattactacagccagaagaacatatatatatatatatatttaaaaatatatcggatagttgtatacaaatgagcaaggtatttgttgcaacttactacatagcatatacccaaaatcactgaagaaaatcgctggcatcagtgtgcagcaaatttgttcttttggtttcatcactaacaaaagtgcctcatcataaaaatacagttggtttttagggtgccatattgttaaaattagataacttacttacattgaataaacgaatgcgttttattggtaacagatatcattacatttaccagttttaacacaggtggatacagaacttccattctttagtcattccaggtggatctgagttttatattcaaacttttaatacagtttttgagttttgtgtgacttgaatttttaatctttctgtaaaatacgtaacttaaatgaacatattaaatgtgtatcttttcttcagataccagatttgatataatgttgtaacataggtgtgtagatagtggatcctggatggaactggcttctttatcgagaagaatataattctgcatgaggacttaatgaatccaaacctgtgtcatgcctgtgtgcatacccaattaaacactggaaataaaaattgttttggtgaa

SEQ ID NO: 339831 - DNA, 3048 bp, Homo sapiens
cgttgttaatccaatgagccaggcgaatgagtggtagaggagtgggatctgtgtcgcagtttaaaaaaattccaccagatctaaaaacattgcagtcaaacagagagattttcagactacttgtggaatgtcactgcctcggggtatttcacaagacaggtcacctcttgtgaaagtccgaagtaattctctgaaagctccttccacgcatgtcacaaaaccatcatttagccagaaatcatttgtttctatgaaagaccaaagaccagtaaatcacttgcatcagaacagtctgttgaatcagcagacatgggtaaggactgacagtgcccccgatcagcaagtggagactgggaaatccccctctttatctggagcctctgccaagcctgcccctcagtcgagtgaaaacgctggtacttcagatttagaactacctgtcagtcaaaggaatcaagatttaagtttacaagaggctgaaactgagcaatcagatactttagataataaagaagctgtcatcctaagggaaaaacctccatctggacgccagacaccgcagcctttaaggcatcagtcttacatcttggcagtaaatgaccaggagaccgggtcagacactacctgctggctgcccaatgatgcacgtcgagaggtccacataaaaagaatggaggaaagaaaagcctcgagtaccagtccgcctggcgattctttggcttccatcccatttatagatgaaccaactagccctagcattgatcatgatattgcacatatccctgcctctgctgttatatcagcctctacctctcaggtcccctccatagcaacagttcctccttgcctcacaacttcagctccattaattcgccgtcagctctcacatgaccacgaatctgttggccctcctagcctggatgctcagcccaactcaaagacagaaagatcaaaatcatatgatgagggtctggatgattacagagaagatgcaaaattgtcctttaagcacgtatctagtctgaagggaatcaagatcgcagacagccaaaagtcatcagaagactctgggtccagaaaagattcttcctcagaggtcttcagtgatgctgccaaggaagggtggcttcatttccgaccccttgtcaccgataagggcaagcgagttggtggaagtattcggccatggaaacagatgtatgttgtccttcggggtcattcactttacctgtacaaagataaaagagagcagacgactccgtctgaggaagagcagcccatcagtgttaatgcttgcttgatagacatctcttacagtgagaccaagaggaaaaatgtgtttcgactcaccacgtccgactgtgaatgcctgtttcaggctgaagacagagatgatatgctagcttggatcaagacgatccaggagagcagcaacctaaacgaagaggacactggagtcactaacagggatctaattagtcgaagaataaaagaatacaacaatctgatgagcaaagcagaacagttgccaaaaacacctcgccagagtctcagcatcaggcaaactttgcttggtgctaaatcagagccaaagactcaaagcccacactctccgaaggaagagtcggaaaggaaacttctcagtaaagatgataccagtcccccaaaagacaaaggcacatggagaaaaggcattccaagtatcatgagaaagacatttgagaaaaagccaactgctacaggaactttcggcgtccgactagatgactgcccaccagctcatactaatcggtatattccattaatagttgacatatgttgcaaattagttgaagaaagaggtcttgaatatacaggtatttatagagttcctggaaataatgcagccatctcaagtatgcaagaagaactcaacaagggaatggctgatattgatatacaagatgataaatggcgagatttgaatgtgataagcagtttactaaaatccttcttcagaaaactccctgagcctctcttcacaaatgataaatatgctgattttattgaagccaatcgtaaagaagatcctctagatcgtctgaaaacattaaaaagactaattcacgatttgcctgaacatcattatgaaacacttaagttcctttcagctcatctgaagacagtggcagaaaattcagaaaaaaataagatggaaccaagaaacctagcaatagtgtttggtcccacccttgttcgaacatcagaagacaacatgacccacatggtcacccacatgcctgaccagtacaagattgtagaaacgctcatccagcaccatgactggtttttcacagaagaaggtgctgaagagcctcttacaacagtgctaggtggaaagcgacagtagactcccagccagtgccaaacatagatcatttactcaccaacattggaaggacaggagtctccccaggagatgtatcagattcagctactagtgactcaacaaaatctaagggttcttggggatctggaaaggatcagtatagcagggaactgcttgtgtcctccatctttgcagctgctagtcgcaagaggaagaagccgaaagaaaaagcacagcctagcagctcagaagatgaactggacaatgtattttttaagaaagaaaatgtggaacagtgtcacaatgatactaaagaggagtccaaaaaagaaagtgagacactgggcagaaaacagaagatcatcattgccaaagaaaacagcactaggaaagaccccagcacgacaaaagatgaaaagatatcactaggaaaagagagcacgccttctgaagaaccctcaccaccacacaactcaaaacacaacaagtcaccaactctcagctgtcgctttgccatcctgaaagagagccccaggtcacttctggcacagaagtcctcccaccttgaagagacaggctctgactctggcactttgctcagcactcgtctccgaagcccccgctgccacccctggctcctcctctgtgctgggacagcacagaggaggtgacagcacagg

SEQ ID NO: 339832 - DNA, 265 bp, Homo sapiens
acaagcaatgataacacagttgtgttcccttgtgtgagtctggggtgacgttggctccttgagaaatgaaaactttatcataagaatctgtgaaaatggggaaaatgggaaaaggaggacagattcaaaattggaggaaaacaggaaaatctctcttcatcttttctaattgttcttttaatgaaatcagtactgccctttggcattaatgatcgtatgcgaaaggtaagacacattgattttggattttattgttgtagcatgg

SEQ ID NO: 339833 - DNA, 510 bp, Homo sapiens
tgaagggctttatgttccactccctgaccaggggcttcggggtgtgcaccctggcagggcaggctgcgcccacgacccaggcaccccgagggttcacaggcaagggtttcagaaggtggggaggctgaggttgtggcaaagtcataaatcagtacatggaggccgtatgtcagtttgacctgagaaggcagacatcacgacgtgtggcccatgggtcggatatagagcgtttttgatttgtgattggttaaggaggagaagctttgtccaaacaattgagatcagcagaaaagaatgttggctctggcccacaggcatgacccctcctggcccctgaggaagaaattcagaatagagccgggttcagggttcgggcctgtgatcccccctgcatttgtggtctgtgttggtagatctgtttggtgagggtctcggtttttgaaaaacaatttagggacatatgttaagatgctatttttaacttgtatagggaataaatatctcctgact

SEQ ID NO: 339834 - DNA, 416 bp, Homo sapiens
atccaggtaaaatagtgaaaattctccaaggatggggcttttatggtgctccagaactggtctgccactccagtttcagataggctgctggtttttgcagcttctgttgttgcaaggttgttggttttcaaggctactgcaaagctagagaaggggagatgggatgatggaaagtcgaaatgctacaaacctcactgtttaagttacattcatctcttagcatatggatagccaattgtcctggtgcctttagttgaaaagactattctttttcattgaattgtcttaatatctttgtgaaaaatcaatttaccataaatgtaagaggctttttaaaatgtttttttcctcttcattttcagcaatttgattatgccatgtctcttctgcacatgagttctttgttagttcaaatt

SEQ ID NO: 339835 - DNA, 285 bp, Homo sapiens
cctattcttatctttcttcatagcattcaaaacaattgactacttccttctccttgatgtctatttcatcttggcttctatggcatcgttttcttccaaatgccccccacctgctggaagctctgtttctgtttcctttgctggctcctcctctatgtgtttaacttctacatgttggaattcccagcttggttccagctcattgacttttctctaactgcatgtccactctaagtggttatatgttaatgtcacgcccccaacaaatgtacatctgctactgaa

SEQ ID NO: 339836 - DNA, 419 bp, Homo sapiens
ctatttcccatctctaaccagacccagtcacatgatccagtagagcttgccagaggttataacaatgaaaccaactaatacaatgaagactgtcccaaaattatagaatataaattccctctaattatcaatgcccaatgatatgaaagcccaaatgttaaacctcaaagtccccttataaagctcaaagtacaaaaatctagatacataaaataaaaaactcttttctcttcaatttctttatctgctcaatctcagacagacgatacatgggttctttcagcaaattctatcctatcttcctcaggaactgataaagttcccctatctcctaaagtacaaggcttcagctctgccaacaccctccccatatcaacccaccacaagcaaatctgcgcactctagctattactacacag

SEQ ID NO: 339837 - DNA, 204 bp, Homo sapiens
gggtgtgtgtgtgtgtgtgtgtgtgtgtgtgcgtgcgctgtggctgcggcgctacctccaccaagatttcaaagaatgttgcagacagccttggggcccaggaagagagttgctgcaggtgtggaaccactgcagtttccaccaggggaatgcttagtggcattgtggggatagggctgtctctgcaaccccagaacaatagag

SEQ ID NO: 339838 - DNA, 622 bp, Homo sapiens
cccaaggatctccagcccctgcagccacagactggtactggtctatggcctgttaggaactgggccgcacagcaggaggtgagctgtgggctagagctccacttcctgtcacatcagcagcggcactggattctcataggattgcaaaccctattgtgaactgtgcatgcgaggggggttgctcgcttcttatgagagtctaatgataaatgtaatgcacttgaatcatccccaaactatgcccccctcctccacttctccaggtctgtggaaaaattgtcttccacaaaattggtccctgatgccaaaaaggctgaggcactgatacacctttgaacttgacctgaatcctcttggttgcttatgtaactcagtaactatggtatatgtgagttaaagatacttttcttatgtttttagagccatgtgtttttgtatctgtgcattaaaatgctctgatatttttcagactattgtctgattttatgtaagatacatttgtttttctacagaagttttttgtcgttgttttttacttaattgcatttttttaacctttcctgtggtgctgaaaattgcaatattttttgaattgaaatttaaatgtaagaagtgagtcatg

SEQ ID NO: 339839 - DNA, 1520 bp, Homo sapiens
aacatttatttactattcccttttttattgttaccaggatagtacttttattaaattcctgatacgttgtcaatattgaaaaaactcaacaacttaaatgtacacgcacagtttgaaaagctggaaaatagtgaaagaatatccccatacccacctttcgtaccagtccccaaacatcacggtaaagtttactgtctcttcccagcccatggacgggaatggtaacgcctacggaatatgttgtgacatacagttgatcctaggttctccagaacaaaatgctgcacgaccacctcatcctggccctttattaaatatagcttaattctggacacaaacagttcccaccatgaagagagagtaggtgaccggaaaggagtgcgtcttaagcgcgttcgctgaatttgcaccacccaatccagccccgccgcccggcgccgctccttagacctggaccccggcaccctcccgccggggccgcacttagcagtggaaagtctgtcctcctgaagaagttgcgctccgacctccaagcatcaggtcaaaagtctaactcattctctgacctgccgccaattagaaaacaactgttgccaataaacgtggtcgcgccgcctgtgacctcagccgggacggacccgcgggcgggagcctgcggggcgtgaggcggggtggggccctggctcccctcccccgcccagccgcggcgtctgacgtcccgcgcgtcggcggccgcggagcagcgcagggagccaggcgggctgccggcgggtgtgaagaaaaaaatgacactccaatgggctgcagtggcaacctttctttatgccgaaataggactcattttaatcttctgcctaccttttattcctcctcagagatggcagaagattttttcatttaatgtctggggtaaaattgcaactttttggaacaaggctttccttaccattatcatcctattgattgttctatttctagcttttctgcataatggattcaggagtattattcccatttaattaccaaggaagatgaatcacgaagcataatgatccttcatagtactcactatttgcctatttaaaataagtcgtaaatatatattatctttgttggttttttggtagtggttggcatgctcttactatattattgaggcaatctgagaaatgacaaaggggaaatagccattaagatacaggaaattttctaaagatcatttaagagactactttatataactatgcaaataaattggaaaacctagataaaatgtataattttgtagaaaaatatgatttaccaaatgaacaccagtagatatagaaaatttaagcagactaatttatatagaaaaattatagaaagttatcaaaaaggacccctatttgaaaaaaaaagcaaaaaaccagatagttttataagaaaccctactgctttcagaaaacagatattactactgcttcttaaactgttctagaatttaaacttcaaattgtacagagctagaaaaaagcaag

SEQ ID NO: 339840 - DNA, 4295 bp, Homo sapiens
aacatttatttactattcccttttttattgttaccaggatagtacttttattaaattcctgatacgttgtcaatattgaaaaaactcaacaacttaaatgtacacgcacagtttgaaaagctggaaaatagtgaaagaatatccccatacccacctttcgtaccagtccccaaacatcacggtaaagtttactgtctcttcccagcccatggacgggaatggtaacgcctacggaatatgttgtgacatacagttgatcctaggttctccagaacaaaatgctgcacgaccacctcatcctggccctttattaaatatagcttaattctggacacaaacagttcccaccatgaagagagagtaggtgaccggaaaggagtgcgtcttaagcgcgttcgctgaatttgcaccacccaatccagccccgccgcccggcgccgctccttagacctggaccccggcaccctcccgccggggccgcacttagcagtggaaagtctgtcctcctgaagaagttgcgctccgacctccaagcatcaggtcaaaagtctaactcattctctgacctgccgccaattagaaaacaactgttgccaataaacgtggtcgcgccgcctgtgacctcagccgggacggacccgcgggcgggagcctgcggggcgtgaggcggggtggggccctggctcccctcccccgcccagccgcggcgtctgacgtcccgcgcgtcggcggccgcggagcagcgcagggagccaggcgggctgccggcgggtgtgaagaaaaaaatgacactccaatgggctgcagtggcaacctttctttatgccgaaataggactcattttaatcttctgcctaccttttattcctcctcagagatggcagaagattttttcatttaatgtctggggtaaaattgcaactttttggaacaaggctttccttaccattatcatcctattgattgttctatttctagatgctgtgagagaagtaaggaaatattcctcagttcataccattgagaagagctccaccagcagacctgatgcctatgaacacacacagatgaaactttttaggtctcaaagaaatctttacatttctggattttccctatttttttggctagttttgagacgtctggttacgcttattactcaactggcaaaagaactgtcaaacaaaggtgtacttaaaactcaagcagaaaatactaacaaggctgccaaaaaatttatggaagaaaacgaaaaactaaaaaggattttgaaaagccatggtaaagatgaagaatgtgttttggaagcagaaaataaaaaactagtagaagaccaggagaaactgaaaactgaattaaggaagacttcagatgccctttctaaggcacaaaatgatgtgatggaaatgaagatgcagtcagagagactttcgaaagaatatgatcaactcctgaaagaacactctgaacttcaggatcgtttagaaagaggcaacaagaaaagactgtgaactttataaaagacacttgcaatatactgtgtcaaaatgataattttgttatgttagcctctagaaaatttaagttcagaaaaatgcactatgaccggttcgtaatttttttaatgccacacataggttgtattgtaatggcattatcaaaatatttgatgatgtttcagatatattgcaaagtctgtattccagctcttaagaaaaatataagcatgttaaataccatatttacatattgataatgtcattggtatatggtggctgtttaccaataaaaggaaaaaattcattaaccggttgcttccaaaattagaagttttaagttgcatgaaaccattaatagccttgaaagctttgataagttttcagtaataataacctatttaatcagatgatgatgtgtttgaaaatagtgttcaatatcagcaaatttgtacacagggaatgtaaataaggataactgatcagagttatccactgtatttataaggaagagtcggaaaaaacaatgaccttagttttttttaagcctgatgatactatggtttactctaataagatagctatattgataattatatttttgttactgtgcccttgcacattttggtctttttgttaatatttttattaataacacataattagtaaccactctactgtttcaagttaatctagtaatagagcttacatatatttgtataactgctataccactgaactgaatttattttacaacagtgtagaattcttgaaaagttaacgtagaaaatatccaaaaagcagtatttctagaaagtgtccaaaaagcagtatttctttcccttggttgtgagagtaactaattatataaatattacctcaaaaatacatacactggtatcacacagtctttctacaatgtttctgtattctgaaagctaaatattaagtactatttttccattcaaatattcatttagaatttcctttagaagatggcagtgattataatattaatatgatttcatttgttccagtgtttagacatgaaatcatcttccttgtctcatgaaaacctaaatataaaaaaaaggaaaatactggagtttttatttctcttgtctttgttacatcctctgtttattataattttagcaccaacttcacacctagctaatttttttcatcataaagtggatgaaatgagcaagtacctaaaaattttatttcagataaaagtcaggagttactgctaaaaaacagacatgtaggagacattcaacaggagtatgaaatgagagttagaccatatgggctgacaacaccataaataacaagaaaagggagtgctgaaataggagagaacagagcaaatgttagctcaaagtatagacttagaaatatcaaagtaagagctatctggataaatatatagatattgagtgcttggaatcctagcctactatgtgaaaattaagtctaatgtcagaataacttacagaaaaatagaaaatgcacagctttaaaatgggcagagttaaaatctattcccagctttatcacttatttagccatgctagcctaggcctctatttccttgtctccaaaatgagaataataaaatttaggtcaggattactatataaactaagataatacagtgattctcaaagttgttcagactgtatagtaaggagaaagtctggttgcactttgaagagcttgaagatttgaaagattcccaaaaaagcattttaaagtttacatttaagggaccttggacctcaaccctctcaagtttacaagtctgaaactttagacatcaaaagtttgagcagtttttccaaggcaacattgatagttagattcagggccaggctgtaagtctagaatttagatatcctgatcccccagataccgctcttctggttatacacagaccagctataatttgctaaacataaaatattgcagtgtattagccagctgtggctccagagtctgtgccctttaccaccgtgcccaactgtttcacatgctgtgtttggtagtttttcctagtgctctccttaataatggtggtgtttagcaaattgtattacataaataaatatttatttcatggattgagttatgttgcatattaaattactttccttcccatgtcaataatgacttctttatgtcttaggctgtattataaattcaaacacaggaatgttattcttgcctttttccatcagaattacctaaagttttattagactttccccctacttgcaaatctgcctggaggttctggtctttaggaagtagcacttagcaagttcggataagcactccagaatttgggatgagttatccttgttgtttgtccagctctatcttggaccccagtgctgctaattagattcatgccttgttctttagggcataagttcctctcttggctatttttcctagtatgctgagaactaggattccctttcagtgacagagtcctgccctggaaccccaatcaagagcctaaagtttaactactctctgagatattagcctgatgccagcagcctgcctggatctctaaatattacccattctgggagttgttagtggtctctgctttcctgcagtgtcactcctgcttcctcattgggcctgctagccacagctacttggatgtacccgaacctgttgccttgccctacctactgtgggctggttcagttctgcattcccattccagtgtccactgccttcttgctatccctcccatctgtgcagccaccaccagcttat

SEQ ID NO: 339841 - DNA, 4374 bp, Homo sapiens
aacatttatttactattcccttttttattgttaccaggatagtacttttattaaattcctgatacgttgtcaatattgaaaaaactcaacaacttaaatgtacacgcacagtttgaaaagctggaaaatagtgaaagaatatccccatacccacctttcgtaccagtccccaaacatcacggtaaagtttactgtctcttcccagcccatggacgggaatggtaacgcctacggaatatgttgtgacatacagttgatcctaggttctccagaacaaaatgctgcacgaccacctcatcctggccctttattaaatatagcttaattctggacacaaacagttcccaccatgaagagagagtaggtgaccggaaaggagtgcgtcttaagcgcgttcgctgaatttgcaccacccaatccagccccgccgcccggcgccgctccttagacctggaccccggcaccctcccgccggggccgcacttagcagtggaaagtctgtcctcctgaagaagttgcgctccgacctccaagcatcaggtcaaaagtctaactcattctctgacctgccgccaattagaaaacaactgttgccaataaacgtggtcgcgccgcctgtgacctcagccgggacggacccgcgggcgggagcctgcggggcgtgaggcggggtggggccctggctcccctcccccgcccagccgcggcgtctgacgtcccgcgcgtcggcggccgcggagcagcgcagggagccaggcgggctgccggcgggtgtgaagaaaaaaatgacactccaatgggctgcagtggcaacctttctttatgccgaaataggactcattttaatcttctgcctaccttttattcctcctcagagatggcagaagattttttcatttaatgtctggggtaaaattgcaactttttggaacaaggctttccttaccattatcatcctattgattgttctatttctagatgctgtgagagaagtaaggaaatattcctcagttcataccattgagaagagctccaccagcagacctgatgcctatgaacacacacagatgaaactttttaggtctcaaagaaatctttacatttctggattttccctatttttttggctagttttgagacgtctggttacgcttattactcaactggcaaaagaactgtcaaacaaaggtgtacttaaaactcaagcagaaaatactaacaaggctgccaaaaaatttatggaagaaaacgaaaaactaaaaaggattttgaaaagccatggtaaagatgaagaatgtgttttggaagcagaaaataaaaaactagtagaagaccaggagaaactgaaaactgaattaaggaagacttcagatgccctttctaaggcacaaaatgatgtgatggaaatgaagatgcagtcagagagactttcgaaagaatatgatcaactcctgaaagaacactctgaacttcagcattccagttttggtgaatttttaagcaaaagaagccacaaaaatggcagcattggaaaacagactggttctagaaaaggatcgtttagaaagaggcaacaagaaaagactgtgaactttataaaagacacttgcaatatactgtgtcaaaatgataattttgttatgttagcctctagaaaatttaagttcagaaaaatgcactatgaccggttcgtaatttttttaatgccacacataggttgtattgtaatggcattatcaaaatatttgatgatgtttcagatatattgcaaagtctgtattccagctcttaagaaaaatataagcatgttaaataccatatttacatattgataatgtcattggtatatggtggctgtttaccaataaaaggaaaaaattcattaaccggttgcttccaaaattagaagttttaagttgcatgaaaccattaatagccttgaaagctttgataagttttcagtaataataacctatttaatcagatgatgatgtgtttgaaaatagtgttcaatatcagcaaatttgtacacagggaatgtaaataaggataactgatcagagttatccactgtatttataaggaagagtcggaaaaaacaatgaccttagttttttttaagcctgatgatactatggtttactctaataagatagctatattgataattatatttttgttactgtgcccttgcacattttggtctttttgttaatatttttattaataacacataattagtaaccactctactgtttcaagttaatctagtaatagagcttacatatatttgtataactgctataccactgaactgaatttattttacaacagtgtagaattcttgaaaagttaacgtagaaaatatccaaaaagcagtatttctagaaagtgtccaaaaagcagtatttctttcccttggttgtgagagtaactaattatataaatattacctcaaaaatacatacactggtatcacacagtctttctacaatgtttctgtattctgaaagctaaatattaagtactatttttccattcaaatattcatttagaatttcctttagaagatggcagtgattataatattaatatgatttcatttgttccagtgtttagacatgaaatcatcttccttgtctcatgaaaacctaaatataaaaaaaaggaaaatactggagtttttatttctcttgtctttgttacatcctctgtttattataattttagcaccaacttcacacctagctaatttttttcatcataaagtggatgaaatgagcaagtacctaaaaattttatttcagataaaagtcaggagttactgctaaaaaacagacatgtaggagacattcaacaggagtatgaaatgagagttagaccatatgggctgacaacaccataaataacaagaaaagggagtgctgaaataggagagaacagagcaaatgttagctcaaagtatagacttagaaatatcaaagtaagagctatctggataaatatatagatattgagtgcttggaatcctagcctactatgtgaaaattaagtctaatgtcagaataacttacagaaaaatagaaaatgcacagctttaaaatgggcagagttaaaatctattcccagctttatcacttatttagccatgctagcctaggcctctatttccttgtctccaaaatgagaataataaaatttaggtcaggattactatataaactaagataatacagtgattctcaaagttgttcagactgtatagtaaggagaaagtctggttgcactttgaagagcttgaagatttgaaagattcccaaaaaagcattttaaagtttacatttaagggaccttggacctcaaccctctcaagtttacaagtctgaaactttagacatcaaaagtttgagcagtttttccaaggcaacattgatagttagattcagggccaggctgtaagtctagaatttagatatcctgatcccccagataccgctcttctggttatacacagaccagctataatttgctaaacataaaatattgcagtgtattagccagctgtggctccagagtctgtgccctttaccaccgtgcccaactgtttcacatgctgtgtttggtagtttttcctagtgctctccttaataatggtggtgtttagcaaattgtattacataaataaatatttatttcatggattgagttatgttgcatattaaattactttccttcccatgtcaataatgacttctttatgtcttaggctgtattataaattcaaacacaggaatgttattcttgcctttttccatcagaattacctaaagttttattagactttccccctacttgcaaatctgcctggaggttctggtctttaggaagtagcacttagcaagttcggataagcactccagaatttgggatgagttatccttgttgtttgtccagctctatcttggaccccagtgctgctaattagattcatgccttgttctttagggcataagttcctctcttggctatttttcctagtatgctgagaactaggattccctttcagtgacagagtcctgccctggaaccccaatcaagagcctaaagtttaactactctctgagatattagcctgatgccagcagcctgcctggatctctaaatattacccattctgggagttgttagtggtctctgctttcctgcagtgtcactcctgcttcctcattgggcctgctagccacagctacttggatgtacccgaacctgttgccttgccctacctactgtgggctggttcagttctgcattcccattccagtgtccactgccttcttgctatccctcccatctgtgcagccaccaccagcttat

SEQ ID NO: 339842 - DNA, 4404 bp, Homo sapiens
aacatttatttactattcccttttttattgttaccaggatagtacttttattaaattcctgatacgttgtcaatattgaaaaaactcaacaacttaaatgtacacgcacagtttgaaaagctggaaaatagtgaaagaatatccccatacccacctttcgtaccagtccccaaacatcacggtaaagtttactgtctcttcccagcccatggacgggaatggtaacgcctacggaatatgttgtgacatacagttgatcctaggttctccagaacaaaatgctgcacgaccacctcatcctggccctttattaaatatagcttaattctggacacaaacagttcccaccatgaagagagagtaggtgaccggaaaggagtgcgtcttaagcgcgttcgctgaatttgcaccacccaatccagccccgccgcccggcgccgctccttagacctggaccccggcaccctcccgccggggccgcacttagcagtggaaagtctgtcctcctgaagaagttgcgctccgacctccaagcatcaggtcaaaagtctaactcattctctgacctgccgccaattagaaaacaactgttgccaataaacgtggtcgcgccgcctgtgacctcagccgggacggacccgcgggcgggagcctgcggggcgtgaggcggggtggggccctggctcccctcccccgcccagccgcggcgtctgacgtcccgcgcgtcggcggccgcggagcagcgcagggagccaggcgggctgccggcgggtgtgaagaaaaaaatgacactccaatgggctgcagtggcaacctttctttatgccgaaataggactcattttaatcttctgcctaccttttattcctcctcagagatggcagaagattttttcatttaatgtctggggtaaaattgcaactttttggaacaaggctttccttaccattatcatcctattgattgttctatttctagatgctgtgagagaagtaaggaaatattcctcagttcataccattgagaagagctccaccagcagacctgatgcctatgaacacacacagatgaaactttttaggtctcaaagaaatctttacatttctggattttccctatttttttggctagttttgagacgtctggttacgcttattactcaactggcaaaagaactgtcaaacaaaggtgtacttaaaactcaagcagaaaatactaacaaggctgccaaaaaatttatggaagaaaacgaaaaactaaaaaggattttgaaaagccatggtaaagatgaagaatgtgttttggaagcagaaaataaaaaactagtagaagaccaggagaaactgaaaactgaattaaggaagacttcagatgccctttctaaggcacaaaatgatgtgatggaaatgaagatgcagtcagagagactttcgaaagaatatgatcaactcctgaaagaacactctgaacttcaggtcccactgggcagcttctacatactggccttcgcacctgggctccataaccctcatccctccagcccaagaagtggtggtggcttttctgctattgataatcccagaggatcgtttagaaagaggcaacaagaaaagactgtgaactttataaaagacacttgcaatatactgtgtcaaaatgataattttgttatgttagcctctagaaaatttaagttcagaaaaatgcactatgaccggttcgtaatttttttaatgccacacataggttgtattgtaatggcattatcaaaatatttgatgatgtttcagatatattgcaaagtctgtattccagctcttaagaaaaatataagcatgttaaataccatatttacatattgataatgtcattggtatatggtggctgtttaccaataaaaggaaaaaattcattaaccggttgcttccaaaattagaagttttaagttgcatgaaaccattaatagccttgaaagctttgataagttttcagtaataataacctatttaatcagatgatgatgtgtttgaaaatagtgttcaatatcagcaaatttgtacacagggaatgtaaataaggataactgatcagagttatccactgtatttataaggaagagtcggaaaaaacaatgaccttagttttttttaagcctgatgatactatggtttactctaataagatagctatattgataattatatttttgttactgtgcccttgcacattttggtctttttgttaatatttttattaataacacataattagtaaccactctactgtttcaagttaatctagtaatagagcttacatatatttgtataactgctataccactgaactgaatttattttacaacagtgtagaattcttgaaaagttaacgtagaaaatatccaaaaagcagtatttctagaaagtgtccaaaaagcagtatttctttcccttggttgtgagagtaactaattatataaatattacctcaaaaatacatacactggtatcacacagtctttctacaatgtttctgtattctgaaagctaaatattaagtactatttttccattcaaatattcatttagaatttcctttagaagatggcagtgattataatattaatatgatttcatttgttccagtgtttagacatgaaatcatcttccttgtctcatgaaaacctaaatataaaaaaaaggaaaatactggagtttttatttctcttgtctttgttacatcctctgtttattataattttagcaccaacttcacacctagctaatttttttcatcataaagtggatgaaatgagcaagtacctaaaaattttatttcagataaaagtcaggagttactgctaaaaaacagacatgtaggagacattcaacaggagtatgaaatgagagttagaccatatgggctgacaacaccataaataacaagaaaagggagtgctgaaataggagagaacagagcaaatgttagctcaaagtatagacttagaaatatcaaagtaagagctatctggataaatatatagatattgagtgcttggaatcctagcctactatgtgaaaattaagtctaatgtcagaataacttacagaaaaatagaaaatgcacagctttaaaatgggcagagttaaaatctattcccagctttatcacttatttagccatgctagcctaggcctctatttccttgtctccaaaatgagaataataaaatttaggtcaggattactatataaactaagataatacagtgattctcaaagttgttcagactgtatagtaaggagaaagtctggttgcactttgaagagcttgaagatttgaaagattcccaaaaaagcattttaaagtttacatttaagggaccttggacctcaaccctctcaagtttacaagtctgaaactttagacatcaaaagtttgagcagtttttccaaggcaacattgatagttagattcagggccaggctgtaagtctagaatttagatatcctgatcccccagataccgctcttctggttatacacagaccagctataatttgctaaacataaaatattgcagtgtattagccagctgtggctccagagtctgtgccctttaccaccgtgcccaactgtttcacatgctgtgtttggtagtttttcctagtgctctccttaataatggtggtgtttagcaaattgtattacataaataaatatttatttcatggattgagttatgttgcatattaaattactttccttcccatgtcaataatgacttctttatgtcttaggctgtattataaattcaaacacaggaatgttattcttgcctttttccatcagaattacctaaagttttattagactttccccctacttgcaaatctgcctggaggttctggtctttaggaagtagcacttagcaagttcggataagcactccagaatttgggatgagttatccttgttgtttgtccagctctatcttggaccccagtgctgctaattagattcatgccttgttctttagggcataagttcctctcttggctatttttcctagtatgctgagaactaggattccctttcagtgacagagtcctgccctggaaccccaatcaagagcctaaagtttaactactctctgagatattagcctgatgccagcagcctgcctggatctctaaatattacccattctgggagttgttagtggtctctgctttcctgcagtgtcactcctgcttcctcattgggcctgctagccacagctacttggatgtacccgaacctgttgccttgccctacctactgtgggctggttcagttctgcattcccattccagtgtccactgccttcttgctatccctcccatctgtgcagccaccaccagcttat

SEQ ID NO: 339843 - DNA, 3731 bp, Homo sapiens
aacatttatttactattcccttttttattgttaccaggatagtacttttattaaattcctgatacgttgtcaatattgaaaaaactcaacaacttaaatgtacacgcacagtttgaaaagctggaaaatagtgaaagaatatccccatacccacctttcgtaccagtccccaaacatcacggtaaagtttactgtctcttcccagcccatggacgggaatggtaacgcctacggaatatgttgtgacatacagttgatcctaggttctccagaacaaaatgctgcacgaccacctcatcctggccctttattaaatatagcttaattctggacacaaacagttcccaccatgaagagagagtaggtgaccggaaaggagtgcgtcttaagcgcgttcgctgaatttgcaccacccaatccagccccgccgcccggcgccgctccttagacctggaccccggcaccctcccgccggggccgcacttagcagtggaaagtctgtcctcctgaagaagttgcgctccgacctccaagcatcaggtcaaaagtctaactcattctctgacctgccgccaattagaaaacaactgttgccaataaacgtggtcgcgccgcctgtgacctcagccgggacggacccgcgggcgggagcctgcggggcgtgaggcggggtggggccctggctcccctcccccgcccagccgcggcgtctgacgtcccgcgcgtcggcggccgcggagcagcgcagggagccaggcgggctgccggcgggtgtgaagaaaaaaatgacactccaatgggctgcagtggcaacctttctttatgccgaaataggactcattttaatcttctgcctaccttttattcctcctcagagatggcagaagattttttcatttaatgtctggggtaaaattgcaactttttggaacaaggctttccttaccattatcatcctattgattgttctatttctagatgctgtgagagaagtaaggaaatattcctcagttcataccattgagaagagctccaccagcagacctgatgcctatgaacacacacagatgaaactttttaggtctcaaagaaatctttacatttctggattttccctatttttttggctagttttgagacgtctggttacgcttattactcaactggcaaaagaactgtcaaacaaaggtgtacttaaaactcaagcagaaaatactaacaaggctgccaaaaaatttatggaagaaaacgaaaaactaaaaaggattttgaaaagccatggtaaagatgaagaatgtgttttggaagcagaaaataaaaaactagtagaagaccaggagaaactgaaaactgaattaaggaagacttcagatgccctttctaaggcacaaaatgatgtgatggaaatgaagatgcagtcagagagactttcgaaagaatatgatcaactcctgaaagaacactctgaacttcaggatcgtttagaaagaggcaacaagaaaagactgtgaactttataaaagacacttgcaatatactgtgtcaaaatgataattttgttatgttagcctctagaaaatttaagttcagaaaaatgcactatgaccggttcgtaatttttttaatgccacacataggttgtattgtaatggcattatcaaaatatttgatgatgtttcagatatattgcaaagtctgtattccagctcttaagaaaaatataagcatgttaaataccatatttacatattgataatgtcattggtatatggtggctgtttaccaataaaaggaaaaaattcattaaccggttgcttccaaaattagaagttttaagttgcatgaaaccattaatagccttgaaagctttgataagttttcagtaataataacctatttaatcagatgatgatgtgtttgaaaatagtgttcaatatcagcaaatttgtacacagggaatgtaaataaggataactgatcagagttatccactgtatttataaggaagagtcggaaaaaacaatgaccttagttttttttaagcctgatgatactatggtttactctaataagatagctatattgataattatatttttgttactgtgcccttgcacattttggtctttttgttaatatttttattaataacacataattagtaaccactctactgtttcaagttaatctagtaatagagcttacatatatttgtataactgctataccactgaactgaatttattttacaacagtgtagaattcttgaaaagttaacgtagaaaatatccaaaaagcagtatttctagaaagtgtccaaaaagcagtatttctttcccttggttgtgagagtaactaattatataaatattacctcaaaaatacatacactggtatcacacagtctttctacaatgtttctgtattctgaaagctaaatattaagtactatttttccattcaaatattcatttagaatttcctttagaagatggcagtgattataatattaatatgatttcatttgttccagtgtttagacatgaaatcatcttccttgtctcatgaaaacctaaatataaaaaaaaggaaaatactggagtttttatttctcttgtctttgttacatcctctgtttattataattttagcaccaacttcacacctagctaatttttttcatcataaagtggatgaaatgagcaagtacctaaaaattttatttcagataaaagtcaggagttactgctaaaaaacagacatgtaggagacattcaacaggagtatgaaatgagagttagaccatatgggctgacaacaccataaataacaagaaaagggagtgctgaaataggagagaacagagcaaatgttagctcaaagtatagacttagaaatatcaaagtaagagctatctggataaatatatagatattgagtgcttggaatcctagcctactatgtgaaaattaagtctaatgtcagaataacttacagaaaaatagaaaatgcacagctttaaaatgggcagagttaaaatctattcccagctttatcacttatttagccatgctagcctaggcctctatttccttgtctccaaaatgagaataataaaatttaggtcaggattactatataaactaagataatacagtgattctcaaagttgttcagactgtatagtaaggagaaagtctggttgcactttgaagagcttgaagatttgaaagattcccaaaaaagcattttaaagtttacatttaagggaccttggacctcaaccctctcaagtttacaagtctgaaactttagacatcaaaagtttgagcagtttttccaaggcaacattgatagttagattcagggccaggctgtaagtctagaatttagatatcctgatcccccagataccgctcttctggttatacacagaccagctataatttgctaaacataaaatattgcagtgtattagccagctgtggctccagagtctggccttacacggccactgttcacatgcgggttggaagttccaaggaacccataaaaaggggggtagccatggtcactagaatattcggcaaaaaaaaagggcgggcggacaccgagggggcaaaagggcgcaacaggaagcagaaataaaagaagacgaaactcaacacatggggagggaaacagaaaaggacaccacaggaaagaagagcgacacaaaacaaagaaagaag

SEQ ID NO: 339844 - DNA, 4408 bp, Homo sapiens
aacatttatttactattcccttttttattgttaccaggatagtacttttattaaattcctgatacgttgtcaatattgaaaaaactcaacaacttaaatgtacacgcacagtttgaaaagctggaaaatagtgaaagaatatccccatacccacctttcgtaccagtccccaaacatcacggtaaagtttactgtctcttcccagcccatggacgggaatggtaacgcctacggaatatgttgtgacatacagttgatcctaggttctccagaacaaaatgctgcacgaccacctcatcctggccctttattaaatatagcttaattctggacacaaacagttcccaccatgaagagagagtaggtgaccggaaaggagtgcgtcttaagcgcgttcgctgaatttgcaccacccaatccagccccgccgcccggcgccgctccttagacctggaccccggcaccctcccgccggggccgcacttagcagtggaaagtctgtcctcctgaagaagttgcgctccgacctccaagcatcaggtcaaaagtctaactcattctctgacctgccgccaattagaaaacaactgttgccaataaacgtggtcgcgccgcctgtgacctcagccgggacggacccgcgggcgggagcctgcggggcgtgaggcggggtggggccctggctcccctcccccgcccagccgcggcgtctgacgtcccgcgcgtcggcggccgcggagcagcgcagggagccaggcgggctgccggcgggtgggggaaggtggaacactgtccatcccctggacaaaaacgctgcgcctcggggccttgaacccggttttgtttgaaaggaagcaagagaaaataagtgtttttccatttaggtgtgaagaaaaaaatgacactccaatgggctgcagtggcaacctttctttatgccgaaataggactcattttaatcttctgcctaccttttattcctcctcagagatggcagaagattttttcatttaatgtctggggtaaaattgcaactttttggaacaaggctttccttaccattatcatcctattgattgttctatttctagatgctgtgagagaagtaaggaaatattcctcagttcataccattgagaagagctccaccagcagacctgatgcctatgaacacacacagatgaaactttttaggtctcaaagaaatctttacatttctggattttccctatttttttggctagttttgagacgtctggttacgcttattactcaactggcaaaagaactgtcaaacaaaggtgtacttaaaactcaagcagaaaatactaacaaggctgccaaaaaatttatggaagaaaacgaaaaactaaaaaggattttgaaaagccatggtaaagatgaagaatgtgttttggaagcagaaaataaaaaactagtagaagaccaggagaaactgaaaactgaattaaggaagacttcagatgccctttctaaggcacaaaatgatgtgatggaaatgaagatgcagtcagagagactttcgaaagaatatgatcaactcctgaaagaacactctgaacttcaggatcgtttagaaagaggcaacaagaaaagactgtgaactttataaaagacacttgcaatatactgtgtcaaaatgataattttgttatgttagcctctagaaaatttaagttcagaaaaatgcactatgaccggttcgtaatttttttaatgccacacataggttgtattgtaatggcattatcaaaatatttgatgatgtttcagatatattgcaaagtctgtattccagctcttaagaaaaatataagcatgttaaataccatatttacatattgataatgtcattggtatatggtggctgtttaccaataaaaggaaaaaattcattaaccggttgcttccaaaattagaagttttaagttgcatgaaaccattaatagccttgaaagctttgataagttttcagtaataataacctatttaatcagatgatgatgtgtttgaaaatagtgttcaatatcagcaaatttgtacacagggaatgtaaataaggataactgatcagagttatccactgtatttataaggaagagtcggaaaaaacaatgaccttagttttttttaagcctgatgatactatggtttactctaataagatagctatattgataattatatttttgttactgtgcccttgcacattttggtctttttgttaatatttttattaataacacataattagtaaccactctactgtttcaagttaatctagtaatagagcttacatatatttgtataactgctataccactgaactgaatttattttacaacagtgtagaattcttgaaaagttaacgtagaaaatatccaaaaagcagtatttctagaaagtgtccaaaaagcagtatttctttcccttggttgtgagagtaactaattatataaatattacctcaaaaatacatacactggtatcacacagtctttctacaatgtttctgtattctgaaagctaaatattaagtactatttttccattcaaatattcatttagaatttcctttagaagatggcagtgattataatattaatatgatttcatttgttccagtgtttagacatgaaatcatcttccttgtctcatgaaaacctaaatataaaaaaaaggaaaatactggagtttttatttctcttgtctttgttacatcctctgtttattataattttagcaccaacttcacacctagctaatttttttcatcataaagtggatgaaatgagcaagtacctaaaaattttatttcagataaaagtcaggagttactgctaaaaaacagacatgtaggagacattcaacaggagtatgaaatgagagttagaccatatgggctgacaacaccataaataacaagaaaagggagtgctgaaataggagagaacagagcaaatgttagctcaaagtatagacttagaaatatcaaagtaagagctatctggataaatatatagatattgagtgcttggaatcctagcctactatgtgaaaattaagtctaatgtcagaataacttacagaaaaatagaaaatgcacagctttaaaatgggcagagttaaaatctattcccagctttatcacttatttagccatgctagcctaggcctctatttccttgtctccaaaatgagaataataaaatttaggtcaggattactatataaactaagataatacagtgattctcaaagttgttcagactgtatagtaaggagaaagtctggttgcactttgaagagcttgaagatttgaaagattcccaaaaaagcattttaaagtttacatttaagggaccttggacctcaaccctctcaagtttacaagtctgaaactttagacatcaaaagtttgagcagtttttccaaggcaacattgatagttagattcagggccaggctgtaagtctagaatttagatatcctgatcccccagataccgctcttctggttatacacagaccagctataatttgctaaacataaaatattgcagtgtattagccagctgtggctccagagtctgtgccctttaccaccgtgcccaactgtttcacatgctgtgtttggtagtttttcctagtgctctccttaataatggtggtgtttagcaaattgtattacataaataaatatttatttcatggattgagttatgttgcatattaaattactttccttcccatgtcaataatgacttctttatgtcttaggctgtattataaattcaaacacaggaatgttattcttgcctttttccatcagaattacctaaagttttattagactttccccctacttgcaaatctgcctggaggttctggtctttaggaagtagcacttagcaagttcggataagcactccagaatttgggatgagttatccttgttgtttgtccagctctatcttggaccccagtgctgctaattagattcatgccttgttctttagggcataagttcctctcttggctatttttcctagtatgctgagaactaggattccctttcagtgacagagtcctgccctggaaccccaatcaagagcctaaagtttaactactctctgagatattagcctgatgccagcagcctgcctggatctctaaatattacccattctgggagttgttagtggtctctgctttcctgcagtgtcactcctgcttcctcattgggcctgctagccacagctacttggatgtacccgaacctgttgccttgccctacctactgtgggctggttcagttctgcattcccattccagtgtccactgccttcttgctatccctcccatctgtgcagccaccaccagcttat

SEQ ID NO: 339845 - DNA, 4475 bp, Homo sapiens
aacatttatttactattcccttttttattgttaccaggatagtacttttattaaattcctgatacgttgtcaatattgaaaaaactcaacaacttaaatgtacacgcacagtttgaaaagctggaaaatagtgaaagaatatccccatacccacctttcgtaccagtccccaaacatcacggtaaagtttactgtctcttcccagcccatggacgggaatggtaacgcctacggaatatgttgtgacatacagttgatcctaggttctccagaacaaaatgctgcacgaccacctcatcctggccctttattaaatatagcttaattctggacacaaacagttcccaccatgaagagagagtaggtgaccggaaaggagtgcgtcttaagcgcgttcgctgaatttgcaccacccaatccagccccgccgcccggcgccgctccttagacctggaccccggcaccctcccgccggggccgcacttagcagtggaaagtctgtcctcctgaagaagttgcgctccgacctccaagcatcaggtcaaaagtctaactcattctctgacctgccgccaattagaaaacaactgttgccaataaacgtggtcgcgccgcctgtgacctcagccgggacggacccgcgggcgggagcctgcggggcgtgaggcggggtggggccctggctcccctcccccgcccagccgcggcgtctgacgtcccgcgcgtcggcggccgcggagcagcgcagggagccaggcgggctgccggcgggtgtgaagaaaaaaatgacactccaatgggctgcagtggcaacctttctttatgccgaaataggactcattttaatcttctgcctaccttttattcctcctcagagatggcagaagattttttcatttaatgtctggggtaaaattgcaactttttggaacaaggctttccttaccattatcatcctattgattgttctatttctagatgctgtgagagaagtaaggaaatattcctcagttcataccattgagaagagctccaccagcagacctgatgcctatgaacacacacagatgaaactttttaggtctcaaagaaatctttacatttctggattttccctatttttttggctagttttgagacgtctggttacgcttattactcaactggcaaaagaactgtcaaacaaaggtgtacttaaaactcaagcagaaaatactaacaaggctgccaaaaaatttatggaagaaaacgaaaaactaaaaaggtttctgttagcaaaagtacattgtagaaaactataaaattctgaaaaggacaaagaataaattataaacagattttgaaaagccatggtaaagatgaagaatgtgttttggaagcagaaaataaaaaactagtagaagaccaggagaaactgaaaactgaattaaggaagacttcagatgccctttctaaggcacaaaatgatgtgatggaaatgaagatgcagtcagagagactttcgaaagaatatgatcaactcctgaaagaacactctgaacttcaggtcccactgggcagcttctacatactggccttcgcacctgggctccataaccctcatccctccagcccaagaagtggtggtggcttttctgctattgataatcccagaggatcgtttagaaagaggcaacaagaaaagactgtgaactttataaaagacacttgcaatatactgtgtcaaaatgataattttgttatgttagcctctagaaaatttaagttcagaaaaatgcactatgaccggttcgtaatttttttaatgccacacataggttgtattgtaatggcattatcaaaatatttgatgatgtttcagatatattgcaaagtctgtattccagctcttaagaaaaatataagcatgttaaataccatatttacatattgataatgtcattggtatatggtggctgtttaccaataaaaggaaaaaattcattaaccggttgcttccaaaattagaagttttaagttgcatgaaaccattaatagccttgaaagctttgataagttttcagtaataataacctatttaatcagatgatgatgtgtttgaaaatagtgttcaatatcagcaaatttgtacacagggaatgtaaataaggataactgatcagagttatccactgtatttataaggaagagtcggaaaaaacaatgaccttagttttttttaagcctgatgatactatggtttactctaataagatagctatattgataattatatttttgttactgtgcccttgcacattttggtctttttgttaatatttttattaataacacataattagtaaccactctactgtttcaagttaatctagtaatagagcttacatatatttgtataactgctataccactgaactgaatttattttacaacagtgtagaattcttgaaaagttaacgtagaaaatatccaaaaagcagtatttctagaaagtgtccaaaaagcagtatttctttcccttggttgtgagagtaactaattatataaatattacctcaaaaatacatacactggtatcacacagtctttctacaatgtttctgtattctgaaagctaaatattaagtactatttttccattcaaatattcatttagaatttcctttagaagatggcagtgattataatattaatatgatttcatttgttccagtgtttagacatgaaatcatcttccttgtctcatgaaaacctaaatataaaaaaaaggaaaatactggagtttttatttctcttgtctttgttacatcctctgtttattataattttagcaccaacttcacacctagctaatttttttcatcataaagtggatgaaatgagcaagtacctaaaaattttatttcagataaaagtcaggagttactgctaaaaaacagacatgtaggagacattcaacaggagtatgaaatgagagttagaccatatgggctgacaacaccataaataacaagaaaagggagtgctgaaataggagagaacagagcaaatgttagctcaaagtatagacttagaaatatcaaagtaagagctatctggataaatatatagatattgagtgcttggaatcctagcctactatgtgaaaattaagtctaatgtcagaataacttacagaaaaatagaaaatgcacagctttaaaatgggcagagttaaaatctattcccagctttatcacttatttagccatgctagcctaggcctctatttccttgtctccaaaatgagaataataaaatttaggtcaggattactatataaactaagataatacagtgattctcaaagttgttcagactgtatagtaaggagaaagtctggttgcactttgaagagcttgaagatttgaaagattcccaaaaaagcattttaaagtttacatttaagggaccttggacctcaaccctctcaagtttacaagtctgaaactttagacatcaaaagtttgagcagtttttccaaggcaacattgatagttagattcagggccaggctgtaagtctagaatttagatatcctgatcccccagataccgctcttctggttatacacagaccagctataatttgctaaacataaaatattgcagtgtattagccagctgtggctccagagtctgtgccctttaccaccgtgcccaactgtttcacatgctgtgtttggtagtttttcctagtgctctccttaataatggtggtgtttagcaaattgtattacataaataaatatttatttcatggattgagttatgttgcatattaaattactttccttcccatgtcaataatgacttctttatgtcttaggctgtattataaattcaaacacaggaatgttattcttgcctttttccatcagaattacctaaagttttattagactttccccctacttgcaaatctgcctggaggttctggtctttaggaagtagcacttagcaagttcggataagcactccagaatttgggatgagttatccttgttgtttgtccagctctatcttggaccccagtgctgctaattagattcatgccttgttctttagggcataagttcctctcttggctatttttcctagtatgctgagaactaggattccctttcagtgacagagtcctgccctggaaccccaatcaagagcctaaagtttaactactctctgagatattagcctgatgccagcagcctgcctggatctctaaatattacccattctgggagttgttagtggtctctgctttcctgcagtgtcactcctgcttcctcattgggcctgctagccacagctacttggatgtacccgaacctgttgccttgccctacctactgtgggctggttcagttctgcattcccattccagtgtccactgccttcttgctatccctcccatctgtgcagccaccaccagcttat

SEQ ID NO: 339846 - DNA, 3636 bp, Homo sapiens
agggccgggaagccgggcgttggtggagggaggcgttgggcttctgtcgccgcgaagctggcggaaaaggcagtggccagcgagccgcctcgccagttcccacgactcccaggtgtgaagaaaaaaatgacactccaatgggctgcagtggcaacctttctttatgccgaaataggactcattttaatcttctgcctaccttttattcctcctcagagatggcagaagattttttcatttaatgtctggggtaaaattgcaactttttggaacaaggctttccttaccattatcatcctattgattgttctatttctagatgctgtgagagaagtaaggaaatattcctcagttcataccattgagaagagctccaccagcagacctgatgcctatgaacacacacagatgaaactttttaggtctcaaagaaatctttacatttctggattttccctatttttttggctagttttgagacgtctggttacgcttattactcaactggcaaaagaactgtcaaacaaaggtgtacttaaaactcaagcagaaaatactaacaaggctgccaaaaaatttatggaagaaaacgaaaaactaaaaaggattttgaaaagccatggtaaagatgaagaatgtgttttggaagcagaaaataaaaaactagtagaagaccaggagaaactgaaaactgaattaaggaagacttcagatgccctttctaaggcacaaaatgatgtgatggaaatgaagatgcagtcagagagactttcgaaagaatatgatcaactcctgaaagaacactctgaacttcaggatcgtttagaaagaggcaacaagaaaagactgtgaactttataaaagacacttgcaatatactgtgtcaaaatgataattttgttatgttagcctctagaaaatttaagttcagaaaaatgcactatgaccggttcgtaatttttttaatgccacacataggttgtattgtaatggcattatcaaaatatttgatgatgtttcagatatattgcaaagtctgtattccagctcttaagaaaaatataagcatgttaaataccatatttacatattgataatgtcattggtatatggtggctgtttaccaataaaaggaaaaaattcattaaccggttgcttccaaaattagaagttttaagttgcatgaaaccattaatagccttgaaagctttgataagttttcagtaataataacctatttaatcagatgatgatgtgtttgaaaatagtgttcaatatcagcaaatttgtacacagggaatgtaaataaggataactgatcagagttatccactgtatttataaggaagagtcggaaaaaacaatgaccttagttttttttaagcctgatgatactatggtttactctaataagatagctatattgataattatatttttgttactgtgcccttgcacattttggtctttttgttaatatttttattaataacacataattagtaaccactctactgtttcaagttaatctagtaatagagcttacatatatttgtataactgctataccactgaactgaatttattttacaacagtgtagaattcttgaaaagttaacgtagaaaatatccaaaaagcagtatttctagaaagtgtccaaaaagcagtatttctttcccttggttgtgagagtaactaattatataaatattacctcaaaaatacatacactggtatcacacagtctttctacaatgtttctgtattctgaaagctaaatattaagtactatttttccattcaaatattcatttagaatttcctttagaagatggcagtgattataatattaatatgatttcatttgttccagtgtttagacatgaaatcatcttccttgtctcatgaaaacctaaatataaaaaaaaggaaaatactggagtttttatttctcttgtctttgttacatcctctgtttattataattttagcaccaacttcacacctagctaatttttttcatcataaagtggatgaaatgagcaagtacctaaaaattttatttcagataaaagtcaggagttactgctaaaaaacagacatgtaggagacattcaacaggagtatgaaatgagagttagaccatatgggctgacaacaccataaataacaagaaaagggagtgctgaaataggagagaacagagcaaatgttagctcaaagtatagacttagaaatatcaaagtaagagctatctggataaatatatagatattgagtgcttggaatcctagcctactatgtgaaaattaagtctaatgtcagaataacttacagaaaaatagaaaatgcacagctttaaaatgggcagagttaaaatctattcccagctttatcacttatttagccatgctagcctaggcctctatttccttgtctccaaaatgagaataataaaatttaggtcaggattactatataaactaagataatacagtgattctcaaagttgttcagactgtatagtaaggagaaagtctggttgcactttgaagagcttgaagatttgaaagattcccaaaaaagcattttaaagtttacatttaagggaccttggacctcaaccctctcaagtttacaagtctgaaactttagacatcaaaagtttgagcagtttttccaaggcaacattgatagttagattcagggccaggctgtaagtctagaatttagatatcctgatcccccagataccgctcttctggttatacacagaccagctataatttgctaaacataaaatattgcagtgtattagccagctgtggctccagagtctgtgccctttaccaccgtgcccaactgtttcacatgctgtgtttggtagtttttcctagtgctctccttaataatggtggtgtttagcaaattgtattacataaataaatatttatttcatggattgagttatgttgcatattaaattactttccttcccatgtcaataatgacttctttatgtcttaggctgtattataaattcaaacacaggaatgttattcttgcctttttccatcagaattacctaaagttttattagactttccccctacttgcaaatctgcctggaggttctggtctttaggaagtagcacttagcaagttcggataagcactccagaatttgggatgagttatccttgttgtttgtccagctctatcttggaccccagtgctgctaattagattcatgccttgttctttagggcataagttcctctcttggctatttttcctagtatgctgagaactaggattccctttcagtgacagagtcctgccctggaaccccaatcaagagcctaaagtttaactactctctgagatattagcctgatgccagcagcctgcctggatctctaaatattacccattctgggagttgttagtggtctctgctttcctgcagtgtcactcctgcttcctcattgggcctgctagccacagctacttggatgtacccgaacctgttgccttgccctacctactgtgggctggttcagttctgcattcccattccagtgtccactgccttcttgctatccctcccatctgtgcagccaccaccagcttat

SEQ ID NO: 339847 - DNA, 3200 bp, Homo sapiens
gccagtaatacattattctggttttttttcttagagttttgagacgtctggttacgcttattactcaactggcaaaagaactgtcaaacaaaggtgtacttaaaactcaagcagaaaatactaacaaggctgccaaaaaatttatggaagaaaacgaaaaactaaaaaggattttgaaaagccatggtaaagatgaagaatgtgttttggaagcagaaaataaaaaactagtagaagaccaggagaaactgaaaactgaattaaggaagacttcagatgccctttctaaggcacaaaatgatgtgatggaaatgaagatgcagtcagagagactttcgaaagaatatgatcaactcctgaaagaacactctgaacttcaggatcgtttagaaagaggcaacaagaaaagactgtgaactttataaaagacacttgcaatatactgtgtcaaaatgataattttgttatgttagcctctagaaaatttaagttcagaaaaatgcactatgaccggttcgtaatttttttaatgccacacataggttgtattgtaatggcattatcaaaatatttgatgatgtttcagatatattgcaaagtctgtattccagctcttaagaaaaatataagcatgttaaataccatatttacatattgataatgtcattggtatatggtggctgtttaccaataaaaggaaaaaattcattaaccggttgcttccaaaattagaagttttaagttgcatgaaaccattaatagccttgaaagctttgataagttttcagtaataataacctatttaatcagatgatgatgtgtttgaaaatagtgttcaatatcagcaaatttgtacacagggaatgtaaataaggataactgatcagagttatccactgtatttataaggaagagtcggaaaaaacaatgaccttagttttttttaagcctgatgatactatggtttactctaataagatagctatattgataattatatttttgttactgtgcccttgcacattttggtctttttgttaatatttttattaataacacataattagtaaccactctactgtttcaagttaatctagtaatagagcttacatatatttgtataactgctataccactgaactgaatttattttacaacagtgtagaattcttgaaaagttaacgtagaaaatatccaaaaagcagtatttctagaaagtgtccaaaaagcagtatttctttcccttggttgtgagagtaactaattatataaatattacctcaaaaatacatacactggtatcacacagtctttctacaatgtttctgtattctgaaagctaaatattaagtactatttttccattcaaatattcatttagaatttcctttagaagatggcagtgattataatattaatatgatttcatttgttccagtgtttagacatgaaatcatcttccttgtctcatgaaaacctaaatataaaaaaaaggaaaatactggagtttttatttctcttgtctttgttacatcctctgtttattataattttagcaccaacttcacacctagctaatttttttcatcataaagtggatgaaatgagcaagtacctaaaaattttatttcagataaaagtcaggagttactgctaaaaaacagacatgtaggagacattcaacaggagtatgaaatgagagttagaccatatgggctgacaacaccataaataacaagaaaagggagtgctgaaataggagagaacagagcaaatgttagctcaaagtatagacttagaaatatcaaagtaagagctatctggataaatatatagatattgagtgcttggaatcctagcctactatgtgaaaattaagtctaatgtcagaataacttacagaaaaatagaaaatgcacagctttaaaatgggcagagttaaaatctattcccagctttatcacttatttagccatgctagcctaggcctctatttccttgtctccaaaatgagaataataaaatttaggtcaggattactatataaactaagataatacagtgattctcaaagttgttcagactgtatagtaaggagaaagtctggttgcactttgaagagcttgaagatttgaaagattcccaaaaaagcattttaaagtttacatttaagggaccttggacctcaaccctctcaagtttacaagtctgaaactttagacatcaaaagtttgagcagtttttccaaggcaacattgatagttagattcagggccaggctgtaagtctagaatttagatatcctgatcccccagataccgctcttctggttatacacagaccagctataatttgctaaacataaaatattgcagtgtattagccagctgtggctccagagtctgtgccctttaccaccgtgcccaactgtttcacatgctgtgtttggtagtttttcctagtgctctccttaataatggtggtgtttagcaaattgtattacataaataaatatttatttcatggattgagttatgttgcatattaaattactttccttcccatgtcaataatgacttctttatgtcttaggctgtattataaattcaaacacaggaatgttattcttgcctttttccatcagaattacctaaagttttattagactttccccctacttgcaaatctgcctggaggttctggtctttaggaagtagcacttagcaagttcggataagcactccagaatttgggatgagttatccttgttgtttgtccagctctatcttggaccccagtgctgctaattagattcatgccttgttctttagggcataagttcctctcttggctatttttcctagtatgctgagaactaggattccctttcagtgacagagtcctgccctggaaccccaatcaagagcctaaagtttaactactctctgagatattagcctgatgccagcagcctgcctggatctctaaatattacccattctgggagttgttagtggtctctgctttcctgcagtgtcactcctgcttcctcattgggcctgctagccacagctacttggatgtacccgaacctgttgccttgccctacctactgtgggctggttcagttctgcattcccattccagtgtccactgccttcttgctatccctcccatctgtgcagccaccaccagcttat

SEQ ID NO: 339848 - DNA, 3190 bp, Homo sapiens
aacatttatttactattcccttttttattgttaccaggatagtacttttattaaattcctgatacgttgtcaatattgaaaaaactcaacaacttaaatgtacacgcacagtttgaaaagctggaaaatagtgaaagaatatccccatacccacctttcgtaccagtccccaaacatcacggtaaagtttactgtctcttcccagcccatggacgggaatggtaacgcctacggaatatgttgtgacatacagttgatcctaggttctccagaacaaaatgctgcacgaccacctcatcctggccctttattaaatatagcttaattctggacacaaacagttcccaccatgaagagagagtaggtgaccggaaaggagtgcgtcttaagcgcgttcgctgaatttgcaccacccaatccagccccgccgcccggcgccgctccttagacctggaccccggcaccctcccgccggggccgcacttagcagtggaaagtctgtcctcctgaagaagttgcgctccgacctccaagcatcaggtcaaaagtctaactcattctctgacctgccgccaattagaaaacaactgttgccaataaacgtggtcgcgccgcctgtgacctcagccgggacggacccgcgggcgggagcctgcggggcgtgaggcggggtggggccctggctcccctcccccgcccagccgcggcgtctgacgtcccgcgcgtcggcggccgcggagcagcgcagggagccaggcgggctgccggcgggtgtgaagaaaaaaatgacactccaatgggctgcagtggcaacctttctttatgccgaaataggactcattttaatcttctgcctaccttttattcctcctcagagatggcagaagattttttcatttaatgtctggggtaaaattgcaactttttggaacaaggctttccttaccattatcatcctattgattgttctatttctagatgctgtgagagaagtaaggaaatattcctcagttcataccattgagaagagctccaccagcagacctgatgcctatgaacacacacagatgaaactttttaggtctcaaagaaatctttacatttctggattttccctatttttttggctagttttgagacgtctggttacgcttattactcaactggcaaaagaactgtcaaacaaaggtgtacttaaaactcaagcagaaaatactaacaaggctgccaaaaaatttatggaagaaaacgaaaaactaaaaaggattttgaaaagccatggtaaagatgaagaatgtgttttggaagcagaaaataaaaaactagtagaagaccaggagaaactgaaaactgaattaaggaagacttcagatgccctttctaaggcacaaaatgatgtgatggaaatgaagatgcagtcagagagactttcgaaagaatatgatcaactcctgaaagaacactctgaacttcagaagcaaagggagatattaccacacagaagaggagaaagcacagtgaccacagaggcagagattggagtgatggagccgcagcaaaggaatgctgacagccaccagaagctggaggaggcaaagaacagattcttccccagagcctcttccagcaggagcatggccctacagataccgataaaactgatattggacttcctggcctccagaactatgggaataaatttattgtttcaagctatcaagtttgtgattatttgttactgctgccatagtaaattaatacaggagcatgcaggacagatctgtaatggcctgaactgaatttcaaggggtgtggaaaacagttactctttaacaccactccgtcttccccattagccatttggataagtcaaagatagccttagccatctcctatcttagttacttttctccttcaactgtattttgccattgtcgttgccattgcctctgcctaactgcaagccatcatcatctctcacatggactatgacgacctcctcatctccctgtatcttctctaatgcttctctcatatacatgctctcagcagccacctggtttaaaacaaaaacaaaaaaaacactaatcatgtcattccctgcttgtcttcccgttctttccaactgtcattccctgcttgtcttccaattctttccaactgcagttaagatcaaaccaccaagacctcaccaggctcccatctacttttcagcctcaactcagtccacctgctctgccaatcacacctgtttctttttgttgttctttccctaggatatagatcctggcatacctgcattctgattcttcttggaacaagccaaattctttcccctgtcagtacgtttgcatgtgtagtacatgttgcatcccaggcctgtctgccttcttaccctattttattttcatcatagcacttactaccatctgaaatgatctcatttatggtttgtctcctcagtgattaacacagttcctgcacacagtaaatcagtagttctcaacaggaagtgaagaggtcatcctgaggggaacatttagcaatacctagagacatttctggttgtcataaccaggggaatgctcctagtggatagaagtcagggaggctgttaaacccattccacaatgcacaggactggaacaaagaatgatctctcactcagaatgtcagtgttgccaaggtggagacatcctgcagtagatgcttgtggcagagggtactggttgtcccccagtatccattctttcattcacctgtgttaatacatgctccagttttgtatttttttttataaacagctgtcaagcataaagataacattttccatctccttgtatgtaagtggaaataggactgtcatgtggggccagtttcttttttttcttcctctgtcctgctgcttgaaacatatgctgctatcttagatcatgaggtcgaggccatgcaaagtggagcaacaaggagctgtgtccctgacgccataagcaccacacctgtcctgaattgctgtgaatgacaccagctaactacaatgcattgtctcaacatcctagacataataaaaagccataaatatgtttgtcctatgcagcacaaaacctttgtatctttgccttttatgttgggatcttaattaaaaattacatcctctactgtcaataaatgctcaactttttatattcga

SEQ ID NO: 339849 - DNA, 1841 bp, Homo sapiens
aacatttatttactattcccttttttattgttaccaggatagtacttttattaaattcctgatacgttgtcaatattgaaaaaactcaacaacttaaatgtacacgcacagtttgaaaagctggaaaatagtgaaagaatatccccatacccacctttcgtaccagtccccaaacatcacggtaaagtttactgtctcttcccagcccatggacgggaatggtaacgcctacggaatatgttgtgacatacagttgatcctaggttctccagaacaaaatgctgcacgaccacctcatcctggccctttattaaatatagcttaattctggacacaaacagttcccaccatgaagagagagtaggtgaccggaaaggagtgcgtcttaagcgcgttcgctgaatttgcaccacccaatccagccccgccgcccggcgccgctccttagacctggaccccggcaccctcccgccggggccgcacttagcagtggaaagtctgtcctcctgaagaagttgcgctccgacctccaagcatcaggtcaaaagtctaactcattctctgacctgccgccaattagaaaacaactgttgccaataaacgtggtcgcgccgcctgtgacctcagccgggacggacccgcgggcgggagcctgcggggcgtgaggcggggtggggccctggctcccctcccccgcccagccgcggcgtctgacgtcccgcgcgtcggcggccgcggagcagcgcagggagccaggcgggctgccggcgggtgtgaagaaaaaaatgacactccaatgggctgcagtggcaacctttctttatgccgaaataggactcattttaatcttctgcctaccttttattcctcctcagagatggcagaagattttttcatttaatgtctggggtaaaattgcaactttttggaacaaggctttccttaccattatcatcctattgattgttctatttctagatgctgtgagagaagtaaggaaatattcctcagttcataccattgagaagagctccaccagcagacctgatgcctatgaacacacacagatgaaactttttaggtctcaaagaaatctttacatttctggattttccctatttttttggctagttttgagacgtctggttacgcttattactcaactggcaaaagaactgtcaaacaaaggtgtacttaaaactcaagcagaaaatactaacaaggctgccaaaaaatttatggaagaaaacgaaaaactaaaaaggattttgaaaagccatggtaaagatgaagaatgtgttttggaagcagaaaataaaaaactagtagaagaccaggagaaactgaaaactgaattaaggaagacttcagatgccctttctaaggcacaaaatgatgtgatggaaatgaagatgcagtcagagagactttcgaaagaatatgatcaactcctgaaagaacactctgaacttcaggtcccactgggcagcttctacatactggccttcgcacctgggctccataaccctcatccctccagcccaagaagtggtggtggcttttctgctattgataatcccagaggtgccttaccaccctgtttggtgtgtgtactttttcatcacctgtaaaaccaatttcccataatatctctgttggaaggaaaacaaaatctcagctccatagtttaccacttctgtaacccacaggtgactcatttgacatctatgctcctcaggtactttactacttaaataaaggttgtaataccttatgaaaattaaaccagatcctgtataagaaagcactttatatatttataatcaagaatgctatttatt

SEQ ID NO: 339850 - DNA, 1918 bp, Homo sapiens
caccagaaatgatttcaaacactttaggaactgtggtaggcttaattatgacttcccaaaagatatccctataccaatccctggaacctggaaatgttctcttctatagcaaaagatatgattaagttaaagtcttgagatggagagattattctgggtaatctgggagtgccctaaatgcagctacatctatgcttatatagaagcaaagggagatattaccacacagaagaggagaaagcacagtgaccacagaggcagagattggagtgatggagccgcagcaaaggaatgctgacagccaccagaagctggaggaggcaaagaacagattcttccccagagcctcttccagcaggagcatggccctacagataccgataaaactgatattggacttcctggcctccagaactatgggaataaatttattgtttcaagctatcaagtttgtgattatttgttactgctgccatagtaaattaatacaggagcatgcaggacagatctgtaatggcctgaactgaatttcaaggggtgtggaaaacagttactctttaacaccactccgtcttccccattagccatttggataagtcaaagatagccttagccatctcctatcttagttacttttctccttcaactgtattttgccattgtcgttgccattgcctctgcctaactgcaagccatcatcatctctcacatggactatgacgacctcctcatctccctgtatcttctctaatgcttctctcatatacatgctctcagcagccacctggtttaaaacaaaaacaaaaaaaacactaatcatgtcattccctgcttgtcttcccgttctttccaactgtcattccctgcttgtcttccaattctttccaactgcagttaagatcaaaccaccaagacctcaccaggctcccatctacttttcagcctcaactcagtccacctgctctgccaatcacacctgtttctttttgttgttctttccctaggatatagatcctggcatacctgcattctgattcttcttggaacaagccaaattctttcccctgtcagtacgtttgcatgtgtagtacatgttgcatcccaggcctgtctgccttcttaccctattttattttcatcatagcacttactaccatctgaaatgatctcatttatggtttgtctcctcagtgattaacacagttcctgcacacagtaaatcagtagttctcaacaggaagtgaagaggtcatcctgaggggaacatttagcaatacctagagacatttctggttgtcataaccaggggaatgctcctagtggatagaagtcagggaggctgttaaacccattccacaatgcacaggactggaacaaagaatgatctctcactcagaatgtcagtgttgccaaggtggagacatcctgcagtagatgcttgtggcagagggtactggttgtcccccagtatccattctttcattcacctgtgttaatacatgctccagttttgtatttttttttataaacagctgtcaagcataaagataacattttccatctccttgtatgtaagtggaaataggactgtcatgtggggccagtttcttttttttcttcctctgtcctgctgcttgaaacatatgctgctatcttagatcatgaggtcgaggccatgcaaagtggagcaacaaggagctgtgtccctgacgccataagcaccacacctgtcctgaattgctgtgaatgacaccagctaactacaatgcattgtctcaacatcctagacataataaaaagccataaatatgtttgtcctatgcagcacaaaacctttgtatctttgccttttatgttgggatcttaattaaaaattacatcctctactgtcaataaatgctcaactttttatattcga

SEQ ID NO: 339851 - DNA, 1737 bp, Homo sapiens
taaccacctctcactctacgttgagtaagtagaacattgtttagattttttaaataagtggagaatatggaaactttaatgttgaattaagaatattaaaatctaattttcatatgctagaaattggcttctgcttaaatgtttctaatttcatccccataaagtttaagtactctaaaattgttagggtctctttggtccagcaggtggggccattcagaaatcactatgacctccttcctccatgaataatggtgattaccactgtttcccaaagattcatgattcatgtcccagatgtctcctcgaggagcatgcaggacagatctgtaatggcctgaactgaatttcaaggggtgtggaaaacagttactctttaacaccactccgtcttccccattagccatttggataagtcaaagatagccttagccatctcctatcttagttacttttctccttcaactgtattttgccattgtcgttgccattgcctctgcctaactgcaagccatcatcatctctcacatggactatgacgacctcctcatctccctgtatcttctctaatgcttctctcatatacatgctctcagcagccacctggtttaaaacaaaaacaaaaaaaacactaatcatgtcattccctgcttgtcttcccgttctttccaactgtcattccctgcttgtcttccaattctttccaactgcagttaagatcaaaccaccaagacctcaccaggctcccatctacttttcagcctcaactcagtccacctgctctgccaatcacacctgtttctttttgttgttctttccctaggatatagatcctggcatacctgcattctgattcttcttggaacaagccaaattctttcccctgtcagtacgtttgcatgtgtagtacatgttgcatcccaggcctgtctgccttcttaccctattttattttcatcatagcacttactaccatctgaaatgatctcatttatggtttgtctcctcagtgattaacacagttcctgcacacagtaaatcagtagttctcaacaggaagtgaagaggtcatcctgaggggaacatttagcaatacctagagacatttctggttgtcataaccaggggaatgctcctagtggatagaagtcagggaggctgttaaacccattccacaatgcacaggactggaacaaagaatgatctctcactcagaatgtcagtgttgccaaggtggagacatcctgcagtagatgcttgtggcagagggtactggttgtcccccagtatccattctttcattcacctgtgttaatacatgctccagttttgtatttttttttataaacagctgtcaagcataaagataacattttccatctccttgtatgtaagtggaaataggactgtcatgtggggccagtttcttttttttcttcctctgtcctgctgcttgaaacatatgctgctatcttagatcatgaggtcgaggccatgcaaagtggagcaacaaggagctgtgtccctgacgccataagcaccacacctgtcctgaattgctgtgaatgacaccagctaactacaatgcattgtctcaacatcctagacataataaaaagccataaatatgtttgtcctatgcagcacaaaacctttgtatctttgccttttatgttgggatcttaattaaaaattacatcctctactgtcaataaatgctcaactttttatattcga

SEQ ID NO: 339852 - DNA, 1802 bp, Homo sapiens
aacatttatttactattcccttttttattgttaccaggatagtacttttattaaattcctgatacgttgtcaatattgaaaaaactcaacaacttaaatgtacacgcacagtttgaaaagctggaaaatagtgaaagaatatccccatacccacctttcgtaccagtccccaaacatcacggtaaagtttactgtctcttcccagcccatggacgggaatggtaacgcctacggaatatgttgtgacatacagttgatcctaggttctccagaacaaaatgctgcacgaccacctcatcctggccctttattaaatatagcttaattctggacacaaacagttcccaccatgaagagagagtaggtgaccggaaaggagtgcgtcttaagcgcgttcgctgaatttgcaccacccaatccagccccgccgcccggcgccgctccttagacctggaccccggcaccctcccgccggggccgcacttagcagtggaaagtctgtcctcctgaagaagttgcgctccgacctccaagcatcaggtcaaaagtctaactcattctctgacctgccgccaattagaaaacaactgttgccaataaacgtggtcgcgccgcctgtgacctcagccgggacggacccgcgggcgggagcctgcggggcgtgaggcggggtggggccctggctcccctcccccgcccagccgcggcgtctgacgtcccgcgcgtcggcggccgcggagcagcgcagggagccaggcgggctgccggcgggtgtgaagaaaaaaatgacactccaatgggctgcagtggcaacctttctttatgccgaaataggactcattttaatcttctgcctaccttttattcctcctcagagatggcagaagattttttcatttaatgtctggggtaaaattgcaactttttggaacaaggctttccttaccattatcatcctattgattgttctatttctagatgctgtgagagaagtaaggaaatattcctcagttcataccattgagaagagctccaccagcagacctgatgcctatgaacacacacagatgaaactttttaggtctcaaagaaatctttacatttctggattttccctatttttttggctagttttgagacgtctggttacgcttattactcaactggcaaaagaactgtcaaacaaaggtgtacttaaaactcaagcagaaaatactaacaaggctgccaaaaaatttatggaagaaaacgaaaaactaaaaaggattttgaaaagccatggtaaagatgaagaatgtgttttggaagcagaaaataaaaaactagtagaagaccaggagaaactgaaaactgaattaaggaagacttcagatgccctttctaaggcacaaaatgatgtgatggaaatgaagatgcagtcagagagactttcgaaagaatatgatcaactcctgaaagaacactctgaacttcaggatcgtttagaaagaggcaacaagaaaagactgtgaactttataaaagacacttgcaatatactgtgtcaaaatgataattttgttatgttagcctctagaaaatttaagttcagaaaaatgcactatgaccggttcgtaatttttttaatgccacacataggttgtattgtaatggcattatcaaaatatttgatgatgtttcagatatattgcaaagtctgtattccagctcttaagaaaaatataagcatgttaaataccatatttacatattgataatgtcattggtatatggtggctgtttaccaataaaaggaaaaaattc

SEQ ID NO: 339853 - DNA, 1232 bp, Homo sapiens
aacatttatttactattcccttttttattgttaccaggatagtacttttattaaattcctgatacgttgtcaatattgaaaaaactcaacaacttaaatgtacacgcacagtttgaaaagctggaaaatagtgaaagaatatccccatacccacctttcgtaccagtccccaaacatcacggtaaagtttactgtctcttcccagcccatggacgggaatggtaacgcctacggaatatgttgtgacatacagttgatcctaggttctccagaacaaaatgctgcacgaccacctcatcctggccctttattaaatatagcttaattctggacacaaacagttcccaccatgaagagagagtaggtgaccggaaaggagtgcgtcttaagcgcgttcgctgaatttgcaccacccaatccagccccgccgcccggcgccgctccttagacctggaccccggcaccctcccgccggggccgcacttagcagtggaaagtctgtcctcctgaagaagttgcgctccgacctccaagcatcaggtcaaaagtctaactcattctctgacctgccgccaattagaaaacaactgttgccaataaacgtggtcgcgccgcctgtgacctcagccgggacggacccgcgggcgggagcctgcggggcgtgaggcggggtggggccctggctcccctcccccgcccagccgcggcgtctgacgtcccgcgcgtcggcggccgcggagcagcgcagggagccaggcgggctgccggcgggtgtgaagaaaaaaatgacactccaatgggctgcagtggcaacctttctttatgccgaaataggactcattttaatcttctgcctaccttttattcctcctcagagatggcagaagattttttcatttaatgtctggggtaaaattgcaactttttggaacaaggctttccttaccattatcatcctattgattgttctatttctagatgctgtgagagaagtaaggaaatattcctcagttcataccattgagaagagctccaccagcagacctgatgcctatgaacacacacagatgaaactttttaggtctcaaagaaatctttacatttctggattttccctatttttttggctgtaagtaaaaaataataatagaagcacaatttaaaaacatgacttatgctttcctttctcattttgtccacctttactgtagattttttttttttttaagaga

SEQ ID NO: 339854 - DNA, 3658 bp, Homo sapiens
aacatttatttactattcccttttttattgttaccaggatagtacttttattaaattcctgatacgttgtcaatattgaaaaaactcaacaacttaaatgtacacgcacagtttgaaaagctggaaaatagtgaaagaatatccccatacccacctttcgtaccagtccccaaacatcacggtaaagtttactgtctcttcccagcccatggacgggaatggtaacgcctacggaatatgttgtgacatacagttgatcctaggttctccagaacaaaatgctgcacgaccacctcatcctggccctttattaaatatagcttaattctggacacaaacagttcccaccatgaagagagagtaggtgaccggaaaggagtgcgtcttaagcgcgttcgctgaatttgcaccacccaatccagccccgccgcccggcgccgctccttagacctggaccccggcaccctcccgccggggccgcacttagcagtggaaagtctgtcctcctgaagaagttgcgctccgacctccaagcatcaggtcaaaagtctaactcattctctgacctgccgccaattagaaaacaactgttgccaataaacgtggtcgcgccgcctgtgacctcagccgggacggacccgcgggcgggagcctgcggggcgtgaggcggggtggggccctggctcccctcccccgcccagccgcggcgtctgacgtcccgcgcgtcggcggccgcggagcagcgcagggagccaggcgggctgccggcgggtgtgaagaaaaaaatgacactccaatgggctgcagtggcaacctttctttatgccgaaataggactcattttaatcttctgcctaccttttattcctcctcagagatggcagaagattttttcatttaatgtctggggtaaaattgcaactttttggaacaaggctttccttaccattatcatcctattgattgttctatttctagatgctgtgagagaagtaaggaaatattcctcagttcataccattgagaagagctccaccagcagacctgatgcctatgaacacacacagatgaaactttttaggtctcaaagaaatctttacatttctggattttccctatttttttggctagttttgagacgtctggttacgcttattactcaactggcaaaagaactgtcaaacaaaggtgtacttaaaactcaagcagaaaatactaacaaggctgccaaaaaatttatggaagaaaacgaaaaactaaaaaggattttgaaaagccatggtaaagatgaagaatgtgttttggaagcagaaaataaaaaactagtagaagaccaggagaaactgaaaactgaattaaggaagacttcagatgccctttctaaggcacaaaatgatgtgatggaaatgaagatgcagtcagagagactttcgaaagaatatgatcaactcctgaaagaacactctgaacttcaggatcgtttagaaagaggcaacaagaaaagactgtgaactttataaaagacacttgcaatatactgtgtcaaaatgataattttgttatgttagcctctagaaaatttaagttcagaaaaatgcactatgaccggttcgtaatttttttaatgccacacataggttgtattgtaatggcattatcaaaatatttgatgatgtttcagatatattgcaaagtctgtattccagctcttaagaaaaatataagcatgttaaataccatatttacatattgataatgtcattggtatatggtggctgtttaccaataaaaggaaaaaattcattaaccggttgcttccaaaattagaagttttaagttgcatgaaaccattaatagccttgaaagctttgataagttttcagtaataataacctatttaatcagatgatgatgtgtttgaaaatagtgttcaatatcagcaaatttgtacacagggaatgtaaataaggataactgatcagagttatccactgtatttataaggaagagtcggaaaaaacaatgaccttagttttttttaagcctgatgatactatggtttactctaataagatagctatattgataattatatttttgttactgtgcccttgcacattttggtctttttgttaatatttttattaataacacataattagtaaccactctactgtttcaagttaatctagtaatagagcttacatatatttgtataactgctataccactgaactgaatttattttacaacagtgtagaattcttgaaaagttaacgtagaaaatatccaaaaagcagtatttctagaaagtgtccaaaaagcagtatttctttcccttggttgtgagagtaactaattatataaatattacctcaaaaatacatacactggtatcacacagtctttctacaatgtttctgtattctgaaagctaaatattaagtactatttttccattcaaatattcatttagaatttcctttagaagatggcagtgattataatattaatatgatttcatttgttccagtgtttagacatgaaatcatcttccttgtctcatgaaaacctaaatataaaaaaaaggaaaatactggagtttttatttctcttgtctttgttacatcctctgtttattataattttagcaccaacttcacacctagctaatttttttcatcataaagtggatgaaatgagcaagtacctaaaaattttatttcagataaaagtcaggagttactgctaaaaaacagacatgtaggagacattcaacaggagtatgaaatgagagttagaccatatgggctgacaacaccataaataacaagaaaagggagtgctgaaataggagagaacagagcaaatgttagctcaaagtatagacttagaaatatcaaagtaagagctatctggataaatatatagatattgagtgcttggaatcctagcctactatgtgaaaattaagtctaatgtcagaataacttacagaaaaatagaaaatgcacagctttaaaatgggcagagttaaaatctattcccagctttatcacttatttagccatgctagcctaggcctctatttccttgtctccaaaatgagaataataaaatttaggtcaggattactatataaactaagataatacagtgattctcaaagttgttcagactgtatagtaaggagaaagtctggttgcactttgaagagcttgaagatttgaaagattcccaaaaaagcattttaaagtttacatttaagggaccttggacctcaaccctctcaagtttacaagtctgaaactttagacatcaaaagtttgagcagtttttccaaggcaacattgatagttagattcagggccaggctgtaagtctagaatttagatatcctgatcccccagataccgctcttctggttatacacagaccagctataatttgctaaacataaaatattgcagtgtattagccagctgtggctccagagtctgtgccctttaccaccgtgcccaactgtttcacatgctgtgtttggtagtttttcctagtgctctccttaataatggtggtgtttagcaaattgtattacataaataaatatttatttcatggattgagttatgttgcctttcggaaagagggccgagcc

SEQ ID NO: 339855 - DNA, 4424 bp, Homo sapiens
aacatttatttactattcccttttttattgttaccaggatagtacttttattaaattcctgatacgttgtcaatattgaaaaaactcaacaacttaaatgtacacgcacagtttgaaaagctggaaaatagtgaaagaatatccccatacccacctttcgtaccagtccccaaacatcacggtaaagtttactgtctcttcccagcccatggacgggaatggtaacgcctacggaatatgttgtgacatacagttgatcctaggttctccagaacaaaatgctgcacgaccacctcatcctggccctttattaaatatagcttaattctggacacaaacagttcccaccatgaagagagagtaggtgaccggaaaggagtgcgtcttaagcgcgttcgctgaatttgcaccacccaatccagccccgccgcccggcgccgctccttagacctggaccccggcaccctcccgccggggccgcacttagcagtggaaagtctgtcctcctgaagaagttgcgctccgacctccaagcatcaggtcaaaagtctaactcattctctgacctgccgccaattagaaaacaactgttgccaataaacgtggtcgcgccgcctgtgacctcagccgggacggacccgcgggcgggagcctgcggggcgtgaggcggggtggggccctggctcccctcccccgcccagccgcggcgtctgacgtcccgcgcgtcggcggccgcggagcagcgcagggagccaggcgggctgccggcgggtgtgaagaaaaaaatgacactccaatgggctgcagtggcaacctttctttatgccgaaataggactcattttaatcttctgcctaccttttattcctcctcagagatggcagaagattttttcatttaatgtctggggtaaaattgcaactttttggaacaaggctttccttaccattatcatcctattgattgttctatttctagatgctgtgagagaagtaaggaaatattcctcagttcataccattgagaagagctccaccagcagacctgatgcctatgaacacacacagatgaaactttttaggtctcaaagaaatctttacatttctggattttccctatttttttggctagttttgagacgtctggttacgcttattactcaactggcaaaagaactgtcaaacaaaggtgtacttaaaactcaagcagaaaatactaacaaggctgccaaaaaatttatggaagaaaacgaaaaactaaaaaggattttgaaaagccatggtaaagatgaagaatgtgttttggaagcagaaaataaaaaactagtagaagaccaggagaaactgaaaactgaattaaggaagacttcagatgccctttctaaggcacaaaatgatgtgatggaaatgaagatgcagtcagagagactttcgaaagaatatgatcaactcctgaaagaacactctgaacttcaggtcccactgggcagcttctacatactggccttcgcacctgggctccataaccctcatccctccagcccaagaagtggtggtggcttttctgctattgataatcccagaggtgccttaccaccctgtttggatcgtttagaaagaggcaacaagaaaagactgtgaactttataaaagacacttgcaatatactgtgtcaaaatgataattttgttatgttagcctctagaaaatttaagttcagaaaaatgcactatgaccggttcgtaatttttttaatgccacacataggttgtattgtaatggcattatcaaaatatttgatgatgtttcagatatattgcaaagtctgtattccagctcttaagaaaaatataagcatgttaaataccatatttacatattgataatgtcattggtatatggtggctgtttaccaataaaaggaaaaaattcattaaccggttgcttccaaaattagaagttttaagttgcatgaaaccattaatagccttgaaagctttgataagttttcagtaataataacctatttaatcagatgatgatgtgtttgaaaatagtgttcaatatcagcaaatttgtacacagggaatgtaaataaggataactgatcagagttatccactgtatttataaggaagagtcggaaaaaacaatgaccttagttttttttaagcctgatgatactatggtttactctaataagatagctatattgataattatatttttgttactgtgcccttgcacattttggtctttttgttaatatttttattaataacacataattagtaaccactctactgtttcaagttaatctagtaatagagcttacatatatttgtataactgctataccactgaactgaatttattttacaacagtgtagaattcttgaaaagttaacgtagaaaatatccaaaaagcagtatttctagaaagtgtccaaaaagcagtatttctttcccttggttgtgagagtaactaattatataaatattacctcaaaaatacatacactggtatcacacagtctttctacaatgtttctgtattctgaaagctaaatattaagtactatttttccattcaaatattcatttagaatttcctttagaagatggcagtgattataatattaatatgatttcatttgttccagtgtttagacatgaaatcatcttccttgtctcatgaaaacctaaatataaaaaaaaggaaaatactggagtttttatttctcttgtctttgttacatcctctgtttattataattttagcaccaacttcacacctagctaatttttttcatcataaagtggatgaaatgagcaagtacctaaaaattttatttcagataaaagtcaggagttactgctaaaaaacagacatgtaggagacattcaacaggagtatgaaatgagagttagaccatatgggctgacaacaccataaataacaagaaaagggagtgctgaaataggagagaacagagcaaatgttagctcaaagtatagacttagaaatatcaaagtaagagctatctggataaatatatagatattgagtgcttggaatcctagcctactatgtgaaaattaagtctaatgtcagaataacttacagaaaaatagaaaatgcacagctttaaaatgggcagagttaaaatctattcccagctttatcacttatttagccatgctagcctaggcctctatttccttgtctccaaaatgagaataataaaatttaggtcaggattactatataaactaagataatacagtgattctcaaagttgttcagactgtatagtaaggagaaagtctggttgcactttgaagagcttgaagatttgaaagattcccaaaaaagcattttaaagtttacatttaagggaccttggacctcaaccctctcaagtttacaagtctgaaactttagacatcaaaagtttgagcagtttttccaaggcaacattgatagttagattcagggccaggctgtaagtctagaatttagatatcctgatcccccagataccgctcttctggttatacacagaccagctataatttgctaaacataaaatattgcagtgtattagccagctgtggctccagagtctgtgccctttaccaccgtgcccaactgtttcacatgctgtgtttggtagtttttcctagtgctctccttaataatggtggtgtttagcaaattgtattacataaataaatatttatttcatggattgagttatgttgcatattaaattactttccttcccatgtcaataatgacttctttatgtcttaggctgtattataaattcaaacacaggaatgttattcttgcctttttccatcagaattacctaaagttttattagactttccccctacttgcaaatctgcctggaggttctggtctttaggaagtagcacttagcaagttcggataagcactccagaatttgggatgagttatccttgttgtttgtccagctctatcttggaccccagtgctgctaattagattcatgccttgttctttagggcataagttcctctcttggctatttttcctagtatgctgagaactaggattccctttcagtgacagagtcctgccctggaaccccaatcaagagcctaaagtttaactactctctgagatattagcctgatgccagcagcctgcctggatctctaaatattacccattctgggagttgttagtggtctctgctttcctgcagtgtcactcctgcttcctcattgggcctgctagccacagctacttggatgtacccgaacctgttgccttgccctacctactgtgggctggttcagttctgcattcccattccagtgtccactgccttcttgctatccctcccatctgtgcagccaccaccagcttat

SEQ ID NO: 339856 - DNA, 4189 bp, Homo sapiens
aacatttatttactattcccttttttattgttaccaggatagtacttttattaaattcctgatacgttgtcaatattgaaaaaactcaacaacttaaatgtacacgcacagtttgaaaagctggaaaatagtgaaagaatatccccatacccacctttcgtaccagtccccaaacatcacggtaaagtttactgtctcttcccagcccatggacgggaatggtaacgcctacggaatatgttgtgacatacagttgatcctaggttctccagaacaaaatgctgcacgaccacctcatcctggccctttattaaatatagcttaattctggacacaaacagttcccaccatgaagagagagtaggtgaccggaaaggagtgcgtcttaagcgcgttcgctgaatttgcaccacccaatccagccccgccgcccggcgccgctccttagacctggaccccggcaccctcccgccggggccgcacttagcagtggaaagtctgtcctcctgaagaagttgcgctccgacctccaagcatcaggtcaaaagtctaactcattctctgacctgccgccaattagaaaacaactgttgccaataaacgtggtcgcgccgcctgtgacctcagccgggacggacccgcgggcgggagcctgcggggcgtgaggcggggtggggccctggctcccctcccccgcccagccgcggcgtctgacgtcccgcgcgtcggcggccgcggagcagcgcagggagccaggcgggctgccggcggatggcagaagattttttcatttaatgtctggggtaaaattgcaactttttggaacaaggctttccttaccattatcatcctattgattgttctatttctagatgctgtgagagaagtaaggaaatattcctcagttcataccattgagaagagctccaccagcagacctgatgcctatgaacacacacagatgaaactttttaggtctcaaagaaatctttacatttctggattttccctatttttttggctagttttgagacgtctggttacgcttattactcaactggcaaaagaactgtcaaacaaaggtgtacttaaaactcaagcagaaaatactaacaaggctgccaaaaaatttatggaagaaaacgaaaaactaaaaaggattttgaaaagccatggtaaagatgaagaatgtgttttggaagcagaaaataaaaaactagtagaagaccaggagaaactgaaaactgaattaaggaagacttcagatgccctttctaaggcacaaaatgatgtgatggaaatgaagatgcagtcagagagactttcgaaagaatatgatcaactcctgaaagaacactctgaacttcaggatcgtttagaaagaggcaacaagaaaagactgtgaactttataaaagacacttgcaatatactgtgtcaaaatgataattttgttatgttagcctctagaaaatttaagttcagaaaaatgcactatgaccggttcgtaatttttttaatgccacacataggttgtattgtaatggcattatcaaaatatttgatgatgtttcagatatattgcaaagtctgtattccagctcttaagaaaaatataagcatgttaaataccatatttacatattgataatgtcattggtatatggtggctgtttaccaataaaaggaaaaaattcattaaccggttgcttccaaaattagaagttttaagttgcatgaaaccattaatagccttgaaagctttgataagttttcagtaataataacctatttaatcagatgatgatgtgtttgaaaatagtgttcaatatcagcaaatttgtacacagggaatgtaaataaggataactgatcagagttatccactgtatttataaggaagagtcggaaaaaacaatgaccttagttttttttaagcctgatgatactatggtttactctaataagatagctatattgataattatatttttgttactgtgcccttgcacattttggtctttttgttaatatttttattaataacacataattagtaaccactctactgtttcaagttaatctagtaatagagcttacatatatttgtataactgctataccactgaactgaatttattttacaacagtgtagaattcttgaaaagttaacgtagaaaatatccaaaaagcagtatttctagaaagtgtccaaaaagcagtatttctttcccttggttgtgagagtaactaattatataaatattacctcaaaaatacatacactggtatcacacagtctttctacaatgtttctgtattctgaaagctaaatattaagtactatttttccattcaaatattcatttagaatttcctttagaagatggcagtgattataatattaatatgatttcatttgttccagtgtttagacatgaaatcatcttccttgtctcatgaaaacctaaatataaaaaaaaggaaaatactggagtttttatttctcttgtctttgttacatcctctgtttattataattttagcaccaacttcacacctagctaatttttttcatcataaagtggatgaaatgagcaagtacctaaaaattttatttcagataaaagtcaggagttactgctaaaaaacagacatgtaggagacattcaacaggagtatgaaatgagagttagaccatatgggctgacaacaccataaataacaagaaaagggagtgctgaaataggagagaacagagcaaatgttagctcaaagtatagacttagaaatatcaaagtaagagctatctggataaatatatagatattgagtgcttggaatcctagcctactatgtgaaaattaagtctaatgtcagaataacttacagaaaaatagaaaatgcacagctttaaaatgggcagagttaaaatctattcccagctttatcacttatttagccatgctagcctaggcctctatttccttgtctccaaaatgagaataataaaatttaggtcaggattactatataaactaagataatacagtgattctcaaagttgttcagactgtatagtaaggagaaagtctggttgcactttgaagagcttgaagatttgaaagattcccaaaaaagcattttaaagtttacatttaagggaccttggacctcaaccctctcaagtttacaagtctgaaactttagacatcaaaagtttgagcagtttttccaaggcaacattgatagttagattcagggccaggctgtaagtctagaatttagatatcctgatcccccagataccgctcttctggttatacacagaccagctataatttgctaaacataaaatattgcagtgtattagccagctgtggctccagagtctgtgccctttaccaccgtgcccaactgtttcacatgctgtgtttggtagtttttcctagtgctctccttaataatggtggtgtttagcaaattgtattacataaataaatatttatttcatggattgagttatgttgcatattaaattactttccttcccatgtcaataatgacttctttatgtcttaggctgtattataaattcaaacacaggaatgttattcttgcctttttccatcagaattacctaaagttttattagactttccccctacttgcaaatctgcctggaggttctggtctttaggaagtagcacttagcaagttcggataagcactccagaatttgggatgagttatccttgttgtttgtccagctctatcttggaccccagtgctgctaattagattcatgccttgttctttagggcataagttcctctcttggctatttttcctagtatgctgagaactaggattccctttcagtgacagagtcctgccctggaaccccaatcaagagcctaaagtttaactactctctgagatattagcctgatgccagcagcctgcctggatctctaaatattacccattctgggagttgttagtggtctctgctttcctgcagtgtcactcctgcttcctcattgggcctgctagccacagctacttggatgtacccgaacctgttgccttgccctacctactgtgggctggttcagttctgcattcccattccagtgtccactgccttcttgctatccctcccatctgtgcagccaccaccagcttat

SEQ ID NO: 339857 - DNA, 4226 bp, Homo sapiens
aacatttatttactattcccttttttattgttaccaggatagtacttttattaaattcctgatacgttgtcaatattgaaaaaactcaacaacttaaatgtacacgcacagtttgaaaagctggaaaatagtgaaagaatatccccatacccacctttcgtaccagtccccaaacatcacggtaaagtttactgtctcttcccagcccatggacgggaatggtaacgcctacggaatatgttgtgacatacagttgatcctaggttctccagaacaaaatgctgcacgaccacctcatcctggccctttattaaatatagcttaattctggacacaaacagttcccaccatgaagagagagtaggtgaccggaaaggagtgcgtcttaagcgcgttcgctgaatttgcaccacccaatccagccccgccgcccggcgccgctccttagacctggaccccggcaccctcccgccggggccgcacttagcagtggaaagtctgtcctcctgaagaagttgcgctccgacctccaagcatcaggtcaaaagtctaactcattctctgacctgccgccaattagaaaacaactgttgccaataaacgtggtcgcgccgcctgtgacctcagccgggacggacccgcgggcgggagcctgcggggcgtgaggcggggtggggccctggctcccctcccccgcccagccgcggcgtctgacgtcccgcgcgtcggcggccgcggagcagcgcagggagccaggcgggctgccggcgggtgtgaagaaaaaaatgacactccaatgggctgcagtggcaacctttctttatgccgaaataggactcattttaatcttctgcctaccttttattcctcctcagagatggcagaagattttttcatttaatgtctgggatgctgtgagagaagtaaggaaatattcctcagttcataccattgagaagagctccaccagcagacctgatgcctatgaacacacacagatgaaactttttaggtctcaaagaaatctttacatttctggattttccctatttttttggctagttttgagacgtctggttacgcttattactcaactggcaaaagaactgtcaaacaaaggtgtacttaaaactcaagcagaaaatactaacaaggctgccaaaaaatttatggaagaaaacgaaaaactaaaaaggattttgaaaagccatggtaaagatgaagaatgtgttttggaagcagaaaataaaaaactagtagaagaccaggagaaactgaaaactgaattaaggaagacttcagatgccctttctaaggcacaaaatgatgtgatggaaatgaagatgcagtcagagagactttcgaaagaatatgatcaactcctgaaagaacactctgaacttcaggatcgtttagaaagaggcaacaagaaaagactgtgaactttataaaagacacttgcaatatactgtgtcaaaatgataattttgttatgttagcctctagaaaatttaagttcagaaaaatgcactatgaccggttcgtaatttttttaatgccacacataggttgtattgtaatggcattatcaaaatatttgatgatgtttcagatatattgcaaagtctgtattccagctcttaagaaaaatataagcatgttaaataccatatttacatattgataatgtcattggtatatggtggctgtttaccaataaaaggaaaaaattcattaaccggttgcttccaaaattagaagttttaagttgcatgaaaccattaatagccttgaaagctttgataagttttcagtaataataacctatttaatcagatgatgatgtgtttgaaaatagtgttcaatatcagcaaatttgtacacagggaatgtaaataaggataactgatcagagttatccactgtatttataaggaagagtcggaaaaaacaatgaccttagttttttttaagcctgatgatactatggtttactctaataagatagctatattgataattatatttttgttactgtgcccttgcacattttggtctttttgttaatatttttattaataacacataattagtaaccactctactgtttcaagttaatctagtaatagagcttacatatatttgtataactgctataccactgaactgaatttattttacaacagtgtagaattcttgaaaagttaacgtagaaaatatccaaaaagcagtatttctagaaagtgtccaaaaagcagtatttctttcccttggttgtgagagtaactaattatataaatattacctcaaaaatacatacactggtatcacacagtctttctacaatgtttctgtattctgaaagctaaatattaagtactatttttccattcaaatattcatttagaatttcctttagaagatggcagtgattataatattaatatgatttcatttgttccagtgtttagacatgaaatcatcttccttgtctcatgaaaacctaaatataaaaaaaaggaaaatactggagtttttatttctcttgtctttgttacatcctctgtttattataattttagcaccaacttcacacctagctaatttttttcatcataaagtggatgaaatgagcaagtacctaaaaattttatttcagataaaagtcaggagttactgctaaaaaacagacatgtaggagacattcaacaggagtatgaaatgagagttagaccatatgggctgacaacaccataaataacaagaaaagggagtgctgaaataggagagaacagagcaaatgttagctcaaagtatagacttagaaatatcaaagtaagagctatctggataaatatatagatattgagtgcttggaatcctagcctactatgtgaaaattaagtctaatgtcagaataacttacagaaaaatagaaaatgcacagctttaaaatgggcagagttaaaatctattcccagctttatcacttatttagccatgctagcctaggcctctatttccttgtctccaaaatgagaataataaaatttaggtcaggattactatataaactaagataatacagtgattctcaaagttgttcagactgtatagtaaggagaaagtctggttgcactttgaagagcttgaagatttgaaagattcccaaaaaagcattttaaagtttacatttaagggaccttggacctcaaccctctcaagtttacaagtctgaaactttagacatcaaaagtttgagcagtttttccaaggcaacattgatagttagattcagggccaggctgtaagtctagaatttagatatcctgatcccccagataccgctcttctggttatacacagaccagctataatttgctaaacataaaatattgcagtgtattagccagctgtggctccagagtctgtgccctttaccaccgtgcccaactgtttcacatgctgtgtttggtagtttttcctagtgctctccttaataatggtggtgtttagcaaattgtattacataaataaatatttatttcatggattgagttatgttgcatattaaattactttccttcccatgtcaataatgacttctttatgtcttaggctgtattataaattcaaacacaggaatgttattcttgcctttttccatcagaattacctaaagttttattagactttccccctacttgcaaatctgcctggaggttctggtctttaggaagtagcacttagcaagttcggataagcactccagaatttgggatgagttatccttgttgtttgtccagctctatcttggaccccagtgctgctaattagattcatgccttgttctttagggcataagttcctctcttggctatttttcctagtatgctgagaactaggattccctttcagtgacagagtcctgccctggaaccccaatcaagagcctaaagtttaactactctctgagatattagcctgatgccagcagcctgcctggatctctaaatattacccattctgggagttgttagtggtctctgctttcctgcagtgtcactcctgcttcctcattgggcctgctagccacagctacttggatgtacccgaacctgttgccttgccctacctactgtgggctggttcagttctgcattcccattccagtgtccactgccttcttgctatccctcccatctgtgcagccaccaccagcttat

SEQ ID NO: 339858 - DNA, 3821 bp, Homo sapiens
agggccgggaagccgggcgttggtggagggaggcgttgggcttctgtcgccgcgaagctggcggaaaaggcagtggccagcgagccgcctcgccagttcccacgactcccagggaggtggcgacacccgcttcccgggccacccttttccccttcctgaccggggtccgtgcttgccttcccaggtgggggaaggtggaacactgtccatcccctggacaaaaacgctgcgcctcggggccttgaacccggttttgtttgaaaggaagcaagagaaaataagtgtttttccatttaggtgtgaagaaaaaaatgacactccaatgggctgcagtggcaacctttctttatgccgaaataggactcattttaatcttctgcctaccttttattcctcctcagagatggcagaagattttttcatttaatgtctggggtaaaattgcaactttttggaacaaggctttccttaccattatcatcctattgattgttctatttctagatgctgtgagagaagtaaggaaatattcctcagttcataccattgagaagagctccaccagcagacctgatgcctatgaacacacacagatgaaactttttaggtctcaaagaaatctttacatttctggattttccctatttttttggctagttttgagacgtctggttacgcttattactcaactggcaaaagaactgtcaaacaaaggtgtacttaaaactcaagcagaaaatactaacaaggctgccaaaaaatttatggaagaaaacgaaaaactaaaaaggattttgaaaagccatggtaaagatgaagaatgtgttttggaagcagaaaataaaaaactagtagaagaccaggagaaactgaaaactgaattaaggaagacttcagatgccctttctaaggcacaaaatgatgtgatggaaatgaagatgcagtcagagagactttcgaaagaatatgatcaactcctgaaagaacactctgaacttcaggatcgtttagaaagaggcaacaagaaaagactgtgaactttataaaagacacttgcaatatactgtgtcaaaatgataattttgttatgttagcctctagaaaatttaagttcagaaaaatgcactatgaccggttcgtaatttttttaatgccacacataggttgtattgtaatggcattatcaaaatatttgatgatgtttcagatatattgcaaagtctgtattccagctcttaagaaaaatataagcatgttaaataccatatttacatattgataatgtcattggtatatggtggctgtttaccaataaaaggaaaaaattcattaaccggttgcttccaaaattagaagttttaagttgcatgaaaccattaatagccttgaaagctttgataagttttcagtaataataacctatttaatcagatgatgatgtgtttgaaaatagtgttcaatatcagcaaatttgtacacagggaatgtaaataaggataactgatcagagttatccactgtatttataaggaagagtcggaaaaaacaatgaccttagttttttttaagcctgatgatactatggtttactctaataagatagctatattgataattatatttttgttactgtgcccttgcacattttggtctttttgttaatatttttattaataacacataattagtaaccactctactgtttcaagttaatctagtaatagagcttacatatatttgtataactgctataccactgaactgaatttattttacaacagtgtagaattcttgaaaagttaacgtagaaaatatccaaaaagcagtatttctagaaagtgtccaaaaagcagtatttctttcccttggttgtgagagtaactaattatataaatattacctcaaaaatacatacactggtatcacacagtctttctacaatgtttctgtattctgaaagctaaatattaagtactatttttccattcaaatattcatttagaatttcctttagaagatggcagtgattataatattaatatgatttcatttgttccagtgtttagacatgaaatcatcttccttgtctcatgaaaacctaaatataaaaaaaaggaaaatactggagtttttatttctcttgtctttgttacatcctctgtttattataattttagcaccaacttcacacctagctaatttttttcatcataaagtggatgaaatgagcaagtacctaaaaattttatttcagataaaagtcaggagttactgctaaaaaacagacatgtaggagacattcaacaggagtatgaaatgagagttagaccatatgggctgacaacaccataaataacaagaaaagggagtgctgaaataggagagaacagagcaaatgttagctcaaagtatagacttagaaatatcaaagtaagagctatctggataaatatatagatattgagtgcttggaatcctagcctactatgtgaaaattaagtctaatgtcagaataacttacagaaaaatagaaaatgcacagctttaaaatgggcagagttaaaatctattcccagctttatcacttatttagccatgctagcctaggcctctatttccttgtctccaaaatgagaataataaaatttaggtcaggattactatataaactaagataatacagtgattctcaaagttgttcagactgtatagtaaggagaaagtctggttgcactttgaagagcttgaagatttgaaagattcccaaaaaagcattttaaagtttacatttaagggaccttggacctcaaccctctcaagtttacaagtctgaaactttagacatcaaaagtttgagcagtttttccaaggcaacattgatagttagattcagggccaggctgtaagtctagaatttagatatcctgatcccccagataccgctcttctggttatacacagaccagctataatttgctaaacataaaatattgcagtgtattagccagctgtggctccagagtctgtgccctttaccaccgtgcccaactgtttcacatgctgtgtttggtagtttttcctagtgctctccttaataatggtggtgtttagcaaattgtattacataaataaatatttatttcatggattgagttatgttgcatattaaattactttccttcccatgtcaataatgacttctttatgtcttaggctgtattataaattcaaacacaggaatgttattcttgcctttttccatcagaattacctaaagttttattagactttccccctacttgcaaatctgcctggaggttctggtctttaggaagtagcacttagcaagttcggataagcactccagaatttgggatgagttatccttgttgtttgtccagctctatcttggaccccagtgctgctaattagattcatgccttgttctttagggcataagttcctctcttggctatttttcctagtatgctgagaactaggattccctttcagtgacagagtcctgccctggaaccccaatcaagagcctaaagtttaactactctctgagatattagcctgatgccagcagcctgcctggatctctaaatattacccattctgggagttgttagtggtctctgctttcctgcagtgtcactcctgcttcctcattgggcctgctagccacagctacttggatgtacccgaacctgttgccttgccctacctactgtgggctggttcagttctgcattcccattccagtgtccactgccttcttgctatccctcccatctgtgcagccaccaccagcttat

SEQ ID NO: 339859 - DNA, 3543 bp, Homo sapiens
ttttctttttttgttattatttttatgacactccactgggctgctttgtcaccctttcattatgcctaataggactaattataaacaagtgcctaccttttattcctccttagacatggcccattatggcagaagattttttcatttaatgtctggggtaaaattgcaactttttggaacaaggctttccttaccattatcatcctattgattgttctatttctagatgctgtgagagaagtaaggaaatattcctcagttcataccattgagaagagctccaccagcagacctgatgcctatgaacacacacagatgaaactttttaggtctcaaagaaatctttacatttctggattttccctatttttttggctagttttgagacgtctggttacgcttattactcaactggcaaaagaactgtcaaacaaaggtgtacttaaaactcaagcagaaaatactaacaaggctgccaaaaaatttatggaagaaaacgaaaaactaaaaaggattttgaaaagccatggtaaagatgaagaatgtgttttggaagcagaaaataaaaaactagtagaagaccaggagaaactgaaaactgaattaaggaagacttcagatgccctttctaaggcacaaaatgatgtgatggaaatgaagatgcagtcagagagactttcgaaagaatatgatcaactcctgaaagaacactctgaacttcaggatcgtttagaaagaggcaacaagaaaagactgtgaactttataaaagacacttgcaatatactgtgtcaaaatgataattttgttatgttagcctctagaaaatttaagttcagaaaaatgcactatgaccggttcgtaatttttttaatgccacacataggttgtattgtaatggcattatcaaaatatttgatgatgtttcagatatattgcaaagtctgtattccagctcttaagaaaaatataagcatgttaaataccatatttacatattgataatgtcattggtatatggtggctgtttaccaataaaaggaaaaaattcattaaccggttgcttccaaaattagaagttttaagttgcatgaaaccattaatagccttgaaagctttgataagttttcagtaataataacctatttaatcagatgatgatgtgtttgaaaatagtgttcaatatcagcaaatttgtacacagggaatgtaaataaggataactgatcagagttatccactgtatttataaggaagagtcggaaaaaacaatgaccttagttttttttaagcctgatgatactatggtttactctaataagatagctatattgataattatatttttgttactgtgcccttgcacattttggtctttttgttaatatttttattaataacacataattagtaaccactctactgtttcaagttaatctagtaatagagcttacatatatttgtataactgctataccactgaactgaatttattttacaacagtgtagaattcttgaaaagttaacgtagaaaatatccaaaaagcagtatttctagaaagtgtccaaaaagcagtatttctttcccttggttgtgagagtaactaattatataaatattacctcaaaaatacatacactggtatcacacagtctttctacaatgtttctgtattctgaaagctaaatattaagtactatttttccattcaaatattcatttagaatttcctttagaagatggcagtgattataatattaatatgatttcatttgttccagtgtttagacatgaaatcatcttccttgtctcatgaaaacctaaatataaaaaaaaggaaaatactggagtttttatttctcttgtctttgttacatcctctgtttattataattttagcaccaacttcacacctagctaatttttttcatcataaagtggatgaaatgagcaagtacctaaaaattttatttcagataaaagtcaggagttactgctaaaaaacagacatgtaggagacattcaacaggagtatgaaatgagagttagaccatatgggctgacaacaccataaataacaagaaaagggagtgctgaaataggagagaacagagcaaatgttagctcaaagtatagacttagaaatatcaaagtaagagctatctggataaatatatagatattgagtgcttggaatcctagcctactatgtgaaaattaagtctaatgtcagaataacttacagaaaaatagaaaatgcacagctttaaaatgggcagagttaaaatctattcccagctttatcacttatttagccatgctagcctaggcctctatttccttgtctccaaaatgagaataataaaatttaggtcaggattactatataaactaagataatacagtgattctcaaagttgttcagactgtatagtaaggagaaagtctggttgcactttgaagagcttgaagatttgaaagattcccaaaaaagcattttaaagtttacatttaagggaccttggacctcaaccctctcaagtttacaagtctgaaactttagacatcaaaagtttgagcagtttttccaaggcaacattgatagttagattcagggccaggctgtaagtctagaatttagatatcctgatcccccagataccgctcttctggttatacacagaccagctataatttgctaaacataaaatattgcagtgtattagccagctgtggctccagagtctgtgccctttaccaccgtgcccaactgtttcacatgctgtgtttggtagtttttcctagtgctctccttaataatggtggtgtttagcaaattgtattacataaataaatatttatttcatggattgagttatgttgcatattaaattactttccttcccatgtcaataatgacttctttatgtcttaggctgtattataaattcaaacacaggaatgttattcttgcctttttccatcagaattacctaaagttttattagactttccccctacttgcaaatctgcctggaggttctggtctttaggaagtagcacttagcaagttcggataagcactccagaatttgggatgagttatccttgttgtttgtccagctctatcttggaccccagtgctgctaattagattcatgccttgttctttagggcataagttcctctcttggctatttttcctagtatgctgagaactaggattccctttcagtgacagagtcctgccctggaaccccaatcaagagcctaaagtttaactactctctgagatattagcctgatgccagcagcctgcctggatctctaaatattacccattctgggagttgttagtggtctctgctttcctgcagtgtcactcctgcttcctcattgggcctgctagccacagctacttggatgtacccgaacctgttgccttgccctacctactgtgggctggttcagttctgcattcccattccagtgtccactgccttcttgctatccctcccatctgtgcagccaccaccagcttat

SEQ ID NO: 339860 - DNA, 3552 bp, Homo sapiens
aaagatttagaaggaagatttctcattctgatgaagagctacaaaaaacctcaagctagcatcatacttaaatatcaaagtcttcccccataagattggaaacaagatgctgtgagagaagtaaggaaatattcctcagttcataccattgagaagagctccaccagcagacctgatgcctatgaacacacacagatgaaactttttaggtctcaaagaaatctttacatttctggattttccctatttttttggctagttttgagacgtctggttacgcttattactcaactggcaaaagaactgtcaaacaaaggtgtacttaaaactcaagcagaaaatactaacaaggctgccaaaaaatttatggaagaaaacgaaaaactaaaaaggattttgaaaagccatggtaaagatgaagaatgtgttttggaagcagaaaataaaaaactagtagaagaccaggagaaactgaaaactgaattaaggaagacttcagatgccctttctaaggcacaaaatgatgtgatggaaatgaagatgcagtcagagagactttcgaaagaatatgatcaactcctgaaagaacactctgaacttcaggtcccactgggcagcttctacatactggccttcgcacctgggctccataaccctcatccctccagcccaagaagtggtggtggcttttctgctattgataatcccagaggtgccttaccaccctgtttggatcgtttagaaagaggcaacaagaaaagactgtgaactttataaaagacacttgcaatatactgtgtcaaaatgataattttgttatgttagcctctagaaaatttaagttcagaaaaatgcactatgaccggttcgtaatttttttaatgccacacataggttgtattgtaatggcattatcaaaatatttgatgatgtttcagatatattgcaaagtctgtattccagctcttaagaaaaatataagcatgttaaataccatatttacatattgataatgtcattggtatatggtggctgtttaccaataaaaggaaaaaattcattaaccggttgcttccaaaattagaagttttaagttgcatgaaaccattaatagccttgaaagctttgataagttttcagtaataataacctatttaatcagatgatgatgtgtttgaaaatagtgttcaatatcagcaaatttgtacacagggaatgtaaataaggataactgatcagagttatccactgtatttataaggaagagtcggaaaaaacaatgaccttagttttttttaagcctgatgatactatggtttactctaataagatagctatattgataattatatttttgttactgtgcccttgcacattttggtctttttgttaatatttttattaataacacataattagtaaccactctactgtttcaagttaatctagtaatagagcttacatatatttgtataactgctataccactgaactgaatttattttacaacagtgtagaattcttgaaaagttaacgtagaaaatatccaaaaagcagtatttctagaaagtgtccaaaaagcagtatttctttcccttggttgtgagagtaactaattatataaatattacctcaaaaatacatacactggtatcacacagtctttctacaatgtttctgtattctgaaagctaaatattaagtactatttttccattcaaatattcatttagaatttcctttagaagatggcagtgattataatattaatatgatttcatttgttccagtgtttagacatgaaatcatcttccttgtctcatgaaaacctaaatataaaaaaaaggaaaatactggagtttttatttctcttgtctttgttacatcctctgtttattataattttagcaccaacttcacacctagctaatttttttcatcataaagtggatgaaatgagcaagtacctaaaaattttatttcagataaaagtcaggagttactgctaaaaaacagacatgtaggagacattcaacaggagtatgaaatgagagttagaccatatgggctgacaacaccataaataacaagaaaagggagtgctgaaataggagagaacagagcaaatgttagctcaaagtatagacttagaaatatcaaagtaagagctatctggataaatatatagatattgagtgcttggaatcctagcctactatgtgaaaattaagtctaatgtcagaataacttacagaaaaatagaaaatgcacagctttaaaatgggcagagttaaaatctattcccagctttatcacttatttagccatgctagcctaggcctctatttccttgtctccaaaatgagaataataaaatttaggtcaggattactatataaactaagataatacagtgattctcaaagttgttcagactgtatagtaaggagaaagtctggttgcactttgaagagcttgaagatttgaaagattcccaaaaaagcattttaaagtttacatttaagggaccttggacctcaaccctctcaagtttacaagtctgaaactttagacatcaaaagtttgagcagtttttccaaggcaacattgatagttagattcagggccaggctgtaagtctagaatttagatatcctgatcccccagataccgctcttctggttatacacagaccagctataatttgctaaacataaaatattgcagtgtattagccagctgtggctccagagtctgtgccctttaccaccgtgcccaactgtttcacatgctgtgtttggtagtttttcctagtgctctccttaataatggtggtgtttagcaaattgtattacataaataaatatttatttcatggattgagttatgttgcatattaaattactttccttcccatgtcaataatgacttctttatgtcttaggctgtattataaattcaaacacaggaatgttattcttgcctttttccatcagaattacctaaagttttattagactttccccctacttgcaaatctgcctggaggttctggtctttaggaagtagcacttagcaagttcggataagcactccagaatttgggatgagttatccttgttgtttgtccagctctatcttggaccccagtgctgctaattagattcatgccttgttctttagggcataagttcctctcttggctatttttcctagtatgctgagaactaggattccctttcagtgacagagtcctgccctggaaccccaatcaagagcctaaagtttaactactctctgagatattagcctgatgccagcagcctgcctggatctctaaatattacccattctgggagttgttagtggtctctgctttcctgcagtgtcactcctgcttcctcattgggcctgctagccacagctacttggatgtacccgaacctgttgccttgccctacctactgtgggctggttcagttctgcattcccattccagtgtccactgccttcttgctatccctcccatctgtgcagccaccaccagcttat

SEQ ID NO: 339861 - DNA, 1697 bp, Homo sapiens
aacatttatttactattcccttttttattgttaccaggatagtacttttattaaattcctgatacgttgtcaatattgaaaaaactcaacaacttaaatgtacacgcacagtttgaaaagctggaaaatagtgaaagaatatccccatacccacctttcgtaccagtccccaaacatcacggtaaagtttactgtctcttcccagcccatggacgggaatggtaacgcctacggaatatgttgtgacatacagttgatcctaggttctccagaacaaaatgctgcacgaccacctcatcctggccctttattaaatatagcttaattctggacacaaacagttcccaccatgaagagagagtaggtgaccggaaaggagtgcgtcttaagcgcgttcgctgaatttgcaccacccaatccagccccgccgcccggcgccgctccttagacctggaccccggcaccctcccgccggggccgcacttagcagtggaaagtctgtcctcctgaagaagttgcgctccgacctccaagcatcaggtcaaaagtctaactcattctctgacctgccgccaattagaaaacaactgttgccaataaacgtggtcgcgccgcctgtgacctcagccgggacggacccgcgggcgggagcctgcggggcgtgaggcggggtggggccctggctcccctcccccgcccagccgcggcgtctgacgtcccgcgcgtcggcggccgcggagcagcgcagggagccaggcgggctgccggcgggtgtgaagaaaaaaatgacactccaatgggctgcagtggcaacctttctttatgccgaaataggactcattttaatcttctgcctaccttttattcctcctcagagatggcagaagattttttcatttaatgtctggggtaaaattgcaactttttggaacaaggctttccttaccattatcatcctattgattgttctatttctagatgctgtgagagaagtaaggaaatattcctcagttcataccattgagaagagctccaccagcagacctgatgcctatgaacacacacagatgaaactttttaggtctcaaagaaatctttacatttctggattttccctatttttttggctagttttgagacgtctggttacgcttattactcaactggcaaaagaactgtcaaacaaaggtgtacttaaaactcaagcagaaaatactaacaaggctgccaaaaaatttatggaagaaaacgaaaaactaaaaaggattttgaaaagccatggtaaagatgaagaatgtgttttggaagcagaaaataaaaaactagtagaagaccaggagaaactgaaaactgaattaaggaagacttcagatgccctttctaaggcacaaaatgatgtgatggaaatgaagatgcagtcagagagactttcgaaagaatatgatcaactcctgaaagaacactctgaacttcaggtttttgctaaactacttaactacctccttatgaggaagtggtgagccagcctccaactcctcccccagcatacagtgacttccagctacgcagcagcagcagctcctgcctccacagtgaggcctggcagatggcagtcccccagcgccaatcccaccaggggatccaagggaatcccttgtctgagcccagcagaagcatcacaagacccccaagcatcg

SEQ ID NO: 339862 - DNA, 589 bp, Homo sapiens
atggtgggtcatttaactaagtgttaggaagaaaacaatttaaagacactaattttacagtttgcgttctgtaaaaggatacttgctggataatctaagtgaattgatggattaggtcatttgggattgtgatatatattgttcttgctgacaagaaatgacccatgaatgtctagatctatcctgtccaatattgtagctacatgtggctatctaaatttaaatgtaatttaattaagccaggcataatggcacaagcctgtaattccggtgactcaggaggcttaggagggaagatggcttcaggccaggagtttgagaccagcctcggcaacatagtgagaccctgtctctgaaaaaaaatttttttaactagctaggcatggtggcatgcgcctgtagtcccagctattctgaaggctgaggtgggaggattgcttgagaccaggagttcaaggctgcagtgagccatgatcatgctactgccctccagcctgggcagcagagcaagacccctactctttaaaaaaattaatttaattagaaactccatttctcagttgcactaactacatttcaagtgttcagt

SEQ ID NO: 339863 - DNA, 880 bp, Homo sapiens
gacctcatctgctgagtgagctgcagggccgggatccaacaccaggtgctgaatgtggagaggcaaataaaatggacacacaagccttgacctcttggagtgattatgatcaagattatgatcattgtgacacacattaatccaggaagcaaacaagtgtgaaaacagagctgcagaggtgacacttggatgccccctggccaggtggtgactagaggtcagatctcttctctagttgagtggttgtccaggttcctgggctctttccgccctgacctacaggcctgacagagccgtcaaaacatgagagccctctttctaaacatctcacttcttggaaaaaatagaatgatctgtgagtctgtgagcatagctctgcttcatgctgcagatcttcaggttggctggggtggctgagtgtgtggctcagactgaaggaacagcagctacccaaggttagctcttctcctggtgaagcgtggaaagaacagacggggtctcactctttcgaccagagtggagtgcagtggcacgatcctggctcaccacaacctccgcgtcccaggctcaagcgattctcctgcctcagctcccgatagctgggattataggcacgcaccaccatgcccagctaatttttgtatttttagtaaagatggggtttcaccatattggccaggctggtcttgaattcctgacctcaaatgatccacctgcatcggacgcccaaagtgctgggattacagttatgagccaccgcccccggccaccaggaaaagtttttaaaggggcatgtgcccctttgcagttgttattaccttcttcctgccttacacgtagctggatggctagagttccaccaaccatgttatggacacga

SEQ ID NO: 339864 - DNA, 1114 bp, Homo sapiens
gagatttgagtaacgcatgtataaactaaggaacacaaaggatttccaggacctccaaaaaggaagtatggtgttgatgagcttgagtgagaaaaaaaatggatttgggttagaagacttgggatcttgcacttaccaggtgctgaatgtggagaggcaaataaaatggacacacaagccttgacctcttggagtgattatgatcaagattatgatcattgtgacacacattaatccaggaagcaaacaagtgtgaaaacagagctgcagaggtgacacttggatgccccctggccaggtggtgactagaggtcagatctcttctctagttgagtggttgtccaggttcctgggctctttccgccctgacctacaggcctgacagagccgtcaaaacatgagagccctctttctaaacatctcacttcttggaaaaaatagaatgggtggtgttctatactatcaacaacagtaattctcaaattgctgcatatcagaatcatgtggacagttttgaaatacctagtgtccagactgcaccccagacaaactaaatctagtgaggggccatctgaaactccccagatctgtgagtctgtgagcatagctctgcttcatgctgcagatcttcaggttggctggggtggctgagtgtgtggctcagactgaaggaacagcagctacccaaggttagctcttctcctggtgaagcgtggaaagaacagacggggtctcactctttcgaccagagtggagtgcagtggcacgatcctggctcaccacaacctccgcgtcccaggctcaagcgattctcctgcctcagctcccgatagctgggattataggcacgcaccaccatgcccagctaatttttgtatttttagtaaagatggggtttcaccatattggccaggctggtcttgaattcctgacctcaaatgatccacctgcatcggacgcccaaagtgctgggattacagttatgagccaccgcccccggccaccaggaaaagtttttaaaggggcatgtgcccctttgcagttgttattaccttcttcctgccttacacgtagctggatggctagagttccaccaaccatgttatggacacga

SEQ ID NO: 339865 - DNA, 754 bp, Homo sapiens
gtatggtaggagttggagctgaaaaagtaagcaagcatcagactgtgtccatcttacatgctctgctaagaaatgtagcttcactccacagaaaggtgctgagatgcccccaaagggatttaggcaggggagttgtatctgctaactattgcattagtaatgctgcacaataaatctccccaaaagtcggtagcttaaacaacagtcttgttttctcacacacagatctgtgagtctgtgagcatagctctgcttcatgctgcagatcttcaggttggctggggtggctgagtgtgtggctcagactgaaggaacagcagctacccaaggttagctcttctcctggtgaagcgtggaaagaacagacggggtctcactctttcgaccagagtggagtgcagtggcacgatcctggctcaccacaacctccgcgtcccaggctcaagcgattctcctgcctcagctcccgatagctgggattataggcacgcaccaccatgcccagctaatttttgtatttttagtaaagatggggtttcaccatattggccaggctggtcttgaattcctgacctcaaatgatccacctgcatcggacgcccaaagtgctgggattacagttatgagccaccgcccccggccaccaggaaaagtttttaaaggggcatgtgcccctttgcagttgttattaccttcttcctgccttacacgtagctggatggctagagttccaccaaccatgttatggacacga

SEQ ID NO: 339866 - DNA, 469 bp, Homo sapiens
agcggagcgctggggtgggagcgggcgagatgcgccgggcgggcggtgcccactgacctccctcggcggcccggcccgggcagcgcccgagcccaggcagccccgcccgccgcgccccgcccagcccatgggccacgggcccccaccgccgcccgccgggaggaccgagcctaagagggcagccgcctgaaggaacgcgacggcggcgcccgcagcacaggaagtttgcggagaggacgcttgaactgaataatccacgctggagctctcagatcactagatggaaagtcagaggtcaaacacccttacatggacgtgctgaagccatcaaaaaacaaaacagaaaaaaacctctaggaaatgatctaggaaaatggtaaatgccctcttaaaaatataagtttatcttttaaaaatattggtacttaggctgtgttattccaaataaataaatgttcaataacaaaaa

SEQ ID NO: 339867 - DNA, 400 bp, Homo sapiens
  misc_feature (353)..(354): n is a, c, g, or t
  misc_feature (356)..(358): n is a, c, g, or t
  misc_feature (361)..(364): n is a, c, g, or t
cgtcgactttttttttttagaaaataaagtttgttgggatcttaaacattttggataaaactaacaaaaaaatatgaacacacattcaggttgtggtgctatgaggagtagcgtcatcttatttagttccttgagatacacgcacggctactgatgttcacgatgccacacagtcacacacctaattcattctcaagtcggagcaacacataccaaccttgaccttatcctcaagctccagggcagcctggccgagcagcccctgctccctcctggagacccttgtcacctcccgagctcctcctggagacccctgtcacctcctgaccaacctttcccagggcggcaccgannannnagnnnngtcgacgcggccgcgaatttagtagtagtagtaggc

SEQ ID NO: 339868 - DNA, 1958 bp, Homo sapiens
  misc_feature (1958)..(1958): n is a, c, g, or t
agcggagcgctggggtgggagcgggcgagatgcgccgggcgggcggtgcccactgacctccctcggcggcccggcccgggcagcgcccgagcccaggcagccccgcccgccgcgccccgcccagcccatgggccacgggcccccaccgccgcccgccgggaggaccgagcctaagagggcagccgcctgaaggaacgcgacggcggcgcccgcagtatttttcagtgctgtacaagcgtcttgaattactctggtagcttttccagaaagacccatgacttcaccacatttctcgagttacgatgaaggtcctctggatgtcagcatggcagccacaaacctggagaaccagctgcacagcgcacagaagaacctcctgttccttcagcgggagcatgccagcacgctcaaggggctgcactccgagatcaggcggctgcagcagcactgcacagatttaacatatgagctgacagtcaaaagttcggaacagacaggagacgggacttctaaaagcagtgaattaaagaaaagatgtgaagagctggaagcccaactgaaagtgaaagagaacgaaaatgctgagttgttgaaagaactggagcagaaaaacgcgatgatcacagtgctggagaacaccatcaaggagcgagagaagaagtacctggaggagctgaaggccaagagtcacaagctgaccctgctgtctagcgagctggagcagcgggccagcaccatcgcctacctgacctcccagctgcacgccgccaagaagaagctcatgagctccagcgggacctcagatgccagcccgtcagggagccccgtgctggccagctacaagccagcgccccccaaagacaagctacccgaaacgcctcgccgccgcatgaaaaagagcctctcagcccccttgcacccggaatttgaagaggtctacagattcggggcagagagcaggaaactccttttgcgggaaccagtggatgctatgcccgaccccaccccatttctgctggctagggagtccgccgaggtccacctcatcaaagagaggcccctcgtcatcccccccatcgcctccgaccgaagcggcgagcagcacagcccggcccgcgaaaagccgcacaaggcccacgtcggggtggcacatcggatccaccacgccaccccgccgcaggcccagcccgaggtgaagaccctggcggtcgaccaggtgaacggaggcaaggtggtgaggaagcactcagggacggacagaactgtgtgaagcccgccgtgccccaccccgcgctgtccatgcactgtgagcaccactgggaaatctcagccacaccttttctgtttaatcccatgcatgccaaacacttttcacacctaccgacccattctccttctgcttctcttgccctcttcttcacaccaaaatatgatcgtgtccctgccgcagaatatgtatttcctaattgctgtggccaaacgcctgtgtgccgaatcgcttgcttctgatcccgctccgtgtaacctaagtgcgctgcaggcaaagcccaggccacggctgcgtcactactgatgttcacgatgccacacagtcacacacctaattcattctcaagtcggagcaacacataccaaccttgaccttatcctcaagctccagggcagcctggccgagcagcccctgctccctcctggagacccttgtcacctcccgagctcctcctggagacccctgtcacctcctgaccaacctttcccagggcggcaccgatcaccgagcagccgtgcgtgtatctcaaggaactaaataagatgacgctactcctcatagcaccacaacctgaatgtgtgttcatatttttttgttagttttatccaaaatgtttaagatcccaacaaactttattttctaaacctgcaaaaaaaattaaaaaattggattttaataaaaaaaattn

SEQ ID NO: 339869 - DNA, 2081 bp, Homo sapiens
  misc_feature (2081)..(2081): n is a, c, g, or t
ttgcaggtgcaccaggagcgccccggggcctagcccggctttgtctgggatgctgtggggaggaggccgtctgaatccacatcgcctttttaaatgcttgttaccacccggggaaccttagagaccctccctgacaagttgtatcgcctcccgtcctggtagcctttccccaacagaatcctggatttgagtctgtcctttgaaagcatctctgctagagttcccacttccaaacccctttcagctcttcgggattcagcctccaggttgccctcggagtggagtctgtggctttccaccggagcagcgcccaggaagtgttttcgtgtgatgaaagttatttttcagtgctgtacaagcgtcttgaattactctggtagcttttccagaaagacccatgacttcaccacatttctcgagttacgatgaaggtcctctggatgtcagcatggcagccacaaacctggagaaccagctgcacagcgcacagaagaacctcctgttccttcagcgggagcatgccagcacgctcaaggggctgcactccgagatcaggcggctgcagcagcactgcacagatttaacatatgagctgacagtcaaaagttcggaacagacaggagacgggacttctaaaagcagtgaattaaagaaaagatgtgaagagctggaagcccaactgaaagtgaaagagaacgaaaatgctgagttgttgaaagaactggagcagaaaaacgcgatgatcacagtgctggagaacaccatcaaggagcgagagaagaagtacctggaggagctgaaggccaagagtcacaagctgaccctgctgtctagcgagctggagcagcgggccagcaccatcgcctacctgacctcccagctgcacgccgccaagaagaagctcatgagctccagcgggacctcagatgccagcccgtcagggagccccgtgctggccagctacaagccagcgccccccaaagacaagctacccgaaacgcctcgccgccgcatgaaaaagagcctctcagcccccttgcacccggaatttgaagaggtctacagattcggggcagagagcaggaaactccttttgcgggaaccagtggatgctatgcccgaccccaccccatttctgctggctagggagtccgccgaggtccacctcatcaaagagaggcccctcgtcatcccccccatcgcctccgaccgaagcggcgagcagcacagcccggcccgcgaaaagccgcacaaggcccacgtcggggtggcacatcggatccaccacgccaccccgccgcaggcccagcccgaggtgaagaccctggcggtcgaccaggtgaacggaggcaaggtggtgaggaagcactcagggacggacagaactgtgtgaagcccgccgtgccccaccccgcgctgtccatgcactgtgagcaccactgggaaatctcagccacaccttttctgtttaatcccatgcatgccaaacacttttcacacctaccgacccattctccttctgcttctcttgccctcttcttcacaccaaaatatgatcgtgtccctgccgcagaatatgtatttcctaattgctgtggccaaacgcctgtgtgccgaatcgcttgcttctgatcccgctccgtgtaacctaagtgcgctgcaggcaaagcccaggccacggctgcgtcactactgatgttcacgatgccacacagtcacacacctaattcattctcaagtcggagcaacacataccaaccttgaccttatcctcaagctccagggcagcctggccgagcagcccctgctccctcctggagacccttgtcacctcccgagctcctcctggagacccctgtcacctcctgaccaacctttcccagggcggcaccgatcaccgagcagccgtgcgtgtatctcaaggaactaaataagatgacgctactcctcatagcaccacaacctgaatgtgtgttcatatttttttgttagttttatccaaaatgtttaagatcccaacaaactttattttctaaacctgcaaaaaaaattaaaaaattggattttaataaaaaaaattn

SEQ ID NO: 339870 - DNA, 1835 bp, Homo sapiens
  misc_feature (1835)..(1835): n is a, c, g, or t
aacgatttgcctgtgattcgtgaaacggagcagaatgcacaaacgcagcagagctccaggcttggctactgggctgccgtctgctacggcgatatttttcagtgctgtacaagcgtcttgaattactctggtagcttttccagaaagacccatgacttcaccacatttctcgagttacgatgaaggtcctctggatgtcagcatggcagccacaaacctggagaaccagctgcacagcgcacagaagaacctcctgttccttcagcgggagcatgccagcacgctcaaggggctgcactccgagatcaggcggctgcagcagcactgcacagatttaacatatgagctgacagtcaaaagttcggaacagacaggagacgggacttctaaaagcagtgaattaaagaaaagatgtgaagagctggaagcccaactgaaagtgaaagagaacgaaaatgctgagttgttgaaagaactggagcagaaaaacgcgatgatcacagtgctggagaacaccatcaaggagcgagagaagaagtacctggaggagctgaaggccaagagtcacaagctgaccctgctgtctagcgagctggagcagcgggccagcaccatcgcctacctgacctcccagctgcacgccgccaagaagaagctcatgagctccagcgggacctcagatgccagcccgtcagggagccccgtgctggccagctacaagccagcgccccccaaagacaagctacccgaaacgcctcgccgccgcatgaaaaagagcctctcagcccccttgcacccggaatttgaagaggtctacagattcggggcagagagcaggaaactccttttgcgggaaccagtggatgctatgcccgaccccaccccatttctgctggctagggagtccgccgaggtccacctcatcaaagagaggcccctcgtcatcccccccatcgcctccgaccgaagcggcgagcagcacagcccggcccgcgaaaagccgcacaaggcccacgtcggggtggcacatcggatccaccacgccaccccgccgcaggcccagcccgaggtgaagaccctggcggtcgaccaggtgaacggaggcaaggtggtgaggaagcactcagggacggacagaactgtgtgaagcccgccgtgccccaccccgcgctgtccatgcactgtgagcaccactgggaaatctcagccacaccttttctgtttaatcccatgcatgccaaacacttttcacacctaccgacccattctccttctgcttctcttgccctcttcttcacaccaaaatatgatcgtgtccctgccgcagaatatgtatttcctaattgctgtggccaaacgcctgtgtgccgaatcgcttgcttctgatcccgctccgtgtaacctaagtgcgctgcaggcaaagcccaggccacggctgcgtcactactgatgttcacgatgccacacagtcacacacctaattcattctcaagtcggagcaacacataccaaccttgaccttatcctcaagctccagggcagcctggccgagcagcccctgctccctcctggagacccttgtcacctcccgagctcctcctggagacccctgtcacctcctgaccaacctttcccagggcggcaccgatcaccgagcagccgtgcgtgtatctcaaggaactaaataagatgacgctactcctcatagcaccacaacctgaatgtgtgttcatatttttttgttagttttatccaaaatgtttaagatcccaacaaactttattttctaaacctgcaaaaaaaattaaaaaattggattttaataaaaaaaattn

SEQ ID NO: 339871 - DNA, 1865 bp, Homo sapiens
  misc_feature (1865)..(1865): n is a, c, g, or t
agcggagcgctggggtgggagcgggcgagatgcgccgggcgggcggtgcccactgacctccctcggcggcccggcccgggcagcgcccgagcccaggcagccccgcccgccgcgccccgcccagcccatgggccacgggcccccaccgccgcccgccgggaggaccgagcctaagagggcagccgcctgaaggaacgcgacggcggcgcccgcaggtcctctggatgtcagcatggcagccacaaacctggagaaccagctgcacagcgcacagaagaacctcctgttccttcagcgggagcatgccagcacgctcaaggggctgcactccgagatcaggcggctgcagcagcactgcacagatttaacatatgagctgacagtcaaaagttcggaacagacaggagacgggacttctaaaagcagtgaattaaagaaaagatgtgaagagctggaagcccaactgaaagtgaaagagaacgaaaatgctgagttgttgaaagaactggagcagaaaaacgcgatgatcacagtgctggagaacaccatcaaggagcgagagaagaagtacctggaggagctgaaggccaagagtcacaagctgaccctgctgtctagcgagctggagcagcgggccagcaccatcgcctacctgacctcccagctgcacgccgccaagaagaagctcatgagctccagcgggacctcagatgccagcccgtcagggagccccgtgctggccagctacaagccagcgccccccaaagacaagctacccgaaacgcctcgccgccgcatgaaaaagagcctctcagcccccttgcacccggaatttgaagaggtctacagattcggggcagagagcaggaaactccttttgcgggaaccagtggatgctatgcccgaccccaccccatttctgctggctagggagtccgccgaggtccacctcatcaaagagaggcccctcgtcatcccccccatcgcctccgaccgaagcggcgagcagcacagcccggcccgcgaaaagccgcacaaggcccacgtcggggtggcacatcggatccaccacgccaccccgccgcaggcccagcccgaggtgaagaccctggcggtcgaccaggtgaacggaggcaaggtggtgaggaagcactcagggacggacagaactgtgtgaagcccgccgtgccccaccccgcgctgtccatgcactgtgagcaccactgggaaatctcagccacaccttttctgtttaatcccatgcatgccaaacacttttcacacctaccgacccattctccttctgcttctcttgccctcttcttcacaccaaaatatgatcgtgtccctgccgcagaatatgtatttcctaattgctgtggccaaacgcctgtgtgccgaatcgcttgcttctgatcccgctccgtgtaacctaagtgcgctgcaggcaaagcccaggccacggctgcgtcactactgatgttcacgatgccacacagtcacacacctaattcattctcaagtcggagcaacacataccaaccttgaccttatcctcaagctccagggcagcctggccgagcagcccctgctccctcctggagacccttgtcacctcccgagctcctcctggagacccctgtcacctcctgaccaacctttcccagggcggcaccgatcaccgagcagccgtgcgtgtatctcaaggaactaaataagatgacgctactcctcatagcaccacaacctgaatgtgtgttcatatttttttgttagttttatccaaaatgtttaagatcccaacaaactttattttctaaacctgcaaaaaaaattaaaaaattggattttaataaaaaaaattn

SEQ ID NO: 339872 - DNA, 1377 bp, Homo sapiens
  misc_feature (1377)..(1377): n is a, c, g, or t
ggccaagagtcacaagctcctccaggtacttcttctctcgctccttgatggtgttctccatcaaggagcgagagaagaagtacctggaggagctgaaggccaagagtcacaagctgaccctgctgtctagcgagctggagcagcgggccagcaccatcgcctacctgacctcccagctgcacgccgccaagaagaagctcatgagctccagcgggacctcagatgccagcccgtcagggagccccgtgctggccagctacaagccagcgccccccaaagacaagctacccgaaacgcctcgccgccgcatgaaaaagagcctctcagcccccttgcacccggaatttgaagaggtctacagattcggggcagagagcaggaaactccttttgcgggaaccagtggatgctatgcccgaccccaccccatttctgctggctagggagtccgccgaggtccacctcatcaaagagaggcccctcgtcatcccccccatcgcctccgaccgaagcggcgagcagcacagcccggcccgcgaaaagccgcacaaggcccacgtcggggtggcacatcggatccaccacgccaccccgccgcaggcccagcccgaggtgaagaccctggcggtcgaccaggtgaacggaggcaaggtggtgaggaagcactcagggacggacagaactgtgtgaagcccgccgtgccccaccccgcgctgtccatgcactgtgagcaccactgggaaatctcagccacaccttttctgtttaatcccatgcatgccaaacacttttcacacctaccgacccattctccttctgcttctcttgccctcttcttcacaccaaaatatgatcgtgtccctgccgcagaatatgtatttcctaattgctgtggccaaacgcctgtgtgccgaatcgcttgcttctgatcccgctccgtgtaacctaagtgcgctgcaggcaaagcccaggccacggctgcgtcactactgatgttcacgatgccacacagtcacacacctaattcattctcaagtcggagcaacacataccaaccttgaccttatcctcaagctccagggcagcctggccgagcagcccctgctccctcctggagacccttgtcacctcccgagctcctcctggagacccctgtcacctcctgaccaacctttcccagggcggcaccgatcaccgagcagccgtgcgtgtatctcaaggaactaaataagatgacgctactcctcatagcaccacaacctgaatgtgtgttcatatttttttgttagttttatccaaaatgtttaagatcccaacaaactttattttctaaacctgcaaaaaaaattaaaaaattggattttaataaaaaaaattn

SEQ ID NO: 339873 - DNA, 1907 bp, Homo sapiens
  misc_feature (1907)..(1907): n is a, c, g, or t
agcggagcgctggggtgggagcgggcgagatgcgccgggcgggcggtgcccactgacctccctcggcggcccggcccgggcagcgcccgagcccaggcagccccgcccgccgcgccccgcccagcccatgggccacgggcccccaccgccgcccgccgggaggaccgagcctaagagggcagccgcctgaaggaacgcgacggcggcgcccgcagtatttttcagtgctgtacaagcgtcttgaattactctggtagcttttccagaaagacccatgacttcaccacatttctcgagttacgatgaaggtcctctggatgtcagcatggcagccacaaacctggagaaccagctgcacagcgcacagaagaacctcctgttccttcagcgggagcatgccagcacgctcaaggggctgcactccgagatcaggcggctgcagcagcactgcacagatttaacatatgagctgacagtcaaaagttcggaacagacaggagacgggacttctaaaagcagtgaattaaagaaaagatgtgaagagctggaagcccaactgaaagtgaaagagaacgaaaatgctgagttgttgaaagaactggagcagaaaaacgcgatgatcacagtgctggagaacaccatcaaggagcgagagaagaagtacctggaggagctgaaggccaagagtcacaagctgaccctgctgtctagcgagctggagcagcgggccagcaccatcgcctacctgacctcccagctgcacgccgccaagaagaagctcatgagctccagcgggacctcagatgccagcccgtcagggagccccgtgctggccagctacaagccagcgccccccaaagacaagctacccgaaacgcctcgccgccgcatgaaaaagagcctctcagcccccttgcacccggaatttgaagaggtctacagattcggggcagagagcaggaaactccttttgcgggaaccagtggatgctatgcccgaccccaccccatttctgctggctagggagtccgccgaggtccacctcatcaaagagaggcccctcgtcatcccccccatcgcctccgaccgaagcggcgagcagcacagcccggcccgcgaaaagccgcacaaggcccacgtcggggtggcacatcggatccaccacgccaccccgccgcaggcccagcccgaggtgaagaccctggcggtcgaccaggtgaacggaggcaaggtggtgaggaagcactcagggacggacagaactgtgtgaagcccgccgtgccccaccccctgtttaatcccatgcatgccaaacacttttcacacctaccgacccattctccttctgcttctcttgccctcttcttcacaccaaaatatgatcgtgtccctgccgcagaatatgtatttcctaattgctgtggccaaacgcctgtgtgccgaatcgcttgcttctgatcccgctccgtgtaacctaagtgcgctgcaggcaaagcccaggccacggctgcgtcactactgatgttcacgatgccacacagtcacacacctaattcattctcaagtcggagcaacacataccaaccttgaccttatcctcaagctccagggcagcctggccgagcagcccctgctccctcctggagacccttgtcacctcccgagctcctcctggagacccctgtcacctcctgaccaacctttcccagggcggcaccgatcaccgagcagccgtgcgtgtatctcaaggaactaaataagatgacgctactcctcatagcaccacaacctgaatgtgtgttcatatttttttgttagttttatccaaaatgtttaagatcccaacaaactttattttctaaacctgcaaaaaaaattaaaaaattggattttaataaaaaaaattn

SEQ ID NO: 339874 - DNA, 1904 bp, Homo sapiens
  misc_feature (1904)..(1904): n is a, c, g, or t
agcggagcgctggggtgggagcgggcgagatgcgccgggcgggcggtgcccactgacctccctcggcggcccggcccgggcagcgcccgagcccaggcagccccgcccgccgcgccccgcccagcccatgggccacgggcccccaccgccgcccgccgggaggaccgagcctaagagggcagccgcctgaaggaacgcgacggcggcgcccgcagtatttttcagtgctgtacaagcgtcttgaattactctggtagcttttccagaaagacccatgacttcaccacatttctcgagttacgatgaaggtcctctggatgtcagcatggcagccacaaacctggagaaccagctgcacagcgcacagaagaacctcctgttccttcagcgggagcatgccagcacgctcaaggggctgcactccgagatcaggcggctgcagcagcactgcacagatttaacatatgagctgacagtcaaaagttcggaacagacaggagacgggacttctaaaagcagtgaattaaagaaaagatgtgaagagctggaagcccaactgaaagtgaaagagaacgaaaatgctgagttgttgaaagaactggagcagaaaaacgcgatgatcacagtgctggagaacaccatcaaggagcgagagaagaagtacctggaggagctgaaggccaagagtcacaagctgaccctgctgtctagcgagctggagcagcgggccagcaccatcgcctacctgacctcccagctgcacgccgccaagaagaagctcatgagctccagcgggacctcagatgccagcccgtcagggagccccgtgctggccagctacaagccagcgccccccaaagacaagctacccgaaacgcctcgccgccgcatgaaaaagagcctctcagcccccttgcacccggaatttgaagaggtctacagattcggggcagagagcaggaaactccttttgcgggaaccagtggatgctatgcccgaccccaccccatttctgctggctagggagtccgccgaggtccacctcatcaaagagaggcccctcgtcatcccccccatcgcctccgaccgaagcggcgagcagcacagcccggcccgcgaaaagccgcacaaggcccacgtcggggtggcacatcggatccaccacgccaccccgccgcaggcccagcccgaggtgaagaccctggcggtcgaccaggtgaacggaggcaaggtggtgaggaagcactcagggacggacagaactgtgtgaagcccgccgtgccccaccccgcgctgtccatgcactgtgagcaccactgggaaatctcagccacaccttttctgtttaatcccatgcatgccaaacacttttcacacctaccgacccattctccttctgcttctcttgccctcttcttcacaccaaagcctgtgtgccgaatcgcttgcttctgatcccgctccgtgtaacctaagtgcgctgcaggcaaagcccaggccacggctgcgtcactactgatgttcacgatgccacacagtcacacacctaattcattctcaagtcggagcaacacataccaaccttgaccttatcctcaagctccagggcagcctggccgagcagcccctgctccctcctggagacccttgtcacctcccgagctcctcctggagacccctgtcacctcctgaccaacctttcccagggcggcaccgatcaccgagcagccgtgcgtgtatctcaaggaactaaataagatgacgctactcctcatagcaccacaacctgaatgtgtgttcatatttttttgttagttttatccaaaatgtttaagatcccaacaaactttattttctaaacctgcaaaaaaaattaaaaaattggattttaataaaaaaaattn

SEQ ID NO: 339875 - DNA, 1915 bp, Homo sapiens
  misc_feature (1905)..(1905): n is a, c, g, or t
  misc_feature (1907)..(1909): n is a, c, g, or t
agcggagcgctggggtgggagcgggcgagatgcgccgggcgggcggtgcccactgacctccctcggcggcccggcccgggcagcgcccgagcccaggcagccccgcccgccgcgccccgcccagcccatgggccacgggcccccaccgccgcccgccgggaggaccgagcctaagagggcagccgcctgaaggaacgcgacggcggcgcccgcagtatttttcagtgctgtacaagcgtcttgaattactctggtagcttttccagaaagacccatgacttcaccacatttctcgagttacgatgaaggtcctctggatgtcagcatggcagccacaaacctggagaaccagctgcacagcgcacagaagaacctcctgttccttcagcgggagcatgccagcacgctcaaggggctgcactccgagatcaggcggctgcagcagcactgcacagatttaacatatgagctgacagtcaaaagttcggaacagacaggagacgggacttctaaaagcagtgaattaaagaaaagatgtgaagagctggaagcccaactgaaagtgaaagagaacgaaaatgctgagttgttgaaagaactggagcagaaaaacgcgatgatcacagtgctggagaacaccatcaaggagcgagagaagaagtacctggaggagctgaaggccaagagtcacaagctgaccctgctgtctagcgagctggagcagcgggccagcaccatcgcctacctgacctcccagctgcacgccgccaagaagaagctcatgagctccagcgggacctcagatgccagcccgtcagggagccccgtgctggccagctacaagccagcgccccccaaagacaagctacccgaaacgcctcgccgccgcatgaaaaagagcctctcagcccccttgcacccggaatttgaagaggtctacagattcggggcagagagcaggaaactccttttgcgggaaccagtggatgctatgcccgaccccaccccatttctgctggctagggagtccgccgaggtccacctcatcaaagagaggcccctcgtcatcccccccatcgcctccgaccgaagcggcgagcagcacagcccggcccgcgaaaagccgcacaaggcccacgtcggggtggcacatcggatccaccacgccaccccgccgcaggcccagcccgaggtgaagaccctggcggtcgaccaggtgaacggaggcaaggtggtgaggaagcactcagggacggacagaactgtgtgaagcccgccgtgccccaccccgcgctgtccatgcactgtgagcaccactgggaaatctcagccacaccttttctgtttaatcccatgcatgccaaacacttttcacacctaccgacccattctccttctgcttctcttgccctcttcttcacaccaaaatatgatcgtgtccctgccgcagaatatgtatttcctaattgctgtggccaaacgcctgtgtgccgaatcgcttgcttctgatcccgctccgtgtaacctaagtgcgctgcaggcaaagcccaggccacggctgcgtcactactgatgttcacgatgccacacagtcacacacctaattcattctcaagtcggagcaacacataccaaccttgaccttatcctcaagctccagggcagcctggccgagcagcccctgctccctcctggagacccttgtcacctcccgagctcctcctggagacccctgtcacctcctgaccaacctttcccagggcggcaccgatcaccgagcagccgtgcgtgtatctcaaggaactaaataagatgacgctactcctcatagcaccacactgatttactcatagttttgtagtttatcacatacagcttaagtcccacacataataaaaaccgccncnnnctctcc

SEQ ID NO: 339876 - DNA, 402 bp, Homo sapiens
  misc_feature (402)..(402): n is a, c, g, or t
ttcagatggagaactccatgggcacactgcggacctccatctccgtggaacgccagattcacaaactgcaggactgggcagggagcagacagtgagcaaacgccagcagggctgctgtgaatttgtgtaaggattgagggacagttgcttttcagcatgggcccaggaatgccaaggagacatctcctgaccaacctttcccagggcggcaccgatcaccgagcagccgtgcgtgtatctcaaggaactaaataagatgacgctactcctcatagcaccacaacctgaatgtgtgttcatatttttttgttagttttatccaaaatgtttaagatcccaacaaactttattttctaaacctgcaaaaaaaattaaaaaattggattttaataaaaaaaattn

SEQ ID NO: 339877 - DNA, 582 bp, Homo sapiens
  misc_feature (582)..(582): n is a, c, g, or t
cagcacagagacggtttcggggacagaaacatcctttctcactcctgccggaatgctgctcacggctccactgaggaaagccctgcttgatggaaactcaactctgccatcatctgcagcccagtgcgacggcagtcaaaggccagggagagctatgctttgttttatagaaacatgcctagaaatggtcgccttaagttatttaacccactccctattgtcgggttttgagtttgtttctagtcttttccaactgcaaactgcactgtagtgaccattctcacagctacctcttttcacacaaaagtaataatttccctttggtagatttctaaaaataaattgctagttcagagagatgaccaattccaaggcttctgatcagctctgcccgatcaccgagcagccgtgcgtgtatctcaaggaactaaataagatgacgctactcctcatagcaccacaacctgaatgtgtgttcatatttttttgttagttttatccaaaatgtttaagatcccaacaaactttattttctaaacctgcaaaaaaaattaaaaaattggattttaataaaaaaaattn

SEQ ID NO: 339878 - DNA, 460 bp, Homo sapiens
acagacattcttaatggatagctgttttgtgggaagcttttcccttcccctggaacttaatgcgtgatttcccagagagctgaaacatacgattctgggaattctcttgttccctgacataataaagagtgattgtgagtgggaagaactttatgggggtcagtcataaatgccgtcagtaagcgtgcctcacctattctacgcagcacaggaagtttgcggagaggacgcttgaactgaataatccacgctggagctctcagatcactagatggaaagtcagaggtcaaacacccttacatggacgtgctgaagccatcaaaaaacaaaacagaaaaaaacctctaggaaatgatctaggaaaatggtaaatgccctcttaaaaatataagtttatcttttaaaaatattggtacttaggctgtgttattccaaataaataaatgttcaataacaaaaa

SEQ ID NO: 339879 - DNA, 2275 bp, Homo sapiens
agcggagcgctggggtgggagcgggcgagatgcgccgggcgggcggtgcccactgacctccctcggcggcccggcccgggcagcgcccgagcccaggcagccccgcccgccgcgccccgcccagcccatgggccacgggcccccaccgccgcccgccgggaggaccgagcctaagagggcagccgcctgaaggaacgcgacggcggcgcccgcagtatttttcagtgctgtacaagcgtcttgaattactctggtagcttttccagaaagacccatgacttcaccacatttctcgagttacgatgaaggtcctctggatgtcagcatggcagccacaaacctggagaaccagctgcacagcgcacagaagaacctcctgttccttcagcgggagcatgccagcacgctcaaggggctgcactccgagatcaggcggctgcagcagcactgcacagatttaacatatgagctgacagtcaaaagttcggaacagacaggagacgggacttctaaaagcagtgaattaaagaaaagatgtgaagagctggaagcccaactgaaagtgaaagagaacgaaaatgctgagttgttgaaagaactggagcagaaaaacgcgatgatcacagtgctggagaacaccatcaaggagcgagagaagaagtacctggaggagctgaaggccaagagtcacaagctgaccctgctgtctagcgagctggagcagcgggccagcaccatcgcctacctgacctcccagctgcacgccgccaagaagaagctcatgagctccagcgggacctcagatgccagcccgtcagggagccccgtgctggccagctacaagccagcgccccccaaagacaagctacccgaaacgcctcgccgccgcatgaaaaagagcctctcagcccccttgcacccggaatttgaagaggtctacagattcggggcagagagcaggaaactccttttgcgggaaccagtggatgctatgcccgaccccaccccatttctgctggctagggagtccgccgaggtccacctcatcaaagagaggcccctcgtcatcccccccatcgcctccgaccgaagcggcgagcagcacagcccggcccgcgaaaagccgcacaaggcccacgtcggggtggcacatcggatccaccacgccaccccgccgcaggcccagcccgaggtgaagaccctggcggtcgaccaggtgaacggaggcaaggtggtgaggaagcactcagggacggacagaactgtgtgaagcccgccgtgccccaccccgcgctgtccatgcactgtgagcaccactgggaaatctcagccacaccttttctgtttaatcccatgcatgccaaacacttttcacacctaccgacccattctccttctgcttctcttgccctcttcttcacaccaaaatatgatcgtgtccctgccgcagaatatgtatttcctaattgctgtggccaaacgcctgtgtgccgaatcgcttgcttctgatcccgctccgtgtaacctaagtgcgctgcaggcaaagcccaggccacggctgcgtcactactgatgttcacgatgccacacagtcacacacctaattcattctcaagtcggagcaacacataccaaccttgaccttatcctcaagctccagggcagcctggccgagcagcccctgctccctcctggagacccttgtcacctcccgagctcctcctggagacccctgtcacctcctgaccaacctttcccagggcggcaccgatcaccgagcagccgtgcgtgtatctcaaggaactaaataagatgacgctactcctcatagcaccacaacctgaatgtgtgttcatatttttttgttagttttatccaaaatgtttaagatcccaacaaactttattttctaaacctgcaaaaaaaaaaaaaaaacaaaaaaaaaaaaaaaaacaaaaacaaaacaacgaaaaaaccgaacagaacaacaaacgagaggcgtgagcacacgcacggacagcggaaacgagggaaagtagggcgagtgcgagagagagctcaagccggtaggtagaagcgagagatcgggagatggacgtgatgagcgatggacgagtgggcaggacgagagcgggagcgagagagagacgggtgggcaggtcgcgggtgcggggtcggacggatgacgcgacggagcggacgtcagaggaacgagatgggagctggaagagatggagtggatgggggcgacgagagggaggctgggttggcagcc

SEQ ID NO: 339880 - DNA, 2206 bp, Homo sapiens
  misc_feature (2206)..(2206): n is a, c, g, or t
ttgcaggtgcaccaggagcgccccggggcctagcccggctttgtctgggatgctgtggggaggaggccgtctgaatccacatcgcctttttaaatgcttgttaccacccggggaaccttagagaccctccctgacaagttgtatcgcctcccgtcctggtagcctttccccaacagaatcctggatttgagtctgtcctttgaaagcatctctgctagagttcccacttccaaacccctttcagctcttcgggattcagcctccaggttgccctcggagtggagtctgtggctttccaccggagcagcgcccaggaagtgttttcgtgtgatgaaagttatttttcagtgctgtacaagcgtcttgaattactctggtagcttttccagaaagacccatgacttcaccacatttctcgagttacgatgaaggagccgtggtttccttctgctctctcctgggaggcgcacacccctctgcacccagagccaaggagggcaggcagccctgggaccctcttcaggcaccgcagccagggtctgtgttacccacaggtgtcctctggatgtcagcatggcagccacaaacctggagaaccagctgcacagcgcacagaagaacctcctgttccttcagcgggagcatgccagcacgctcaaggggctgcactccgagatcaggcggctgcagcagcactgcacagatttaacatatgagctgacagtcaaaagttcggaacagacaggagacgggacttctaaaagcagtgaattaaagaaaagatgtgaagagctggaagcccaactgaaagtgaaagagaacgaaaatgctgagttgttgaaagaactggagcagaaaaacgcgatgatcacagtgctggagaacaccatcaaggagcgagagaagaagtacctggaggagctgaaggccaagagtcacaagctgaccctgctgtctagcgagctggagcagcgggccagcaccatcgcctacctgacctcccagctgcacgccgccaagaagaagctcatgagctccagcgggacctcagatgccagcccgtcagggagccccgtgctggccagctacaagccagcgccccccaaagacaagctacccgaaacgcctcgccgccgcatgaaaaagagcctctcagcccccttgcacccggaatttgaagaggtctacagattcggggcagagagcaggaaactccttttgcgggaaccagtggatgctatgcccgaccccaccccatttctgctggctagggagtccgccgaggtccacctcatcaaagagaggcccctcgtcatcccccccatcgcctccgaccgaagcggcgagcagcacagcccggcccgcgaaaagccgcacaaggcccacgtcggggtggcacatcggatccaccacgccaccccgccgcaggcccagcccgaggtgaagaccctggcggtcgaccaggtgaacggaggcaaggtggtgaggaagcactcagggacggacagaactgtgtgaagcccgccgtgccccaccccgcgctgtccatgcactgtgagcaccactgggaaatctcagccacaccttttctgtttaatcccatgcatgccaaacacttttcacacctaccgacccattctccttctgcttctcttgccctcttcttcacaccaaaatatgatcgtgtccctgccgcagaatatgtatttcctaattgctgtggccaaacgcctgtgtgccgaatcgcttgcttctgatcccgctccgtgtaacctaagtgcgctgcaggcaaagcccaggccacggctgcgtcactactgatgttcacgatgccacacagtcacacacctaattcattctcaagtcggagcaacacataccaaccttgaccttatcctcaagctccagggcagcctggccgagcagcccctgctccctcctggagacccttgtcacctcccgagctcctcctggagacccctgtcacctcctgaccaacctttcccagggcggcaccgatcaccgagcagccgtgcgtgtatctcaaggaactaaataagatgacgctactcctcatagcaccacaacctgaatgtgtgttcatatttttttgttagttttatccaaaatgtttaagatcccaacaaactttattttctaaacctgcaaaaaaaattaaaaaattggattttaataaaaaaaattn

SEQ ID NO: 339881 - DNA, 1913 bp, Homo sapiens
  misc_feature (1866)..(1867): n is a, c, g, or t
  misc_feature (1869)..(1871): n is a, c, g, or t
  misc_feature (1874)..(1877): n is a, c, g, or t
agcggagcgctggggtgggagcgggcgagatgcgccgggcgggcggtgcccactgacctccctcggcggcccggcccgggcagcgcccgagcccaggcagccccgcccgccgcgccccgcccagcccatgggccacgggcccccaccgccgcccgccgggaggaccgagcctaagagggcagccgcctgaaggaacgcgacggcggcgcccgcagtatttttcagtgctgtacaagcgtcttgaattactctggtagcttttccagaaagacccatgacttcaccacatttctcgagttacgatgaaggtcctctggatgtcagcatggcagccacaaacctggagaaccagctgcacagcgcacagaagaacctcctgttccttcagcgggagcatgccagcacgctcaaggggctgcactccgagatcaggcggctgcagcagcactgcacagatttaacatatgagctgacagtcaaaagttcggaacagacaggagacgggacttctaaaagcagtgaattaaagaaaagatgtgaagagctggaagcccaactgaaagtgaaagagaacgaaaatgctgagttgttgaaagaactggagcagaaaaacgcgatgatcacagtgctggagaacaccatcaaggagcgagagaagaagtacctggaggagctgaaggccaagagtcacaagctgaccctgctgtctagcgagctggagcagcgggccagcaccatcgcctacctgacctcccagctgcacgccgccaagaagaagctcatgagctccagcgggacctcagatgccagcccgtcagggagccccgtgctggccagctacaagccagcgccccccaaagacaagctacccgaaacgcctcgccgccgcatgaaaaagagcctctcagcccccttgcacccggaatttgaagaggtctacagattcggggcagagagcaggaaactccttttgcgggaaccagtggatgctatgcccgaccccaccccatttctgctggctagggagtccgccgaggtccacctcatcaaagagaggcccctcgtcatcccccccatcgcctccgaccgaagcggcgagcagcacagcccggcccgcgaaaagccgcacaaggcccacgtcggggtggcacatcggatccaccacgccaccccgccgcaggcccagcccgaggtgaagaccctggcggtcgaccaggtgaacggaggcaaggtggtgaggaagcactcagggacggacagaactgtgtgaagcccgccgtgccccaccccgcgctgtccatgcactgtgagcaccactgggaaatctcagccacaccttttctgtttaatcccatgcatgccaaacacttttcacacctaccgacccattctccttctgcttctcttgccctcttcttcacaccaaaatatgatcgtgtccctgccgcagaatatgtatttcctaattgctgtggccaaacgcctgtgtgccgaatcgcttgcttctgatcccgctccgtgtaacctaagtgcgctgcaggcaaagcccaggccacggctgcgtcactactgatgttcacgatgccacacagtcacacacctaattcattctcaagtcggagcaacacataccaaccttgaccttatcctcaagctccagggcagcctggccgagcagcccctgctccctcctggagacccttgtcacctcccgagctcctcctggagacccctgtcacctcctgaccaacctttcccagggcggcaccgatcaccgagcagccgtgcgtgtatctcaaggaactaaataagatgacgctactcctcatagcaccacaacctgaatgtgtgttcatattttttgannannnagnnnngtcgacgcggccgcgaatttagtagtagtagtaggc

SEQ ID NO: 339882 - DNA, 237 bp, Homo sapiens
atggaaattgaaatatttgagatgagactgaatgatctctaaatcctaaaagagaaaactagagaaacattaaagatgaaagaataaaatattctgttatagaaagctgtaaccaaaacggatcacattagaacttacctcaagaaaaaggtgcattaacagaatagttgtattgtcacccaaaaattacctggtccgctccctgcctgggaggtcaaggtaagatggactcaattc

SEQ ID NO: 339883 - DNA, 456 bp, Homo sapiens
atcctgagccgggcgtggaaaagctctttgcagatggcgcttccatctctgcgcccctcggggtgggggctgtcccatgttgctcctgctggggcctctcaggcttcctctttgcccacccaaaaggaaaaatccactgcacctccacttggtgactgacgccgtggccagaaacatcctggagacgctcttccacacatggatggtgcctgctgtccgtgtcagcttttatcatgccgaccagctcaaggcaggggcccagcccttcccccctcccctcagctgtgtccaccgctctcctctctccaagacctggtggggttggagaagagaatcatcagtcccccctccacctactgaagcgcaaacccctctcttttgggggtttaccccctctcctctgtgtcactgcaagcatgtgttctggtgctcataggcccctctctgccatctcca

SEQ ID NO: 339884 - DNA, 2845 bp, Homo sapiens
  misc_feature (2553)..(2553): n is a, c, g, or t
ggcggctgcgagcgcagggcccagcccgggagccgctggagcagggcctgcgatggagcctgcagccccgggtcgcgtccctccctgagcgcccccgtcggcggccatgctgccccgagggcgcccccgggcgctgggggccgccgcgctgttgctgctgctgctgctgctcggattcctcctgttcggtggggacctggggtgtgagcgccgcgagcctggcgggcgagcgggggccccgggatgcttccccggcccgctcatgccacgtgtccccccagacgggaggctgcggagagccgccgccctcgacggagacccgggggccggccccggggaccacaaccgctccgactgcggcccgcagccgccgccgccgcccaagtgcgagctcttgcatgtggccatcgtgtgtgcggggcataactccagccgagacgtcatcaccctggtgaagtccatgctcttctacaggaaaaatccactgcacctccacttggtgactgacgccgtggccagaaacatcctggagacgctcttccacacatggatggtgcctgctgtccgtgtcagcttttatcatgccgaccagctcaagccccaggtctcctggatccccaacaagcactactccggcctctatgggctaatgaagctggtgctgcccagtgccttgcctgctgagctggcccgcgtcattgtcctggacacggatgtcaccttcgcctctgacatctcggagctctgggccctctttgctcacttttctgacacgcaggcgatcggtcttgtggagaaccagagtgactggtacctgggcaacctctggaagaaccacaggccctggcctgccttgggccggggatttaacacaggtgtgatcctgctgcggctggaccggctccggcaggctggctgggagcagatgtggaggctgacagccaggcgggagctccttagcctgcctgccacctcactggctgaccaggacatcttcaacgctgtgatcaaggagcacccggggctagtgcagcgtctgccttgtgtctggaatgtgcagctgtcagatcacacactggccgagcgctgctactctgaggcgtctgacctcaaggtgatccactggaactcaccaaagaagcttcgggtgaagaacaagcatgtggaattcttccgcaatttctacctgaccttcctggagtacgatgggaacctgctgcggagagagctctttgtgtgccccagccagcccccacctggtgctgagcagttgcagcaggccctggcacaactggacgaggaagacccctgctttgagttccggcagcagcagctcactgtgcaccgtgtgcatgtcactttcctgccccatgaaccgccacccccccggcctcacgatgtcacccttgtggcccagctgtccatggaccggctgcagatgttggaagccctgtgcaggcactggcctggccccatgagcctggccttgtacctgacagacgcagaagctcagcagttcctgcatttcgtcgaggcctcaccagtgcttgctgcccggcaggacgtggcctaccatgtggtgtaccgtgaggggcccctataccccgtcaaccagcttcgcaacgtggccttggcccaggccctcacgccttacgtcttcctcagtgacattgacttcctgcctgcctattctctctacgactacctcagggcctccattgagcagctggggctgggcagccggcgcaaggcagcactggtggtgccggcattcgagaccctgcgctaccgcttcagcttcccccattccaaggtggagctgttggccttgctggatgcgggcactctctacaccttcaggtaccacgagtggccccgaggccacgcacccacagactatgcccgctggcgggaggctcaggccccgtaccgtgtgcaatgggcggccaactatgaaccctacgtggtggtgccacgagactgtccccgctatgatcctcgctttgtgggcttcggctggaacaaagtggcccacattgtggagctggatgcccaggaatatgagctcctggtgctgcccgaggccttcaccatccatctgccccacgctccaagcctggacatctcccgcttccgctccagccccacctatcgtgactgcctccaggccctcaaggacgaattccaccaggacttgtcccgccaccatggggctgctgccctcaaatacctcccagccctgcagcagccccagagccctgcccgaggctgaggctgggccggcgctgcccctcatcttagcattgggcagacaccagggcaacctgccctccgccatccctgctatttaaattatttaaggtctctgggaagggctggggcagagcatctgtggggtggggtcttccccttgctgctattgtatggctggggactggtctctctctgccccagccagtttggggctggttcccccatcttgaattgtttatccctttttcataattaaagttttaaaacatcaaaaaaaaaaaaaaaaaaaaaaaaaaaaanaaaaaaaaaaaacaaaaaaaaaaccaacaaaaaaaaaggaagacacagccaccaccgaacagaagcacagaagcggaacaaaagaacgcacgccacgcaacagcaccagacgttcgggcaaaatcaaagcgcacacgaacggcgaagcaaaacaaaacacacaagccaagagagagaacaaaaaaagccaaaccagccgcgacggaacggcaaagaagaaaacgcgggcaggcacgagcagcacccccgaggacccgcggagaacacacacaaaccgcacggagccaagcgc

SEQ ID NO: 339885 - DNA, 2915 bp, Homo sapiens
  misc_feature (2623)..(2623): n is a, c, g, or t
ggcggctgcgagcgcagggcccagcccgggagccgctggagcagggcctgcgatggagcctgcagccccgggtcgcgtccctccctgagcgcccccgtcggcggccatgctgccccgagggcgcccccgggcgctgggggccgccgcgctgttgctgctgctgctgctgctcggattcctcctgttcggtggggacctggggtgtgagcgccgcgagcctggcgggcgagcgggggccccgggatgcttccccggcccgctcatgccacgtgtccccccagacgggaggctgcggagagccgccgccctcgacggagacccgggggccggccccggggaccacaaccgctccgactgcggcccgcagccgccgccgccgcccaagtgcgagctcttgcatgtggccatcgtgtgtgcggggcataactccagccgagacgtcatcaccctggtgaagtccatgctcttctacaggaaaaatccactgcacctccacttggtgactgacgccgtggccagaaacatcctggagacgctcttccacacatggatggtgcctgctgtccgtgtcagcttttatcatgccgaccagctcaagccccaggtctcctggatccccaacaagcactactccggcctctatgggctaatgaagctggtgctgcccagtgccttgcctgctgagctggcccgcgtcattgtcctggacacggatgtcaccttcgcctctgacatctcggagctctgggccctctttgctcacttttctgacacgcaggcgatcggtcttgtggagaaccagagtgactggtacctgggcaacctctggaagaaccacaggccctggcctgccttgggccggggatttaacacaggtgtgatcctgctgcggctggaccggctccggcaggctggctgggagcagatgtggaggctgacagccaggcgggagctccttagcctgcctgccacctcactggctgaccaggtctgaggaagccttgccgggtggggtgtggcaggctgggggctgggatgtgatgggtgtctctgctcaggacatcttcaacgctgtgatcaaggagcacccggggctagtgcagcgtctgccttgtgtctggaatgtgcagctgtcagatcacacactggccgagcgctgctactctgaggcgtctgacctcaaggtgatccactggaactcaccaaagaagcttcgggtgaagaacaagcatgtggaattcttccgcaatttctacctgaccttcctggagtacgatgggaacctgctgcggagagagctctttgtgtgccccagccagcccccacctggtgctgagcagttgcagcaggccctggcacaactggacgaggaagacccctgctttgagttccggcagcagcagctcactgtgcaccgtgtgcatgtcactttcctgccccatgaaccgccacccccccggcctcacgatgtcacccttgtggcccagctgtccatggaccggctgcagatgttggaagccctgtgcaggcactggcctggccccatgagcctggccttgtacctgacagacgcagaagctcagcagttcctgcatttcgtcgaggcctcaccagtgcttgctgcccggcaggacgtggcctaccatgtggtgtaccgtgaggggcccctataccccgtcaaccagcttcgcaacgtggccttggcccaggccctcacgccttacgtcttcctcagtgacattgacttcctgcctgcctattctctctacgactacctcagggcctccattgagcagctggggctgggcagccggcgcaaggcagcactggtggtgccggcattcgagaccctgcgctaccgcttcagcttcccccattccaaggtggagctgttggccttgctggatgcgggcactctctacaccttcaggtaccacgagtggccccgaggccacgcacccacagactatgcccgctggcgggaggctcaggccccgtaccgtgtgcaatgggcggccaactatgaaccctacgtggtggtgccacgagactgtccccgctatgatcctcgctttgtgggcttcggctggaacaaagtggcccacattgtggagctggatgcccaggaatatgagctcctggtgctgcccgaggccttcaccatccatctgccccacgctccaagcctggacatctcccgcttccgctccagccccacctatcgtgactgcctccaggccctcaaggacgaattccaccaggacttgtcccgccaccatggggctgctgccctcaaatacctcccagccctgcagcagccccagagccctgcccgaggctgaggctgggccggcgctgcccctcatcttagcattgggcagacaccagggcaacctgccctccgccatccctgctatttaaattatttaaggtctctgggaagggctggggcagagcatctgtggggtggggtcttccccttgctgctattgtatggctggggactggtctctctctgccccagccagtttggggctggttcccccatcttgaattgtttatccctttttcataattaaagttttaaaacatcaaaaaaaaaaaaaaaaaaaaaaaaaaaaanaaaaaaaaaaaacaaaaaaaaaaccaacaaaaaaaaaggaagacacagccaccaccgaacagaagcacagaagcggaacaaaagaacgcacgccacgcaacagcaccagacgttcgggcaaaatcaaagcgcacacgaacggcgaagcaaaacaaaacacacaagccaagagagagaacaaaaaaagccaaaccagccgcgacggaacggcaaagaagaaaacgcgggcaggcacgagcagcacccccgaggacccgcggagaacacacacaaaccgcacggagccaagcgc

SEQ ID NO: 339886 - DNA, 2761 bp, Homo sapiens
  misc_feature (2469)..(2469): n is a, c, g, or t
ggcggctgcgagcgcagggcccagcccgggagccgctggagcagggcctgcgatggagcctgcagccccgggtcgcgtccctccctgagcgcccccgtcggcggccatgctgccccgagggcgcccccgggcgctgggggccgccgcgctgttgctgctgctgctgctgctcggattcctcctgttcggtggggacctggggtgtgagcgccgcgagcctggcgggcgagcgggggccccgggatgcttccccggcccgctcatgccacgtgtccccccagacgggaggctgcggagagccgccgccctcgacggagacccgggggccggccccggggaccacaaccgctccgactgcggcccgcagccgccgccgccgcccaagtgcgagctcttgcatgtggccatcgtgtgtgcggggcataactccagccgagacgtcatcaccctggtgaagtccatgctcttctacaggaaaaatccactgcacctccacttggtgactgacgccgtggccagaaacatcctggagacgctcttccacacatggatggtgcctgctgtccgtgtcagcttttatcatgccgaccagctcaagccccaggtctcctggatccccaacaagcactactccggcctctatgggctaatgaagctggtgctgcccagtgccttgcctgctgagctggcccgcgtcattgtcctggacacggatgtcaccttcgcctctgacatctcggagctctgggccctctttgctcacttttctgacacgcaggcgatcggtcttgtggagaaccagagtgactggtacctgggcaacctctggaagaaccacaggccctggcctgccttgggccggggatttaacacaggtgtgatcctgctgcggctggaccggctccggcaggctggctgggagcagatgtggaggctgacagccaggcgggagctccttagcctgcctgccacctcactggctgaccaggacatcttcaacgctgtgatcaaggagcacccggggctagtgcagcgtctgccttgtgtctggaatgtgcagctgtcagatcacacactggccgagcgctgctactctgaggcgtctgacctcaaggtgatccactggaactcaccaaagaagcttcgggtgaagaacaagcatgtggaattcttccgcaatttctacctgaccttcctggagtacgatgggaacctgctgcggagagagctctttgtgtgccccagccagcccccacctggtgctgagcagttgcagcaggccctggcacaactggacgaggaagacccctgctttgagttccggcagcagcagctcactgtgcaccgtgtgcatgtcactttcctgccccatgaaccgccacccccccggcctcacgatgtcacccttgtggcccagctgtccatggaccggctgcagatgttggaagccctgtgcaggcactggcctggccccatgagcctggccttgtacctgacagacgcagaagctcagcagttcctgcatttcgtcgaggcctcaccagtgcttgctgcccggcaggacgtggcctaccatgtggtgtaccgtgaggggcccctataccccgtcaaccagcttcgcaacgtggccttggcccaggccctcacgccttacgtcttcctcagtgacattgacttcctgcctgcctattctctctacgactacctcagggcctccattgagcagctggggctgggcagccggcgcaaggcagcactggtggtgccggcattcgagaccctgcgctaccgcttcagcttcccccattccaaggtggagctgttggccttgctggatgcgggcactctctacaccttcaggtaccacgagtggccccgaggccacgcacccacagactatgcccgctggcgggaggctcaggccccgtaccgtgtgcaatgggcggccaactatgaaccctacgtggtggtgccacgagactgtccccgctatgatcctcgctttgtgggcttcggctggaacaaagtggcccacattgtggagctggatgcccaggaatatgagctcctggtgctgcccgaggccttcaccatccatctgccccacgctccaagcctggacatctcccgtgctgccctcaaatacctcccagccctgcagcagccccagagccctgcccgaggctgaggctgggccggcgctgcccctcatcttagcattgggcagacaccagggcaacctgccctccgccatccctgctatttaaattatttaaggtctctgggaagggctggggcagagcatctgtggggtggggtcttccccttgctgctattgtatggctggggactggtctctctctgccccagccagtttggggctggttcccccatcttgaattgtttatccctttttcataattaaagttttaaaacatcaaaaaaaaaaaaaaaaaaaaaaaaaaaaanaaaaaaaaaaaacaaaaaaaaaaccaacaaaaaaaaaggaagacacagccaccaccgaacagaagcacagaagcggaacaaaagaacgcacgccacgcaacagcaccagacgttcgggcaaaatcaaagcgcacacgaacggcgaagcaaaacaaaacacacaagccaagagagagaacaaaaaaagccaaaccagccgcgacggaacggcaaagaagaaaacgcgggcaggcacgagcagcacccccgaggacccgcggagaacacacacaaaccgcacggagccaagcgc

SEQ ID NO: 339887 - DNA, 1712 bp, Homo sapiens
ggcggctgcgagcgcagggcccagcccgggagccgctggagcagggcctgcgatggagcctgcagccccgggtcgcgtccctccctgagcgcccccgtcggcggccatgctgccccgagggcgcccccgggcgctgggggccgccgcgctgttgctgctgctgctgctgctcggattcctcctgttcggtggggacctggggtgtgagcgccgcgagcctggcgggcgagcgggggccccgggatgcttccccggcccgctcatgccacgtgtccccccagacgggaggctgcggagagccgccgccctcgacggagacccgggggccggccccggggaccacaaccgctccgactgcggcccgcagccgccgccgccgcccaagtgcgagctcttgcatgtggccatcgtgtgtgcggggcataactccagccgagacgtcatcaccctggtgaagtccatgctcttctacaggaaaaatccactgcacctccacttggtgactgacgccgtggccagaaacatcctggagacgctcttccacacatggatggtgcctgctgtccgtgtcagcttttatcatgccgaccagctcaagccccaggtctcctggatccccaacaagcactactccggcctctatgggctaatgaagctggtgctgcccagtgccttgcctgctgagctggcccgcgtcattgtcctggacacggatgtcaccttcgcctctgacatctcggagctctgggccctctttgctcacttttctgacacgcaggcgatcggtcttgtggagaaccagagtgactggtacctgggcaacctctggaagaaccacaggccctggcctgccttgggccggggatttaacacaggtgtgatcctgctgcggctggaccggctccggcaggctggctgggagcagatgtggaggctgacagccaggcgggagctccttagcctgcctgccacctcactggctgaccaggacatcttcaacgctgtgatcaaggagcacccggggctagtgcagcgtctgccttgtgtctggaatgtgcagctgtcagatcacacactggccgagcgctgctactctgaggcgtctgacctcaaggtgatccactggaactcaccaaagaagcttcgggtgaagaacaagcatgtggaattcttccgcaatttctacctgaccttcctggagtacgatgggaacctgctgcggagagagctctttgtgtgccccagccagcccccacctggtgctgagcagttgcagcaggccctggcacaactggacgaggaagacccctgctttgagttccggcagcagcagctcactgtgcaccgtgtgcatgtcactttcctgccccatgaaccgccacccccccggcctcacgatgtcacccttgtggcccagctgtccatggaccggctgcagatgttggaagccctgtgcaggcactggcctggccccatgagcctggccttgtacctgacagacgcagaagctcagcagttcctgcatttcgtcgaggcctcaccagtgcttgctgcccggcaggacgtggcctaccatgtggtgtaccgtgaggggcccctataccccgtcaaccagcttcgcaacgtggcgacgtggcgtctgtccacgtggcgtctgtccacgttggcgtctgtccacgtggcgtctgtccacgttgaccgtctagtccacg

SEQ ID NO: 339888 - DNA, 1602 bp, Homo sapiens
ggcggctgcgagcgcagggcccagcccgggagccgctggagcagggcctgcgatggagcctgcagccccgggtcgcgtccctccctgagcgcccccgtcggcggccatgctgccccgagggcgcccccgggcgctgggggccgccgcgctgttgctgctgctgctgctgctcggattcctcctgttcggtggggacctggggtgtgagcgccgcgagcctggcgggcgagcgggggccccgggatgcttccccggcccgctcatgccacgtgtccccccagacgggaggctgcggagagccgccgccctcgacggagacccgggggccggccccggggaccacaaccgctccgactgcggcccgcagccgccgccgccgcccaagtgcgagctcttgcatgtggccatcgtgtgtgcggggcataactccagccgagacgtcatcaccctggtgaagtccatgctcttctacaggaaaaatccactgcacctccacttggtgactgacgccgtggccagaaacatcctggagacgctcttccacacatggatggtgcctgctgtccgtgtcagcttttatcatgccgaccagctcaagccccaggtctcctggatccccaacaagcactactccggcctctatgggctaatgaagctggtgctgcccagtgccttgcctgctgagctggcccgcgtcattgtcctggacacggatgtcaccttcgcctctgacatctcggagctctgggccctctttgctcacttttctgacacgcaggcgatcggtcttgtggagaaccagagtgactggtacctgggcaacctctggaagaaccacaggccctggcctgccttgggccggggatttaacacaggtgtgatcctgctgcggctggaccggctccggcaggctggctgggagcagatgtggaggctgacagccaggcgggagctccttagcctgcctgccacctcactggctgaccaggacatcttcaacgctgtgatcaaggagcacccggggctagtgcagcgtctgccttgtgtctggaatgtgcagctgtcagatcacacactggccgagcgctgctactctgaggcgtctgacctcaaggtgatccactggaactcaccaaagaagcttcgggtgaagaacaagcatgtggaattcttccgcaatttctacctgaccttcctggagtacgatgggaacctgctgcggagagagctctttgtgtgccccagccagcccccacctggtgctgagcagttgcagcaggccctggcacaactggacgaggaagacccctgctttgagttccggcagcagcagctcactgtgcaccgtgtgcatgtcactttcctgccccatgaaccgccacccccccggcctcacgatgtcacccttgtggcccagctgtccatggaccggacgtggcctaccatgtggtgtaccgtgaggggcccctataccccgtcaaccagcttcgcaacgtggccttggcccaggccctcacgccttacgtcttcctcagtgacattgacttcctgcctgcctattctctctacgactacctcaggtgggcctgcaggcagagaggg

SEQ ID NO: 339889 - DNA, 307 bp, Homo sapiens
ctgcatccagccctgagcccaggtcctgtggcagcttcagacagctcccttatgccctcccctcccagacacgcaggcgatcggtcttgtggagaaccagagtgactggtacctgggcaacctctggaagaaccacaggccctggcctgccttgggccggggatttaacacaggtggggacagtggtgaggggaggcaggcggggtggtctgctggtccttgggcccctggggctgggtggggcaaagaatgctaggaagtcccccaggaagaacattgctgtgaaaagaaccctggatgaagagac

SEQ ID NO: 339890 - DNA, 432 bp, Homo sapiens
gccggcattcgagaccctgcgctaccgcttcagcttcccccattccaaggtggagctgttggccttgctggatgcgggcactctctacaccttcaggtaggagaggctacttctctgcccactccactcacttgcccacactggcccccactacccacgagctcctagcctcagcctggctcccacccgaccctgctgcacaggtaccacgagtggccccgaggccacgcacccacagactatgcccgctggcgggaggctcaggccccgtaccgtgtgcaatgggcggccaactatgaaccctacgtggtggtgccacgagactgtccccgctatgatcctcgctttgtgggcttcggctggaacaaagtggcccacattgtggagctggatgcccaggtgaggagggcaccttgctgcctccacctttga

SEQ ID NO: 339891 - DNA, 3197 bp, Homo sapiens
  misc_feature (2553)..(2553): n is a, c, g, or t
ggcggctgcgagcgcagggcccagcccgggagccgctggagcagggcctgcgatggagcctgcagccccgggtcgcgtccctccctgagcgcccccgtcggcggccatgctgccccgagggcgcccccgggcgctgggggccgccgcgctgttgctgctgctgctgctgctcggattcctcctgttcggtggggacctggggtgtgagcgccgcgagcctggcgggcgagcgggggccccgggatgcttccccggcccgctcatgccacgtgtccccccagacgggaggctgcggagagccgccgccctcgacggagacccgggggccggccccggggaccacaaccgctccgactgcggcccgcagccgccgccgccgcccaagtgcgagctcttgcatgtggccatcgtgtgtgcggggcataactccagccgagacgtcatcaccctggtgaagtccatgctcttctacaggaaaaatccactgcacctccacttggtgactgacgccgtggccagaaacatcctggagacgctcttccacacatggatggtgcctgctgtccgtgtcagcttttatcatgccgaccagctcaagccccaggtctcctggatccccaacaagcactactccggcctctatgggctaatgaagctggtgctgcccagtgccttgcctgctgagctggcccgcgtcattgtcctggacacggatgtcaccttcgcctctgacatctcggagctctgggccctctttgctcacttttctgacacgcaggcgatcggtcttgtggagaaccagagtgactggtacctgggcaacctctggaagaaccacaggccctggcctgccttgggccggggatttaacacaggtgtgatcctgctgcggctggaccggctccggcaggctggctgggagcagatgtggaggctgacagccaggcgggagctccttagcctgcctgccacctcactggctgaccaggacatcttcaacgctgtgatcaaggagcacccggggctagtgcagcgtctgccttgtgtctggaatgtgcagctgtcagatcacacactggccgagcgctgctactctgaggcgtctgacctcaaggtgatccactggaactcaccaaagaagcttcgggtgaagaacaagcatgtggaattcttccgcaatttctacctgaccttcctggagtacgatgggaacctgctgcggagagagctctttgtgtgccccagccagcccccacctggtgctgagcagttgcagcaggccctggcacaactggacgaggaagacccctgctttgagttccggcagcagcagctcactgtgcaccgtgtgcatgtcactttcctgccccatgaaccgccacccccccggcctcacgatgtcacccttgtggcccagctgtccatggaccggctgcagatgttggaagccctgtgcaggcactggcctggccccatgagcctggccttgtacctgacagacgcagaagctcagcagttcctgcatttcgtcgaggcctcaccagtgcttgctgcccggcaggacgtggcctaccatgtggtgtaccgtgaggggcccctataccccgtcaaccagcttcgcaacgtggccttggcccaggccctcacgccttacgtcttcctcagtgacattgacttcctgcctgcctattctctctacgactacctcagggcctccattgagcagctggggctgggcagccggcgcaaggcagcactggtggtgccggcattcgagaccctgcgctaccgcttcagcttcccccattccaaggtggagctgttggccttgctggatgcgggcactctctacaccttcaggtaccacgagtggccccgaggccacgcacccacagactatgcccgctggcgggaggctcaggccccgtaccgtgtgcaatgggcggccaactatgaaccctacgtggtggtgccacgagactgtccccgctatgatcctcgctttgtgggcttcggctggaacaaagtggcccacattgtggagctggatgcccaggaatatgagctcctggtgctgcccgaggccttcaccatccatctgccccacgctccaagcctggacatctcccgcttccgctccagccccacctatcgtgactgcctccaggccctcaaggacgaattccaccaggacttgtcccgccaccatggggctgctgccctcaaatacctcccagccctgcagcagccccagagccctgcccgaggctgaggctgggccggcgctgcccctcatcttagcattgggcagacaccagggcaacctgccctccgccatccctgctatttaaattatttaaggtctctgggaagggctggggcagagcatctgtggggtggggtcttccccttgctgctattgtatggctggggactggtctctctctgccccagccagtttggggctggttcccccatcttgaattgtttatccctttttcataattaaagttttaaaacatcaaaaaaaaaaaaaaaaaaaaaaaaaaaaanaaaaaaaaaaaacaaaaaaaaaacaagagagggggcgcgcgcccatcaaaaagatcccccccgcgggggcccccacatacagcgccgcccccccgatttcgtggagcaaacgggggcgcccccactaagggcgaggcgcactacattacatacacccgcgacgcgcctgcgcgccgccgcgcttgtattagaaacacaccggtgtagcgacaacgggcgcgagcaaaaacaagcggctaccacacgcggggcacaactctctttggagaagccagagaacacccctctctctctttcctaggcggggaggcgaaacaccacaaattggtggggagccaccaaatcaccaccctctatcaccaggaatcgaggactatatgacgcagcaccctctcaacgcggaagagataaacaactagatatatcgttctttcacgcgccggagtatatccaccgggggtgtcatcccaaaacccagcggctgggcgaacaaatatggcacgctgccctggagcgagccgaagaaaacaaaaatactgtgcaccgctatcgacagagagctaaatttgacgcagtgcatgtaacacaaacaacaacttttttctccacccccggggacactaccacccgtgtacgcaagccaa

SEQ ID NO: 339892 - DNA, 2740 bp, Homo sapiens
  misc_feature (2448)..(2448): n is a, c, g, or t
ggcggctgcgagcgcagggcccagcccgggagccgctggagcagggcctgcgatggagcctgcagccccgggtcgcgtccctccctgagcgcccccgtcggcggccatgctgccccgagggcgcccccgggcgctgggggccgccgcgctgttgctgctgctgctgctgctcggattcctcctgttcggtggggacctggggtgtgagcgccgcgagcctggcgggcgagcgggggccccgggatgcttccccggcccgctcatgccacgtgtccccccagacgggaggctgcggagagccgccgccctcgacggagacccgggggccggccccggggaccacaaccgctccgactgcggcccgcagccgccgccgccgcccaagtgcgagctcttgcatgtggccatcgtgtgtgcggggcataactccagccgagacgtcatcaccctggtgaagtccatgctcttctacaggaaaaatccactgcacctccacttggtgactgacgccgtggccagaaacatcctggagacgctcttccacacatggatggtgcctgctgtccgtgtcagcttttatcatgccgaccagctcaagccccaggtctcctggatccccaacaagcactactccggcctctatgggctaatgaagctggtgctgcccagtgccttgcctgctgagctggcccgcgtcattgtcctggacacggatgtcaccttcgcctctgacatctcggagctctgggccctctttgctcacttttctggtgtgatcctgctgcggctggaccggctccggcaggctggctgggagcagatgtggaggctgacagccaggcgggagctccttagcctgcctgccacctcactggctgaccaggacatcttcaacgctgtgatcaaggagcacccggggctagtgcagcgtctgccttgtgtctggaatgtgcagctgtcagatcacacactggccgagcgctgctactctgaggcgtctgacctcaaggtgatccactggaactcaccaaagaagcttcgggtgaagaacaagcatgtggaattcttccgcaatttctacctgaccttcctggagtacgatgggaacctgctgcggagagagctctttgtgtgccccagccagcccccacctggtgctgagcagttgcagcaggccctggcacaactggacgaggaagacccctgctttgagttccggcagcagcagctcactgtgcaccgtgtgcatgtcactttcctgccccatgaaccgccacccccccggcctcacgatgtcacccttgtggcccagctgtccatggaccggctgcagatgttggaagccctgtgcaggcactggcctggccccatgagcctggccttgtacctgacagacgcagaagctcagcagttcctgcatttcgtcgaggcctcaccagtgcttgctgcccggcaggacgtggcctaccatgtggtgtaccgtgaggggcccctataccccgtcaaccagcttcgcaacgtggccttggcccaggccctcacgccttacgtcttcctcagtgacattgacttcctgcctgcctattctctctacgactacctcagggcctccattgagcagctggggctgggcagccggcgcaaggcagcactggtggtgccggcattcgagaccctgcgctaccgcttcagcttcccccattccaaggtggagctgttggccttgctggatgcgggcactctctacaccttcaggtaccacgagtggccccgaggccacgcacccacagactatgcccgctggcgggaggctcaggccccgtaccgtgtgcaatgggcggccaactatgaaccctacgtggtggtgccacgagactgtccccgctatgatcctcgctttgtgggcttcggctggaacaaagtggcccacattgtggagctggatgcccaggaatatgagctcctggtgctgcccgaggccttcaccatccatctgccccacgctccaagcctggacatctcccgcttccgctccagccccacctatcgtgactgcctccaggccctcaaggacgaattccaccaggacttgtcccgccaccatggggctgctgccctcaaatacctcccagccctgcagcagccccagagccctgcccgaggctgaggctgggccggcgctgcccctcatcttagcattgggcagacaccagggcaacctgccctccgccatccctgctatttaaattatttaaggtctctgggaagggctggggcagagcatctgtggggtggggtcttccccttgctgctattgtatggctggggactggtctctctctgccccagccagtttggggctggttcccccatcttgaattgtttatccctttttcataattaaagttttaaaacatcaaaaaaaaaaaaaaaaaaaaaaaaaaaaanaaaaaaaaaaaacaaaaaaaaaaccaacaaaaaaaaaggaagacacagccaccaccgaacagaagcacagaagcggaacaaaagaacgcacgccacgcaacagcaccagacgttcgggcaaaatcaaagcgcacacgaacggcgaagcaaaacaaaacacacaagccaagagagagaacaaaaaaagccaaaccagccgcgacggaacggcaaagaagaaaacgcgggcaggcacgagcagcacccccgaggacccgcggagaacacacacaaaccgcacggagccaagcgc

SEQ ID NO: 339893 - DNA, 2839 bp, Homo sapiens
  misc_feature (2547)..(2547): n is a, c, g, or t
ggcggctgcgagcgcagggcccagcccgggagccgctggagcagggcctgcgatggagcctgcagccccgggtcgcgtccctccctgagcgcccccgtcggcggccatgctgccccgagggcgcccccgggcgctgggggccgccgcgctgttgctgctgctgctgctgctcggattcctcctgttcggtggggacctggggtgtgagcgccgcgagcctggcgggcgagcgggggccccgggatgcttccccggcccgctcatgccacgtgtccccccagacgggaggctgcggagagccgccgccctcgacggagacccgggggccggccccggggaccacaaccgctccgactgcggcccgcagccgccgccgccgcccaagtgcgagctcttgcatgtggccatcgtgtgtgcggggcataactccagccgagacgtcatcaccctggtgaagtccatgctcttctacaggaaaaatccactgcacctccacttggtgactgacgccgtggccagaaacatcctggagacgctcttccacacatggatggtgcctgctgtccgtgtcagcttttatcatgccgaccagctcaagccccaggtctcctggatccccaacaagcactactccggcctctatgggctaatgaagctggtgctgcccagtgccttgcctgctgagctggcccgcgtcattgtcctggacacggatgtcaccttcgcctctgacatctcggagctctgggccctctttgctcacttttctggtgagaggcctgggagcctgcctggcctgcccaggatccctgcatccagccctgagcccaggtcctgtggcagcttcagacagctcccttatgccctcccctcccagacacgcaggcgatcggtcttgtggagaaccagagtgactggtacctgggcaacctctggaagaaccacaggccctggcctgccttgggccggggatttaacacaggacatcttcaacgctgtgatcaaggagcacccggggctagtgcagcgtctgccttgtgtctggaatgtgcagctgtcagatcacacactggccgagcgctgctactctgaggcgtctgacctcaaggtgatccactggaactcaccaaagaagcttcgggtgaagaacaagcatgtggaattcttccgcaatttctacctgaccttcctggagtacgatgggaacctgctgcggagagagctctttgtgtgccccagccagcccccacctggtgctgagcagttgcagcaggccctggcacaactggacgaggaagacccctgctttgagttccggcagcagcagctcactgtgcaccgtgtgcatgtcactttcctgccccatgaaccgccacccccccggcctcacgatgtcacccttgtggcccagctgtccatggaccggctgcagatgttggaagccctgtgcaggcactggcctggccccatgagcctggccttgtacctgacagacgcagaagctcagcagttcctgcatttcgtcgaggcctcaccagtgcttgctgcccggcaggacgtggcctaccatgtggtgtaccgtgaggggcccctataccccgtcaaccagcttcgcaacgtggccttggcccaggccctcacgccttacgtcttcctcagtgacattgacttcctgcctgcctattctctctacgactacctcagggcctccattgagcagctggggctgggcagccggcgcaaggcagcactggtggtgccggcattcgagaccctgcgctaccgcttcagcttcccccattccaaggtggagctgttggccttgctggatgcgggcactctctacaccttcaggtaccacgagtggccccgaggccacgcacccacagactatgcccgctggcgggaggctcaggccccgtaccgtgtgcaatgggcggccaactatgaaccctacgtggtggtgccacgagactgtccccgctatgatcctcgctttgtgggcttcggctggaacaaagtggcccacattgtggagctggatgcccaggaatatgagctcctggtgctgcccgaggccttcaccatccatctgccccacgctccaagcctggacatctcccgcttccgctccagccccacctatcgtgactgcctccaggccctcaaggacgaattccaccaggacttgtcccgccaccatggggctgctgccctcaaatacctcccagccctgcagcagccccagagccctgcccgaggctgaggctgggccggcgctgcccctcatcttagcattgggcagacaccagggcaacctgccctccgccatccctgctatttaaattatttaaggtctctgggaagggctggggcagagcatctgtggggtggggtcttccccttgctgctattgtatggctggggactggtctctctctgccccagccagtttggggctggttcccccatcttgaattgtttatccctttttcataattaaagttttaaaacatcaaaaaaaaaaaaaaaaaaaaaaaaaaaaanaaaaaaaaaaaacaaaaaaaaaaccaacaaaaaaaaaggaagacacagccaccaccgaacagaagcacagaagcggaacaaaagaacgcacgccacgcaacagcaccagacgttcgggcaaaatcaaagcgcacacgaacggcgaagcaaaacaaaacacacaagccaagagagagaacaaaaaaagccaaaccagccgcgacggaacggcaaagaagaaaacgcgggcaggcacgagcagcacccccgaggacccgcggagaacacacacaaaccgcacggagccaagcgc

SEQ ID NO: 339894 - DNA, 1563 bp, Homo sapiens
ggcggctgcgagcgcagggcccagcccgggagccgctggagcagggcctgcgatggagcctgcagccccgggtcgcgtccctccctgagcgcccccgtcggcggccatgctgccccgagggcgcccccgggcgctgggggccgccgcgctgttgctgctgctgctgctgctcggattcctcctgttcggtggggacctggggtgtgagcgccgcgagcctggcgggcgagcgggggccccgggatgcttccccggcccgctcatgccacgtgtccccccagacgggaggctgcggagagccgccgccctcgacggagacccgggggccggccccggggaccacaaccgctccgactgcggcccgcagccgccgccgccgcccaagtgcgagctcttgcatgtggccatcgtgtgtgcggggcataactccagccgagacgtcatcaccctggtgaagtccatgctcttctacaggaaaaatccactgcacctccacttggtgactgacgccgtggccagaaacatcctggagacgctcttccacacatggatggtgcctgctgtccgtgtcagcttttatcatgccgaccagctcaagccccaggtctcctggatccccaacaagcactactccggcctctatgggctaatgaagctggtgctgcccagtgccttgcctgctgagctggcccgcgtcattgtcctggacacggatgtcaccttcgcctctgacatctcggagctctgggccctctttgctcacttttctgacacgcaggcgatcggtcttgtggagaaccagagtgactggtacctgggcaacctctggaagaaccacaggccctggcctgccttgggccggggatttaacacaggtgtgatcctgctgcggctggaccggctccggcaggctggctgggagcagatgtggaggctgacagccaggcgggagctccttagcctgcctgccacctcactggctgaccaggacatcttcaacgctgtgatcaaggagcacccggggctagtgcagcgtctgccttgtgtctggaatgtgcagctgtcagatcacacactggccgagcgctgctactctgaggcgtctgacctcaaggtgatccactggaactcaccaaagaagcttcgggtgaagaacaagcatgtggaattcttccgcaatttctacctgaccttcctggagtacgatgggaacctgctgcggagagagctctttgtgtgccccagccagcccccacctggtgctgagcagttgcagcaggccctggcacaactggacgaggaagacccctgctttgagttccggcagcagcagctcactgtgcaccgtgtgcatgtcactttcctgccccatgaaccgccacccccccggcctcacgatgtcacccttgtggcccagctgtccatggaccggctgcagatgttggaagccctgtgcaggcactggcctggccccatgagcctggccttgtacctgacagacgcagaagctcagcagttcctgcatttcgtcgaggccaatgttgtggggatcgatagagtcaa

SEQ ID NO: 339895 - DNA, 1273 bp, Homo sapiens
  misc_feature (981)..(981): n is a, c, g, or t
ttctcccctgctcatgggtgctcctcctcagggcctccattgagcagctggggctgggcagccggcgcaaggcagcactggtggtgccggcattcgagaccctgcgctaccgcttcagcttcccccattccaaggtggagctgttggccttgctggatgcgggcactctctacaccttcaggtaggagaggctacttctctgcccactccactcacttgcccacactggcccccactacccacgagctcctagcctcagcctggctcccacccgaccctgctgcacaggtaccacgagtggccccgaggccacgcacccacagactatgcccgctggcgggaggctcaggccccgtaccgtgtgcaatgggcggccaactatgaaccctacgtggtggtgccacgagactgtccccgctatgatcctcgctttgtgggcttcggctggaacaaagtggcccacattgtggagctggatgcccaggaatatgagctcctggtgctgcccgaggccttcaccatccatctgccccacgctccaagcctggacatctcccgcttccgctccagccccacctatcgtgactgcctccaggccctcaaggacgaattccaccaggacttgtcccgccaccatggggctgctgccctcaaatacctcccagccctgcagcagccccagagccctgcccgaggctgaggctgggccggcgctgcccctcatcttagcattgggcagacaccagggcaacctgccctccgccatccctgctatttaaattatttaaggtctctgggaagggctggggcagagcatctgtggggtggggtcttccccttgctgctattgtatggctggggactggtctctctctgccccagccagtttggggctggttcccccatcttgaattgtttatccctttttcataattaaagttttaaaacatcaaaaaaaaaaaaaaaaaaaaaaaaaaaaanaaaaaaaaaaaacaaaaaaaaaaccaacaaaaaaaaaggaagacacagccaccaccgaacagaagcacagaagcggaacaaaagaacgcacgccacgcaacagcaccagacgttcgggcaaaatcaaagcgcacacgaacggcgaagcaaaacaaaacacacaagccaagagagagaacaaaaaaagccaaaccagccgcgacggaacggcaaagaagaaaacgcgggcaggcacgagcagcacccccgaggacccgcggagaacacacacaaaccgcacggagccaagcgc

SEQ ID NO: 339896 - DNA, 576 bp, Homo sapiens
ggcggctgcgagcgcagggcccagcccgggagccgctggagcagggcctgcgatggagcctgcagccccgggtcgcgtccctccctgagcgcccccgtcggcggccatgctgccccgagggcgcccccgggcgctgggggccgccgcgctgttgctgctgctgctgctgctcggattcctcctgttcggtggggacctggggtgtgagcgccgcgagcctggcgggcgagcgggggccccgggatgcttccccggcccgctcatgccacgtgtccccccagacgggaggctgcggagagccgccgccctcgacggagacccgggggccggccccggggaccacaaccgctccgactgcggcccgcagccgccgccgccgcccaagtgcgaggtaggtgcgcgcggccctggcggcgggagtcctgggggcgccgcccccgagcccggcctcttggacatctgcgggaatcacagtacctggcgtctgtccagcactggccagccggctggggcgcacctcgaacgtgcagctcctctgctcccgacctcatttccccatttgaaatgaagggttgg

SEQ ID NO: 339897 - DNA, 805 bp, Homo sapiens
gtgagggaggtggctcggcgcgagccgcacaacccggccgtcgggccccgccgcccagggctgagtctcccatctcgcccctcggtccgcagggcctgcgatggagcctgcagccccgggtcgcgtccctccctgagcgcccccgtcggcggccatgctgccccgagggcgcccccgggcgctgggggccgccgcgctgttgctgctgctgctgctgctcggattcctcctgttcggtggggacctggggtgtgagcgccgcgagcctggcgggcgagcgggggccccgggatgcttccccggcccgctcatgccacgtgtccccccagacgggaggctgcggagagccgccgccctcgacggagacccgggggccggccccggggaccacaaccgctccgactgcggcccgcagccgccgccgccgcccaagtgcgaggtaggtgcgcgcggccctggcggcgggagtcctgggggcgccgcccccgagcccggcctcttggacatctgcgggaatcacagtacctggcgtctgtccagcactggccagccggctggggcgcacctcgaacgtgcagctcctctgctcccgacctcatttccccatttgaaatgaagggttggctcctgctgccccctccgcacactgttccgggctctgctgcggggtggggcagctcaacatgggtcctcaccgcctagcggagaaggggggctgctgccgacctgggcgtccctccccagctcttgcatgtggccatcgtgtgtgcggggcataactccagccgagacgtcatcaccctgg

SEQ ID NO: 339898 - DNA, 294 bp, Homo sapiens
agttcaggcttctgcctgcatccaaaccttttaggaaagatggaaccactgtctttactttttcctgtttgccaggtgtataaaacaatgattatagagaagaatatatgtgcatggagaggtcagagaactaatataaatgttttggaacctgtctcagaaatttagatagagaaaagaagacaatttggagttgaagctcttgagctccagtcctagctcttccacttactaattgagtaatcttggtaaaatcacttaacctttgtgaacctcaattttcttgcctttaga

SEQ ID NO: 339899 - DNA, 531 bp, Homo sapiens
agatttacgggtatcagatttcagcctggagaaacaaaaacaaacaaaaaaaaacacggaggacccagaaacaaatgattctaacttgctcagaaagtcatatgtgaacgcaacaataaactgctgattttctacagttttcactacatacacacagacagacacgcacacacgtgtgcatatacacaggcattggtggtttcctttcctccacactccattaatatccggcttgtgaccttgtcctgttgatatggtgaaactgggataaattcagattcacactcttagctgctccaaagtggcctcatcaatgagtgctcttctgtaaactcagggaaggaagtgaatgatgtgtctgcatgtacggccaacagaaatctcagctgtctggtctggcatgaaaagtcccctgctttatcggggtgggaggccacccccagggctgggcagcttgcctccagctagggttgtttttgttttggttgcaaagtcaccaagacctccagagaaacaaagcactgagttttg

SEQ ID NO: 339900 - DNA, 148 bp, Homo sapiens
ttggctccagcctggcagtagcaggggctgatgcaggcgagcggccccgcagtagccttggctccgtgctggctcccactctggggttctcgctgtgggcgcaggctggtgtccgtctttcctttctttatccgagtgctgagggccc

SEQ ID NO: 339901 - DNA, 3840 bp, Homo sapiens
gcactcaaaggctcaactccccacaggcgtgtgttgccaggggcagaaggcttggcccctgggtcagcatactctccggacagctcatccctgccagcccaggtccctgcagccctggggctagcacaggggatgcggacctcggcctaggtccccacagctgtggggctggctcgggggacggatctctgctaagcatggcccctgccagctcaggtccctgccactcagtggatgggactttggcggagtgtggggcccctgcagggagggtctagacaagcaacaccaggaacctgaagcctccctggccggggctcagctgtcgccaggatcgcaacagttaagctgcctgcagcaggataagtgagccgatgctgctccttaatcagggacatcgaatcggaggccttgggaggagcagccggctggctgccctgcagaggccaggtctgcccagcaaacccaggaaggtgtggcgtccccgcttcgcggccaagatggtgctggtgctgcgccatcctttgtgtgcccgggaagggcgttccgggagccgggtcgggggctcctgactcgcattgggcagcatgacggtgcgccggctgtcactgctgtgccgggacctctgggcgctgtggctgctgctgaaggccggcgcagatgaaatcatgcaccaggacatcgtcccgctctgtgctgccgacatccaggaccagctaaagaagcgctttgcttacctgtccggtgggcgggggcaggacggaagcccggttatcaccttccctgactacccggccttcagcgagattccggacaaggagttccagaatgtcatgacctacctcaccagcatccccagcctgcaggacgctggcatcggattcatcctggtgatagaccggcgacgggacaaatggacctccgtgaaggcgtccgtcctgcgcatcgcagcatctttcccggcaaacctgcagctcgtcctcgtgcttcgcccgacgggttttttccaaaggactctctccgacatcgctttcaaattcaatagagatgactttaagatgaaggtgccggtcataatgctgagctccgtaccagacttacacggttacatcgataagtcgcagctgaccgaggacctgggtgggaccctggactactgccactcccggtggctgtgccagcgcacggccatcgaaagtttcgccctcatggtgaagcagacggctcagatgctgcagtccttcgggaccgagctggctgaaacagagctgcccaatgacgtccagtcgacaagctcagtgctgtgtgcgcacacagagaagaaggacaaggcgaaggaggatttgaggctggcactgaaagaggggcacagtgtcctggagagcctcagggagctgcaggctgagggctcagagcccagtgtgaaccaggaccagcttgacaaccaggccaccgtgcagaggctcctggcccagctgaacgaaaccgaggctgccttcgatgagttctgggcaaagcatcagcagaaactggagcagtgtctgcagctccggcactttgagcagggcttccgggaggtcaaagccatcttggacgcagcgtcccagaagatagcaaccttcacagacatcggcaacagcctggcgcatgtggagcacctgctgagggacctggccagcttcgaggagaaatcaggcgtggccgtggagagggcccgggccctgtctctggacggcgagcagctcattgggaacaagcactacgcggtagactccatccgcccaaagtgccaggagctccggcacctctgtgaccagttctctgcggagatcgcaaggaggagggggctgctcagcaagtccctggagctgcaccgccgcctggagacgtccatgaagtggtgtgatgaagggatttacctgctggcctcacaacctgtggacaagtgccagtcccaggacggcgcggaggctgccctccaggaaatcgagaagtttttggagaccggtgcggaaaataagatccaggagctcaacgcgatttacaaggaatacgaatccatcctcaaccaagatctcatggagcacgtgcgaaaggtcttccagaagcaggcaagcatggaggaggtgttccaccgcaggcaggccagcctgaagaagctggcggccaggcagacgcggcccgtgcagccggtggcccccagacccgaggcactggcaaagtcgccctgcccctccccaggcattcggcgaggctctgagaactccagctccgagggcggtgcgctccggagagggccctaccggagggccaagagtgagatgagtgagagccggcagggccgcggctcagcgggggaggaggaggaaagcctggccatcctgcgcaggcacgtgatgagcgagctcctggacacagaacgggcctacgtggaggagctgctgtgcgtcctggagggctacgccgcggagatggataacccactgatggctcacctcctgtcaacaggccttcacaacaagaaggatgttttgtttggaaacatggaggaaatctatcacttccacaacaggatattcctcagggagctggaaaactacactgactgcccagaactggttggaagatgctttctggagaggatggaagatttccagatctatgagaagtactgtcagaacaagccccgctctgagagcctgtggagacagtgctccgactgcccgtttttccaggaatgccagagaaagctggaccacaagctgagcctggactcctacctgctgaagccagtgcagaggatcaccaagtaccagctgctgctcaaggaaatgctgaaatacagcaggaactgcgagggggctgaggacctgcaggaggcgctgagctccatcctgggcatcctgaaggccgtgaacgactccatgcacctcatcgctatcaccggctatgacgggaatctcggcgacctgggcaagctgctgatgcagggctcgttcagcgtctggaccgaccacaagaggggccacaccaaggtgaaggagctggccaggttcaagcccatgcagcggcacctgttcctgcacgagaaggcagtgctcttctgcaagaagagggaggagaatggggaggggtatgagaaagctccctcctacagctacaagcagtccttaaacatggctgccgttggcattacggagaacgtgaagggagatgctaagaagttcgagatctggtacaacgcgcgcgaggaggtctacatcgtccaggcgccaactcctgagattaaagccgcgtgggtgaatgaaattcggaaagtgctgaccagccagctgcaggcttgtagagaagccagccagcaccgggcgctggagcagtcacagagcctgcccctgccggccccgaccagcaccagtccctcaagaggaaactcaaggaacatcaagaagctggaagaaaggaaaacagaccccctaagcctggagggatacgtcagctcagcgccactgacaaagccccccgaaaagggcaaagagccctaggaccccacagaagagcccctccctctccattgctctgcacccctgcatcagcaaggccagccccagaaggagcctcggccgagcgtgcaacccggagccgccttgggccctccctgcgacagccggacccgcctccgcatcgggttgcgatgccctctgcatagtttctttctcttccttcatagatgacacggtcactagctctgcctcagaaagctctgcgctttccagaaagcgctttaccctgcagggttttgctaacctcaaaggtcagaaaggtaaaagtagtgcctgcccc

SEQ ID NO: 339902 - DNA, 571 bp, Homo sapiens
gcagccatttcttacagatttactcaatactttctatctggttattatgcctcttattctgtaattattttttattatgaattatttatttccagatctgtctggcctataaggcctgtaggcactataagggggagtactgcgtcaccttcatctttttatccctttggccttgctccgtgcctgaaagctcaccacactggaacgtccaggtgcacatgtgccactggacaccgggatgttgccggatgctcttttggacgctggaatgctggtgcattgttgccggatgctggaatggtgcacgcacgctctgttggacgctggaatgctggtgcattgttgccggatgctggaatggtgcacgcatgccctgttggactctggaatgctggtgcattgttgccaaatgccggaatggtacacggatgctctgttggacgctggaatgctggtgcattgttgccggatgctggaatggtgcacgcatgctctgttggacgctggaatgctggcgcattgttgccaaaatgccggaatggtacacggatgctctgttggacgctggaat

SEQ ID NO: 339903 - DNA, 5567 bp, Homo sapiens
gtggggggggggggggggtcttgctacattgcccaggctcaaacttctgggctcaaatgatcctcctgcttctgcctcagcttctgcctcggcctccggagtagctgggactacaggcctgaaatactgtttctttaaggaagggcatgttacctataataccaaaccacaaaaggatagctgcggttttgggcgaggagagctcagagagtttcttgcatatggccctgtgatggcggccatggccctgcatagacacgagctggaatctgcaggtggcagccaggacgctgcgtgtgtcgagtgcacagtgtggcttggtgccaaccatggcgagggtggagagccccgtgcctgcagcgcgcgcttccctcactgggtcctgcgtccttgggcaggcgatgcccctgcggggaggggctggtccatccccggccagccacggacccacgcatggacccagcgacccacggacctgcttacctgggcgcggcgcgggtggcatgcggccacacggaaggggcgcgctgggctgctgcggcctctgcagcttctacacctgccacggggcggccggagatgaaatcatgcaccaggacatcgtcccgctctgtgctgccgacatccaggaccagctaaagaagcgctttgcttacctgtccggtgggcgggggcaggacggaagcccggttatcaccttccctgactacccggccttcagcgagattccggacaaggagttccagaatgtcatgacctacctcaccagcatccccagcctgcaggacgctggcatcggattcatcctggtgatagaccggcgacgggacaaatggacctccgtgaaggcgtccgtcctgcgcatcgcagcatctttcccggcaaacctgcagctcgtcctcgtgcttcgcccgacgggttttttccaaaggactctctccgacatcgctttcaaattcaatagagatgactttaagatgaaggtgccggtcataatgctgagctccgtaccagacttacacggttacatcgataagtcgcagctgaccgaggacctgggtgggaccctggactactgccactcccggtggctgtgccagcgcacggccatcgaaagtttcgccctcatggtgaagcagacggctcagatgctgcagtccttcgggaccgagctggctgaaacagagctgcccaatgacgtccagtcgacaagctcagtgctgtgtgcgcacacagagaagaaggacaaggcgaaggaggatttgaggctggcactgaaagaggggcacagtgtcctggagagcctcagggagctgcaggctgagggctcagagcccagtgtgaaccaggaccagcttgacaaccaggccaccgtgcagaggctcctggcccagctgaacgaaaccgaggctgccttcgatgagttctgggcaaagcatcagcagaaactggagcagtgtctgcagctccggcactttgagcagggcttccgggaggtcaaagccatcttggacgcagcgtcccagaagatagcaaccttcacagacatcggcaacagcctggcgcatgtggagcacctgctgagggacctggccagcttcgaggagaaatcaggcgtggccgtggagagggcccgggccctgtctctggacggcgagcagctcattgggaacaagcactacgcggtagactccatccgcccaaagtgccaggagctccggcacctctgtgaccagttctctgcggagatcgcaaggaggagggggctgctcagcaagtccctggagctgcaccgccgcctggagacgtccatgaagtggtgtgatgaagggatttacctgctggcctcacaacctgtggacaagtgccagtcccaggacggcgcggaggctgccctccaggaaatcgagaagtttttggagaccggtgcggaaaataagatccaggagctcaacgcgatttacaaggaatacgaatccatcctcaaccaagatctcatggagcacgtgcgaaaggtcttccagaagcaggcaagcatggaggaggtgttccaccgcaggcaggccagcctgaagaagctggcggccaggcagacgcggcccgtgcagccggtggcccccagacccgaggcactggcaaagtcgccctgcccctccccaggcattcggcgaggctctgagaactccagctccgagggcggtgcgctccggagagggccctaccggagggccaagagtgagatgagtgagagccggcagggccgcggctcagcgggggaggaggaggaaagcctggccatcctgcgcaggcacgtgatgagcgagctcctggacacagaacgggcctacgtggaggagctgctgtgcgtcctggagggctacgccgcggagatggataacccactgatggctcacctcctgtcaacaggccttcacaacaagaaggatgttttgtttggaaacatggaggaaatctatcacttccacaacaggatattcctcagggagctggaaaactacactgactgcccagaactggttggaagatgctttctggagaggatggaagatttccagatctatgagaagtactgtcagaacaagccccgctctgagagcctgtggagacagtgctccgactgcccgtttttccaggaatgccagagaaagctggaccacaagctgagcctggactcctacctgctgaagccagtgcagaggatcaccaagtaccagctgctgctcaaggaaatgctgaaatacagcaggaactgcgagggggctgaggacctgcaggaggcgctgagctccatcctgggcatcctgaaggccgtgaacgactccatgcacctcatcgctatcaccggctatgacgggaatctcggcgacctgggcaagctgctgatgcagggctcgttcagcgtctggaccgaccacaagaggggccacaccaaggtgaaggagctggccaggttcaagcccatgcagcggcacctgttcctgcacgagaaggcagtgctcttctgcaagaagagggaggagaatggggaggggtatgagaaagctccctcctacagctacaagcagtccttaaacatggctgccgttggcattacggagaacgtgaagggagatgctaagaagttcgagatctggtacaacgcgcgcgaggaggtctacatcgtccaggcgccaactcctgagattaaagccgcgtgggtgaatgaaattcggaaagtgctgaccagccagctgcaggcttgtagagaagccagccagcaccgggcgctggagcagtcacagagcctgcccctgccggccccgaccagcaccagtccctcaagaggaaactcaaggaacatcaagaagctggaagaaaggaaaacagaccccctaagcctggagggatacgtcagctcagcgccactgacaaagccccccgaaaagggcaaaggttggagcaaaacgtcccactcactggaggcacctgaggacgacgggggctggtcaagtgcagaggagcagattaactcgtccgacgcagaggaggacggcgggttgggccccaagaagctggttccaggtaaatacacggtcgtggcggaccacgagaagggaggccccgatgcgctgcgcgtgaggagcggggacgtggtggagctggtgcaggagggcgacgagggcctctggtacgtcagggacccgaccactggcaaggagggctgggtgccggccagcagcctgtccgtccggctcggcccgtccggctcggcccagtgcctgagcagctcagagtcgagcccggggtcggccgtgctgagcaactcgtccagctgcagcgagggcggccaggcccccttctccgacctgcaggggtagcgcggcctcggcgccggagacccgcgcgctgtctggggctgcggtggcgtggggagggcgcggcccccggacgccccgaggaaggggcacctcaccgccccgacccagagcgcctggccgtgcgggctgcagaggacccctccggggcagaggcaggttccacggaagaccccggcccgctggggcttccccggagactccagagcccacagaggaggggccgcagggaacagccccgggcggcaggcgccgggcagcggcatctcgtcctggctccaccgtgctgcttctgcctccggacggtgctttcaggggacgcgcggaccgtggtggagctgcttccggagaagtggaggatcctctggccaacggcctgaggagagcggggcacggggtctctttagcttttacaagttttaggattttttcaagcagggatcaatcccgtggccattttttgtggtactttggcctcaattcttcaccaggaatcactgtgtttacatgaaatgacaatttgatactgtatttgatagaaaactatttttttgttaccggggtttacatagaagcacgttgtttataccactaagtgactttggcggggctctcccatggaaacggatggcactccctgaagctccctggtcacaggtggatgaaaacgtgtccgtgggtgacatcaggtggtgtctccaccaccaaaagcagttagaagccaaggagattcctttatctacctagggttcattttcaaaagaaaatttaaactataatttaaacaattaacgttcttttctacaaaaaaaatgcagggacttgatttttttaaagagcttcactgaattaggatatttttattgcttttaaagaaaatacaaagatgcagtttctgcagggtgtggcgtggaccagtgctgccgaccatagctcagagagccctgcccctgcctcactgcactgcagcctcctcggaggccgcacctccactccactccccacgcgccccctgcctcccacccaggtccacctgccacctggtgaccaccttgagtacagaagtgaaagtggggagagtattttattcaagtcacagcagaactggaaaaaaactcttctgttttaccaacttcttgtgtttcagaaacatattctgttcaaaacttttgaagccctttcggtgtctagtctgcagatgtttttgtatgtgtgcacctctgaccatgtgtgtacatatgtgtcttgctggaaaggacatattcgctgtccccgtgctgctgggagggccgcctcacagcctcacggttcccagccccagcacagtggaggcaggcgtggctgcattcccctcacgctaccctcccagcggcttgtagccgtcactggccagacctccagggtgcggaatcaaataggaagcatgcagagactcggcagcttttcctctgatgtgtaagttatttggaacgcgtgctgtgtcccgcgatgtccctgatgtactgtgcaggcgcggtgcctccgtctcgtcgcacagctgcgcgcccttgtgtgaccctccccataaaggcactttacagcttcatgtttcatccactgtcacttttttttaactgctgatgtaaatggaattttaaaagcagagttctttattgtatggatgacgtttgaataaatatcagcaactcctgc

SEQ ID NO: 339904 - DNA, 5648 bp, Homo sapiens
gcactcaaaggctcaactccccacaggcgtgtgttgccaggggcagaaggcttggcccctgggtcagcatactctccggacagctcatccctgccagcccaggtccctgcagccctggggctagcacaggggatgcggacctcggcctaggtccccacagctgtggggctggctcgggggacggatctctgctaagcatggcccctgccagctcaggtccctgccactcagtggatgggactttggcggagtgtggggcccctgcagggagggtctagacaagcaacaccaggaacctgaagcctccctggccggggctcagctgtcgccaggatcgcaacagttaagctgcctgcagcaggataagtgagccgatgctgctccttaatcagggacatcgaatcggaggccttgggaggagcagccggctggctgccctgcagaggccaggtctgcccagcaaacccaggaaggtgtggcgtccccgcttcgcggccaagatggtgctggtgctgcgccatcctttgtgtgcccgggaagggcgttccgggagccgggtcgggggctcctgactcgcattgggcagcatgacggtgcgccggctgtcactgctgtgccgggacctctgggcgctgtggctgctgctgaaggccggcgcagatgaaatcatgcaccaggacatcgtcccgctctgtgctgccgacatccaggaccagctaaagaagcgctttgcttacctgtccggtgggcgggggcaggacggaagcccggttatcaccttccctgactacccggccttcagcgagattccggacaaggagttccagaatgtcatgacctacctcaccagcatccccagcctgcaggacgctggcatcggattcatcctggtgatagaccggcgacgggacaaatggacctccgtgaaggcgtccgtcctgcgcatcgcagcatctttcccggcaaacctgcagctcgtcctcgtgcttcgcccgacgggttttttccaaaggactctctccgacatcgctttcaaattcaatagagatgactttaagatgaaggtgccggtcataatgctgagctccgtaccagacttacacggttacatcgataagtcgcagctgaccgaggacctgggtgggaccctggactactgccactcccggtggctgtgccagcgcacggccatcgaaagtttcgccctcatggtgaagcagacggctcagatgctgcagtccttcgggaccgagctggctgaaacagagctgcccaatgacgtccagtcgacaagctcagtgctgtgtgcgcacacagagaagaaggacaaggcgaaggaggatttgaggctggcactgaaagaggggcacagtgtcctggagagcctcagggagctgcaggctgagggctcagagcccagtgtgaaccaggaccagcttgacaaccaggccaccgtgcagaggctcctggcccagctgaacgaaaccgaggctgccttcgatgagttctgggcaaagcatcagcagaaactggagcagtgtctgcagctccggcactttgagcagggcttccgggaggtcaaagccatcttggacgcagcgtcccagaagatagcaaccttcacagacatcggcaacagcctggcgcatgtggagcacctgctgagggacctggccagcttcgaggagaaatcaggcgtggccgtggagagggcccgggccctgtctctggacggcgagcagctcattgggaacaagcactacgcggtagactccatccgcccaaagtgccaggagctccggcacctctgtgaccagttctctgcggagatcgcaaggaggagggggctgctcagcaagtccctggagctgcaccgccgcctggagacgtccatgaagtggtgtgatgaagggatttacctgctggcctcacaacctgtggacaagtgccagtcccaggacggcgcggaggctgccctccaggaaatcgagaagtttttggagaccggtgcggaaaataagatccaggagctcaacgcgatttacaaggaatacgaatccatcctcaaccaagatctcatggagcacgtgcgaaaggtcttccagaagcaggcaagcatggaggaggtgttccaccgcaggcaggccagcctgaagaagctggcggccaggcagacgcggcccgtgcagccggtggcccccagacccgaggcactggcaaagtcgccctgcccctccccaggcattcggcgaggctctgagaactccagctccgagggcggtgcgctccggagagggccctaccggagggccaagagtgagatgagtgagagccggcagggccgcggctcagcgggggaggaggaggaaagcctggccatcctgcgcaggcacgtgatgagcgagctcctggacacagaacgggcctacgtggaggagctgctgtgcgtcctggagggctacgccgcggagatggataacccactgatggctcacctcctgtcaacaggccttcacaacaagaaggatgttttgtttggaaacatggaggaaatctatcacttccacaacaggatattcctcagggagctggaaaactacactgactgcccagaactggttggaagatgctttctggagaggatggaagatttccagatctatgagaagtactgtcagaacaagccccgctctgagagcctgtggagacagtgctccgactgcccgtttttccaggaatgccagagaaagctggaccacaagctgagcctggactcctacctgctgaagccagtgcagaggatcaccaagtaccagctgctgctcaaggaaatgctgaaatacagcaggaactgcgagggggctgaggacctgcaggaggcgctgagctccatcctgggcatcctgaaggccgtgaacgactccatgcacctcatcgctatcaccggctatgacgggaatctcggcgacctgggcaagctgctgatgcagggctcgttcagcgtctggaccgaccacaagaggggccacaccaaggtgaaggagctggccaggttcaagcccatgcagcggcacctgttcctgcacgagaaggcagtgctcttctgcaagaagagggaggagaatggggaggggtatgagaaagctccctcctacagctacaagcagtccttaaacatggctgccgttggcattacggagaacgtgaagggagatgctaagaagttcgagatctggtacaacgcgcgcgaggaggtctacatcgtccaggcgccaactcctgagattaaagccgcgtgggtgaatgaaattcggaaagtgctgaccagccagctgcaggcttgtagagaagccagccagcaccgggcgctggagcagtcacagagcctgcccctgccggccccgaccagcaccagtccctcaagaggaaactcaaggaacatcaagaagctggaagaaaggaaaacagaccccctaagcctggagggatacgtcagctcagcgccactgacaaagccccccgaaaagggcaaaggttggagcaaaacgtcccactcactggaggcacctgaggacgacgggggctggtcaagtgcagaggagcagattaactcgtccgacgcagaggaggacggcgggttgggccccaagaagctggttccaggtaaatacacggtcgtggcggaccacgagaagggaggccccgatgcgctgcgcgtgaggagcggggacgtggtggagctggtgcaggagggcgacgagggcctctggtacgtcagggacccgaccactggcaaggagggctgggtgccggccagcagcctgtccgtccggctcggcccgtccggctcggcccagtgcctgagcagctcagagtcgagcccggggtcggccgtgctgagcaactcgtccagctgcagcgagggcggccaggcccccttctccgacctgcaggggtagcgcggcctcggcgccggagacccgcgcgctgtctggggctgcggtggcgtggggagggcgcggcccccggacgccccgaggaaggggcacctcaccgccccgacccagagcgcctggccgtgcgggctgcagaggacccctccggggcagaggcaggttccacggaagaccccggcccgctggggcttccccggagactccagagcccacagaggaggggccgcagggaacagccccgggcggcaggcgccgggcagcggcatctcgtcctggctccaccgtgctgcttctgcctccggacggtgctttcaggggacgcgcggaccgtggtggagctgcttccggagaagtggaggatcctctggccaacggcctgaggagagcggggcacggggtctctttagcttttacaagttttaggattttttcaagcagggatcaatcccgtggccattttttgtggtactttggcctcaattcttcaccaggaatcactgtgtttacatgaaatgacaatttgatactgtatttgatagaaaactatttttttgttaccggggtttacatagaagcacgttgtttataccactaagtgactttggcggggctctcccatggaaacggatggcactccctgaagctccctggtcacaggtggatgaaaacgtgtccgtgggtgacatcaggtggtgtctccaccaccaaaagcagttagaagccaaggagattcctttatctacctagggttcattttcaaaagaaaatttaaactataatttaaacaattaacgttcttttctacaaaaaaaatgcagggacttgatttttttaaagagcttcactgaattaggatatttttattgcttttaaagaaaatacaaagatgcagtttctgcagggtgtggcgtggaccagtgctgccgaccatagctcagagagccctgcccctgcctcactgcactgcagcctcctcggaggccgcacctccactccactccccacgcgccccctgcctcccacccaggtccacctgccacctggtgaccaccttgagtacagaagtgaaagtggggagagtattttattcaagtcacagcagaactggaaaaaaactcttctgttttaccaacttcttgtgtttcagaaacatattctgttcaaaacttttgaagccctttcggtgtctagtctgcagatgtttttgtatgtgtgcacctctgaccatgtgtgtacatatgtgtcttgctggaaaggacatattcgctgtccccgtgctgctgggagggccgcctcacagcctcacggttcccagccccagcacagtggaggcaggcgtggctgcattcccctcacgctaccctcccagcggcttgtagccgtcactggccagacctccagggtgcggaatcaaataggaagcatgcagagactcggcagcttttcctctgatgtgtaagttatttggaacgcgtgctgtgtcccgcgatgtccctgatgtactgtgcaggcgcggtgcctccgtctcgtcgcacagctgcgcgcccttgtgtgaccctccccataaaggcactttacagcttcatgtttcatccactgtcacttttttttaactgctgatgtaaatggaattttaaaagcagagttctttattgtatggatgacgtttgaataaatatcagcaactcctgc

SEQ ID NO: 339905 - DNA, 5765 bp, Homo sapiens
gtggggggggggggggggtcttgctacattgcccaggctcaaacttctgggctcaaatgatcctcctgcttctgcctcagcttctgcctcggcctccggagtagctgggactacaggcctgaaatactgtttctttaaggaagggcatgttacctataataccaaaccacaaaaggatagctgcggttttgggcgaggagagctcagagagtttcttgcatatggccctgtgatggcggccatggccctgcatagacacgagctggaatctgcaggtggcagccaggacgctgcgtgtgtcgagtgcacagtgtggcttggtgccaaccatggcgagggtggagagccccgtgcctgcagcgcgcgcttccctcactgggtcctgcgtccttgggcaggcgatgcccctgcggggaggggctggtccatccccggccagccacggacccacgcatggacccagcgacccacggacctgcttacctgggcgcggcgcgggtggcatgcggccacacggaaggggcgcgctgggctgctgcggcctctgcagcttctacacctgccacggggcggccggagatgaaatcatgcaccaggacatcgtcccgctctgtgctgccgacatccaggaccagctaaagaagcgctttgcttacctgtccggtgggcgggggcaggacggaagcccggttatcaccttccctgactacccggccttcagcgagattccggacaaggagttccagaatgtcatgacctacctcaccagcatccccagcctgcaggacgctggcatcggattcatcctggtgatagaccggcgacgggacaaatggacctccgtgaaggcgtccgtcctgcgcatcgcagcatctttcccggcaaacctgcagctcgtcctcgtgcttcgcccgacgggttttttccaaaggactctctccgacatcgctttcaaattcaatagagatgactttaagatgaaggtgccggtcataatgctgagctccgtaccagacttacacggttacatcgataagtcgcagctgaccgaggacctgggtgggaccctggactactgccactcccggtggctgtgccagcgcacggccatcgaaagtttcgccctcatggtgaagcagacggctcagatgctgcagtccttcgggaccgagctggctgaaacagagctgcccaatgacgtccagtcgacaagctcagtgctgtgtgcgcacacagagaagaaggacaaggcgaaggaggatttgaggctggcactgaaagaggggcacagtgtcctggagagcctcagggagctgcaggctgagggctcagagcccagtgtgaaccaggaccagcttgacaaccaggccaccgtgcagaggctcctggcccagctgaacgaaaccgaggctgccttcgatgagttctgggcaaagcatcagcagaaactggagcagtgtctgcagctccggcactttgagcagggcttccgggaggtcaaagccatcttggacgcagcgtcccagaagatagcaaccttcacagacatcggcaacagcctggcgcatgtggagcacctgctgagggacctggccagcttcgaggagaaatcaggcgtggccgtggagagggcccgggccctgtctctggacggcgagcagctcattgggaacaagcactacgcggtagactccatccgcccaaagtgccaggagctccggcacctctgtgaccagttctctgcggagatcgcaaggaggagggggctgctcagcaagtccctggagctgcaccgccgcctggagacgtccatgaagtggtgtgatgaagggatttacctgctggcctcacaacctgtggacaagtgccagtcccaggacggcgcggaggctgccctccaggaaatcgagaagtttttggagaccggtgcggaaaataagatccaggagctcaacgcgatttacaaggaatacgaatccatcctcaaccaagatctcatggagcacgtgcgaaaggtcttccagaagcaggcaagcatggaggaggtgttccaccgcaggcaggccagcctgaagaagctggcggccaggcagacgcggcccgtgcagccggtggcccccagacccgaggcactggcaaagtcgccctgcccctccccaggcattcggcgaggctctgagaactccagctccgagggcggtgcgctccggagagggccctaccggagggccaagagtgagatgagtgagagccggcagggccgcggctcagcgggggaggaggaggaaagcctggccatcctgcgcaggcacgtgatgagcgagctcctggacacagaacgggcctacgtggaggagctgctgtgcgtcctggagggctacgccgcggagatggataacccactgatggctcacctcctgtcaacaggccttcacaacaagaaggatgttttgtttggaaacatggaggaaatctatcacttccacaacaggatattcctcagggagctggaaaactacactgactgcccagaactggttggaagatgctttctggagaggatggaagatttccagatctatgagaagtactgtcagaacaagccccgctctgagagcctgtggagacagtgctccgactgcccgtttttccaggaatgccagagaaagctggaccacaagctgagcctggactcctacctgctgaagccagtgcagaggatcaccaagtaccagctgctgctcaaggaaatgctgaaatacagcaggaactgcgagggggctgaggacctgcaggaggcgctgagctccatcctgggcatcctgaaggccgtgaacgactccatgcacctcatcgctatcaccggctatgacgggaatctcggcgacctgggcaagctgctgatgcagggctcgttcagcgtctggaccgaccacaagaggggccacaccaaggtgaaggagctggccaggttcaagcccatgcagcggcacctgttcctgcacgagaaggcagtgctcttctgcaagaagagggaggagaatggggaggggtatgagaaagctccctcctacagctacaagcagtccttaaacatggctgccgttggcattacggagaacgtgaagggagatgctaagaagttcgagatctggtacaacgcgcgcgaggaggtctacatcgtccaggcgccaactcctgagattaaagccgcgtgggtgaatgaaattcggaaagtgctgaccagccagctgcaggcttgtagagaagccagccagcaccgggcgctggagcagtcacagagcctgcccctgccggccccgaccagcaccagtccctcaagaggaaactcaaggaacatcaagaagctggaagaaaggaaaacagaccccctaagcctggagggatacgtcagctcagcgccactgacaaagccccccgaaaagggcaaaggttggagcaaaacgtcccactcactggaggcacctgaggacgacgggggctggtcaagtgcagaggagcagattaactcgtccgacgcagaggaggacggcgggttgggccccaagaagctggttccaggtaaatacacggtcgtggcggaccacgagaagggaggccccgatgcgctgcgcgtgaggagcggggacgtggtggagctggtgcaggagggcgacgagggcctctggtacgtcagggacccgaccactggcaaggagggctgggtgccggccagcagcctgtccgtccggctcggcccgtccggctcggcccagtgcctgagcagctcagagtcgagcccggggtcggccgtgctgagcaactcgtccagctgcagcgagggcggccaggcccccttctccgacctgcaggggtagcgcggcctcggcgccggagacccgcgcgctgtctggggctgcggtggcgtggggagggcgcggcccccggacgccccgaggaaggggcacctcaccgccccgacccagagcgcctggccgtgcgggctgcagaggacccctccggggcagaggcaggttccacggaagaccccggcccgctggggcttccccggagactccagagcccacagaggaggggccgcagggaacagccccgggcggcaggcgccgggcagcggcatctcgtcctggctccaccgtgctgcttctgcctccggacggtgctttcaggggacgcgcggaccgtggtggagctgcttccggagaagtggaggatcctctggccaacggcctgaggagagcggggcacggggtctctttagcttttacaagttttaggattttttcaagcagggatcaatcccgtggccattttttgtggtactttggcctcaattcttcaccaggaatcactgtgtttacatgaaatgacaatttgatactgtatttgatagaaaactatttttttgttaccggggtttacatagaagcacgttgtttataccactaagtgactttggcggggctctcccatggaaacggatggcactccctgaagctccctggtcacaggtggatgaaaacgtgtccgtgggtgacatcaggtggtgtctccaccaccaaaagcagttagaagccaaggagattcctttatctacctagggttcattttcaaaagaaaatttaaactataatttaaacaattaacgttcttttctacaaaaaaaatgcagggacttgatttttttaaagagcttcactgaattaggatatttttattgcttttaaagaaaatacaaagatgcagtttctgcagggtgtggcgtggaccagtgctgccgaccatagctcagagagccctgcccctgcctcactgcactgcagcctcctcggaggccgcacctccactccactccccacgcgccccctgcctcccacccaggtccacctgccacctggtgaccaccttgagtacagaagtgaaagtggggagagtattttattcaagtcacagcagaactggaaaaaaactcttctgttttaccaacttcttgtgtttcagaaacatattctgttcaaaacttttgaagccctttcggtgtctagtctgcagatgtttttgtatgtgtgcacctctgaccatgtgtgtacatatgtgtcttgctggaaaggacatattcgctgtccccgtgctgctgggagggccgcctcacagcctcacggttcccagccccagcacagtggaggcaggcgtggctgcattcccctcacgctaccctcccagcggcttgtagccgtcactggccagacctccagggtgcggaatcaaataggaagcatgcagagactcggcagcttttcctctgatgtgtaagttatttggaacgcgtgctgtgtcccgcgatgtccctgatgtactgtgcaggcgcggtgcctccgtctcgtcgcacagctgcgcgcccttgtgtgaccctccccataaaggcactttacagcttcatgtttcatccactgtcacttttttttaactgctgatgtaaatggaattttaaaagcagagttctttattgtatggatgacgtttgaataaatatcagcaactcctgccatctgcctttgtctgtcaagacacagaacgtctcagcggtcggggtttccagggccgcagtgcactgtgcttgcacatggtaagtcattgttgggacggaaaagaagccggcagtgggcagggcccagcgtgcggctcaggcaccgagcaaccgctttgctttcttctgtcagacggcgatgatgactaacacagca

SEQ ID NO: 339906 - DNA, 5554 bp, Homo sapiens
gtggggggggggggggggtcttgctacattgcccaggctcaaacttctgggctcaaatgatcctcctgcttctgcctcagcttctgcctcggcctccggagtagctgggactacaggcctgaaatactgtttctttaaggaagggcatgttacctataataccaaaccacaaaaggatagctgcggttttgggcgaggagagctcagagagtttcttgcatatggccctgtgatggcggccatggccctgcatagacacgagctggaatctgcaggtggcagccaggacgctgcgtgtgtcgagtgcacagtgtggcttggtgccaaccatggcgagggtggagagccccgtgcctgcagcgcgcgcttccctcactgggtcctgcgtccttgggcaggcgatgcccctgcggggaggggctggtccatccccggccagccacggacccacgcatggacccagcgacccacggacctgcttacctgggcgcggcgcgggtggcatgcggccacacggaaggggcgcgctgggctgctgcggcctctgcagcttctacacctgccacggggcggccggagatgaaatcatgcaccaggacatcgtcccgctctgtgctgccgacatccaggaccagctaaagaagcgctttgcttacctgtccggtgggcgggggcaggacggaagcccggttatcaccttccctgactacccggccttcagcgagattccggacaaggagttccagaatgtcatgacctacctcaccagcatccccagcctgcaggacgctggcatcggattcatcctggtgatagaccggcgacgggacaaatggacctccgtgaaggcgtccgtcctgcgcatcgcagcatctttcccggcaaacctgcagctcgtcctcgtgcttcgcccgacgggttttttccaaaggactctctccgacatcgctttcaaattcaatagagatgactttaagatgaaggtgccggtcataatgctgagctccgtaccagacttacacggttacatcgataagtcgcagctgaccgaggacctgggtgggaccctggactactgccactcccggtggctgtgccagcgcacggccatcgaaagtttcgccctcatggtgaagcagacggctcagatgctgcagtccttcgggaccgagctggctgaaacagagctgcccaatgacgtccagtcgacaagctcagtgctgtgtgcgcacacagagaagaaggacaaggcgaaggaggatttgaggctggcactgaaagaggggcacagtgtcctggagagcctcagggagctgcaggctgagggctcagagcccagtgtgaaccaggaccagcttgacaaccaggccaccgtgcagaggctcctggcccagctgaacgaaaccgaggctgccttcgatgagttctgggcaaagcatcagcagaaactggagcagtgtctgcagctccggcactttgagcagggcttccgggaggtcaaagccatcttggacgcagcgtcccagaagatagcaaccttcacagacatcggcaacagcctggcgcatgtggagcacctgctgagggacctggccagcttcgaggagaaatcaggcgtggccgtggagagggcccgggccctgtctctggacggcgagcagctcattgggaacaagcactacgcggtagactccatccgcccaaagtgccaggagctccggcacctctgtgaccagttctctgcggagatcgcaaggaggagggggctgctcagcaagtccctggagctgcaccgccgcctggagacgtccatgaagtggtgtgatgaagggatttacctgctggcctcacaacctgtggacaagtgccagtcccaggacggcgcggaggctgccctccaggaaatcgagaagtttttggagaccggtgcggaaaataagatccaggagctcaacgcgatttacaaggaatacgaatccatcctcaaccaagatctcatggagcacgtgcgaaaggtcttccagaagcaggcaagcatggaggaggtgttccaccgcaggcaggccagcctgaagaagctggcggccaggcagacgcggcccgtgcagccggtggcccccagacccgaggcactggcaaagtcgccctgcccctccccaggcattcggcgaggctctgagaactccagctccgagggcggtgcgctccggagagggccctaccggagggccaagagtgagatgagtgagagccggcagggccgcggctcagcgggggaggaggaggaaagcctggccatcctgcgcaggcacgtgatgagcgagctcctggacacagaacgggcctacgtggaggagctgctgtgcgtcctggagggctacgccgcggagatggataacccactgatggctcacctcctgtcaacaggccttcacaacaagaaggatgttttgtttggaaacatggaggaaatctatcacttccacaacaggatattcctcagggagctggaaaactacactgactgcccagaactggttggaagatgctttctggagaggatggaagatttccagatctatgagaagtactgtcagaacaagccccgctctgagagcctgtggagacagtgctccgactgcccgtttttccaggaatgccagagaaagctggaccacaagctgagcctggactcctacctgctgaagccagtgcagaggatcaccaagtaccagctgctgctcaaggaaatgctgaaatacagcaggaactgcgagggggctgaggacctgcaggaggcgctgagctccatcctgggcatcctgaaggccgtgaacgactccatgcacctcatcgctatcaccggctatgacgggaatctcggcgacctgggcaagctgctgatgcagggctcgttcagcgtctggaccgaccacaagaggggccacaccaaggtgaaggagctggccaggttcaagcccatgcagcggcacctgttcctgcacgagaaggcagtgctcttctgcaagaagagggaggagaatggggaggggtatgagaaagctccctcctacagctacaagcagtccttaaacatggctgccgttggcattacggagaacgtgaagggagatgctaagaagttcgagatctggtacaacgcgcgcgaggaggtctacatcgtccaggcgccaactcctgagattaaagccgcgtgggtgaatgaaattcggaaagtgctgaccagccagctgcaggcttgtagagaagccagccagcaccgggcgctggagcagtcacagagcctgcccctgccggccccgaccagcaccagtccctcaagaggaaactcaaggaacatcaagaagctggaagaaaggaaaacagaccccctaagcctggagggatacgtcagctcagcgccactgacaaagccccccgaaaagggcaaaggttggagcaaaacgtcccactcactggaggcacctgaggacgacgggggctggtcaagtgcagaggagcagattaactcgtccgacgcagaggaggacggcgggttgggccccaagaagctggttccaggtaaatacacggtcgtggcggaccacgagaagggaggccccgatgcgctgcgcgtgaggagcggggacgtggtggagctggtgcaggagggcgacgagggcctctggtacgtcagggacccgaccactggcaaggagggctgggtgccggccagcagcctgtccgtccggctcggcccgtccggctcggcccagtgcctgagcagctcagagtcgagcccggggtcggccgtgctgagcaactcgtccagctgcagcgagggcggccaggcccccttctccgacctgcaggggtagcgcggcctcggcgccggagacccgcgcgctgtctggggctgcggtggcgtggggagggcgcggcccccggacgccccgaggaaggggcacctcaccgccccgacccagagcgcctggccgtgcgggctgcagaggacccctccggggcagaggcaggttccacggaagaccccggcccgctggggcttccccggagactccagagcccacagaggaggggccgcagggaacagccccgggcggcaggcgccgggcagcggcatctcgtcctggctccaccgtgctgcttctgcctccggacggtgctttcaggggacgcgcggaccgtggtggagctgcttccggagaagtggaggatcctctggccaacggcctgaggagagcggggcacggggtctctttagcttttacaagttttaggattttttcaagcagggatcaatcccgtggccattttttgtggtactttggcctcaattcttcaccaggaatcactgtgtttacatgaaatgacaatttgatactgtatttgatagaaaactatttttttgttaccggggtttacatagaagcacgttgtttataccactaagtgactttggcggggctctcccatggaaacggatggcactccctgaagctccctggtcacaggtggatgaaaacgtgtccgtgggtgacatcaggtggtgtctccaccaccaaaagcagttagaagccaaggagattcctttatctacctagggttcattttcaaaagaaaatttaaactataatttaaacaattaacgttcttttctacaaaaaaaatgcagggacttgatttttttaaagagcttcactgaattaggatatttttattgcttttaaagaaaatacaaagatgcagtttctgcagggtgtggcgtggaccagtgctgccgaccatagctcagagagccctgcccctgcctcactgcactgcagcctcctcggaggccgcacctccactccactccccacgcgccccctgcctcccacccaggtccacctgccacctggtgaccaccttgagtacagaagtgaaagtggggagagtattttattcaagtcacagcagaactggaaaaaaactcttctgttttaccaacttcttgtgtttcagaaacatattctgttcaaaacttttgaagccctttcggtgtctagtctgcagatgtttttgtatgtgtgcacctctgaccatgtgtgtacatatgtgtcttgctggaaaggacatattcgctgtccccgtgctgctgggagggccgcctcacagcctcacggttcccagccccagcacagtggaggcaggcgtggctgcattccccataaaggcactttacagcttcatgtttcatccactgtcacttttttttaactgctgatgtaaatggaattttaaaagcagagttctttattgtatggatgacgtttgaataaatatcagcaactcctgccatctgcctttgtctgtcaagacacagaacgtctcagcggtcggggtttccagggccgcagtgcactgtgcttgcacatggtaagtcattgttgggacggaaaagaagccggcagtgggcagggcccagcgtgcggctcaggcaccgagcaaccgctttgctttcttctgtcagacggcgatgatgactaacacagca

SEQ ID NO: 339907 - DNA, 3799 bp, Homo sapiens
gtggggggggggggggggtcttgctacattgcccaggctcaaacttctgggctcaaatgatcctcctgcttctgcctcagcttctgcctcggcctccggagtagctgggactacaggcctgaaatactgtttctttaaggaagggcatgttacctataataccaaaccacaaaaggatagctgcggttttgggcgaggagagctcagagagtttcttgcatatggccctgtgatggcggccatggccctgcatagacacgagctggaatctgcaggtggcagccaggacgctgcgtgtgtcgagtgcacagtgtggcttggtgccaaccatggcgagggtggagagccccgtgcctgcagcgcgcgcttccctcactgggtcctgcgtccttgggcaggcgatgcccctgcggggaggggctggtccatccccggccagccacggacccacgcatggacccagcgacccacggacctgcttacctgggcgcggcgcgggtggcatgcggccacacggaaggggcgcgctgggctgctgcggcctctgcagcttctacacctgccacggggcggccggagatgaaatcatgcaccaggacatcgtcccgctctgtgctgccgacatccaggaccagctaaagaagcgctttgcttacctgtccggtgggcgggggcaggacggaagcccggttatcaccttccctgactacccggccttcagcgagattccggacaaggagttccagaatgtcatgacctacctcaccagcatccccagcctgcaggacgctggcatcggattcatcctggtgatagaccggcgacgggacaaatggacctccgtgaaggcgtccgtcctgcgcatcgcagcatctttcccggcaaacctgcagctcgtcctcgtgcttcgcccgacgggttttttccaaaggactctctccgacatcgctttcaaattcaatagagatgactttaagatgaaggtgccggtcataatgctgagctccgtaccagacttacacggttacatcgataagtcgcagctgaccgaggacctgggtgggaccctggactactgccactcccggtggctgtgccagcgcacggccatcgaaagtttcgccctcatggtgaagcagacggctcagatgctgcagtccttcgggaccgagctggctgaaacagagctgcccaatgacgtccagtcgacaagctcagtgctgtgtgcgcacacagagaagaaggacaaggcgaaggaggatttgaggctggcactgaaagaggggcacagtgtcctggagagcctcagggagctgcaggctgagggctcagagcccagtgtgaaccaggaccagcttgacaaccaggccaccgtgcagaggctcctggcccagctgaacgaaaccgaggctgccttcgatgagttctgggcaaagcatcagcagaaactggagcagtgtctgcagctccggcactttgagcagggcttccgggaggtcaaagccatcttggacgcagcgtcccagaagatagcaaccttcacagacatcggcaacagcctggcgcatgtggagcacctgctgagggacctggccagcttcgaggagaaatcaggcgtggccgtggagagggcccgggccctgtctctggacggcgagcagctcattgggaacaagcactacgcggtagactccatccgcccaaagtgccaggagctccggcacctctgtgaccagttctctgcggagatcgcaaggaggagggggctgctcagcaagtccctggagctgcaccgccgcctggagacgtccatgaagtggtgtgatgaagggatttacctgctggcctcacaacctgtggacaagtgccagtcccaggacggcgcggaggctgccctccaggaaatcgagaagtttttggagaccggtgcggaaaataagatccaggagctcaacgcgatttacaaggaatacgaatccatcctcaaccaagatctcatggagcacgtgcgaaaggtcttccagaagcaggcaagcatggaggaggtgttccaccgcaggcaggccagcctgaagaagctggcggccaggcagacgcggcccgtgcagccggtggcccccagacccgaggcactggcaaagtcgccctgcccctccccaggcattcggcgaggctctgagaactccagctccgagggcggtgcgctccggagagggccctaccggagggccaagagtgagatgagtgagagccggcagggccgcggctcagcgggggaggaggaggaaagcctggccatcctgcgcaggcacgtgatgagcgagctcctggacacagaacgggcctacgtggaggagctgctgtgcgtcctggagggctacgccgcggagatggataacccactgatggctcacctcctgtcaacaggccttcacaacaagaaggatgttttgtttggaaacatggaggaaatctatcacttccacaacaggatattcctcagggagctggaaaactacactgactgcccagaactggttggaagatgctttctggagaggatggaagatttccagatctatgagaagtactgtcagaacaagccccgctctgagagcctgtggagacagtgctccgactgcccgtttttccaggaatgccagagaaagctggaccacaagctgagcctggactcctacctgctgaagccagtgcagaggatcaccaagtaccagctgctgctcaaggaaatgctgaaatacagcaggaactgcgagggggctgaggacctgcaggaggcgctgagctccatcctgggcatcctgaaggccgtgaacgactccatgcacctcatcgctatcaccggctatgacgggaatctcggcgacctgggcaagctgctgatgcagggctcgttcagcgtctggaccgaccacaagaggggccacaccaaggtgaaggagctggccaggttcaagcccatgcagcggcacctgttcctgcacgagaaggcagtgctcttctgcaagaagagggaggagaatggggaggggtatgagaaagctccctcctacagctacaagcagtccttaaacatggctgccgttggcattacggagaacgtgaagggagatgctaagaagttcgagatctggtacaacgcgcgcgaggaggtctacatcgtccaggcgccaactcctgagattaaagccgcgtgggtgaatgaaattcggaaagtgctgaccagccagctgcaggcttgtagagaagccagccagcaccgggcgctggagcagtcacagagcctgcccctgccggccccgaccagcaccagtccctcaagaggaaactcaaggaacatcaagaagctggaagaaaggaaaacagaccccctaagcctggagggatacgtcagctcagcgccactgacaaagccccccgaaaagggcaaaggttggagcaaaacgtcccactcactggaggcacctgaggacgacgggggctggtcaagtgcagaggagcagattaactcgtccgacgcagaggaggacggcgggttgggccccaagaagctggtgcccacccagcctcctgtagagcccactcgtgggtgcaccttcctcagaggagacagtccccacccccctaccctttatgtcatagaatgctgtcactgagccttcctaactatacatacaattctcattttgtaagaaaatggaactgctaagcatggatttgcatttgaaaaaacattcattgttaatgtcagaagcaagaaaaagctgccatgtgttaa

SEQ ID NO: 339908 - DNA, 1338 bp, Homo sapiens
  misc_feature (1307)..(1307): n is a, c, g, or t
  misc_feature (1315)..(1315): n is a, c, g, or t
gtggggggggggggggggtcttgctacattgcccaggctcaaacttctgggctcaaatgatcctcctgcttctgcctcagcttctgcctcggcctccggagtagctgggactacaggcctgaaatactgtttctttaaggaagggcatgttacctataataccaaaccacaaaaggatagctgcggttttgggcgaggagagctcagagagtttcttgcatatggccctgtgatggcggccatggccctgcatagacacgagctggaatctgcaggtggcagccaggacgctgcgtgtgtcgagtgcacagtgtggcttggtgccaaccatggcgagggtggagagccccgtgcctgcagcgcgcgcttccctcactgggtcctgcgtccttgggcaggcgatgcccctgcggggaggggctggtccatccccggccagccacggacccacgcatggacccagcgacccacggacctgcttacctgggcgcggcgcgggtggcatgcggccacacggaaggggcgcgctgggctgctgcggcctctgcagcttctacacctgccacggggcggccggagatgaaatcatgcaccaggacatcgtcccgctctgtgctgccgacatccaggaccagctaaagaagcgctttgcttacctgtccggtgggcgggggcaggacggaagcccggttatcaccttccctgactacccggccttcagcgagattccggacaaggagttccagaatgtcatgacctacctcaccagcatccccagcctgcaggacgctggcatcggattcatcctggtgatagaccggcgacgggacaaatggacctccgtgaaggcgtccgtcctgcgcatcgcagcatctttcccggcaaacctgcagctcgtcctcgtgcttcgcccgacgggttttttccaaaggactctctccgacatcgctttcaaattcaatagagatgactttaagatgaaggtgccggtcataatgctgagctccgtaccagacttacacggttacatcgataagtcgcagctgaccgaggacctgggtgggaccctggactactgccactcccggtggctgtgccagcgcacggccatcgaaagtttcgccctcatggtgaagcagacggctcagatgctgcagtccttcgggaccgagctggctgaaacagagctgcccaatgacgtccagtcgacaagctcagtgctgtgtgcgcacacagagaagaaggacaaggcgaagaggaaggaatttgaaggcttggcacttgaaaagaaaggggcacaagtggtncttggaanaagccttaaagggtggtttgcaa

SEQ ID NO: 339909 - DNA, 1198 bp, Homo sapiens
gcactcaaaggctcaactccccacaggcgtgtgttgccaggggcagaaggcttggcccctgggtcagcatactctccggacagctcatccctgccagcccaggtccctgcagccctggggctagcacaggggatgcggacctcggcctaggtccccacagctgtggggctggctcgggggacggatctctgctaagcatggcccctgccagctcaggtccctgccactcagtggatgggactttggcggagtgtggggcccctgcagggagggtctagacaagcaacaccaggaacctgaagcctccctggccggggctcagctgtcgccaggatcgcaacagttaagctgcctgcagcaggataagtgagccgatgctgctccttaatcagggacatcgaatcggaggccttgggaggagcagccggctggctgccctgcagaggccaggtctgcccagcaaacccaggaaggtgtggcgtccccgcttcgcggccaagatggtgctggtgctgcgccatcctttgtgtgcccgggaagggcgttccgggagccgggtcgggggctcctgactcgcattgggcagcatgacggtgcgccggctgtcactgctgtgccgggacctctgggcgctgtggctgctgctgaaggccggcgcagatgaaatcatgcaccaggacatcgtcccgctctgtgctgccgacatccaggaccagctaaagaagcgctttgcttacctgtccggtgggcgggggcaggacggaagcccggttatcaccttccctgactacccggccttcagcgagattccggacaaggagttccagaatgtcatgacctacctcaccagcatccccagcctgcaggacgctggcatcggattcatcctggtgatagaccggcgacgggacaaatggacctccgtgaaggcgtccgtcctgcgcatcgcacttagagctcgttgcacggagtcagaacccctgcatcccggtggctcaggcatttgagtgaaggtcggatcaggagggaggggagatgcagctgccccacgcatggaggagaagagctgtgagctgcagcagcctcgtgtctttttcctctcaactttcagttcagaaaaatttcagacctacagaaaacttgggagagtctcacagtgaacaaacctcagctgtggccataaacaaagtgcccattc

SEQ ID NO: 339910 - DNA, 5753 bp, Homo sapiens
gtggggggggggggggggtcttgctacattgcccaggctcaaacttctgggctcaaatgatcctcctgcttctgcctcagcttctgcctcggcctccggagtagctgggactacaggcctgaaatactgtttctttaaggaagggcatgttacctataataccaaaccacaaaaggatagctgcggttttgggcgaggagagctcagagagtttcttgcatatggccctgtgatggcggccatggccctgcatagacacgagctggaatctgcaggtggcagccaggacgctgcgtgtgtcgagtgcacagtgtggcttggtgccaaccatggcgagggtggagagccccgtgcctgcagcgcgcgcttccctcactgggtcctgcgtccttgggcaggcgatgcccctgcggggaggggctggtccatccccggccagccacggacccacgcatggacccagcgacccacggacctgcttacctgggcgcggcgcgggtggcatgcggccacacggaaggggcgcgctgggctgctgcggcctctgcagcttctacacctgccacggggcggccggagatgaaatcatgcaccaggacatcgtcccgctctgtgctgccgacatccaggaccagctaaagaagcgctttgcttacctgtccggtgggcgggggcaggacggaagcccggttatcaccttccctgactacccggccttcagcgagattccggacaaggagttccagaatgtcatgacctacctcaccagcatccccagcctgcaggacgctggcatcggattcatcctggtgatagaccggcgacgggacaaatggacctccgtgaaggcgtccgtcctgcgcatcgcagcatctttcccggcaaacctgcagctcgtcctcgtgcttcgcccgacgggttttttccaaaggactctctccgacatcgctttcaaattcaatagagatgactttaagatgaaggtgccggtcataatgctgagctccgtaccagacttacacggttacatcgataagtcgcagctgaccgaggacctgggtgggaccctggactactgccactcccggtggctgtgccagcgcacggccatcgaaagtttcgccctcatggtgaagcagacggctcagatgctgcagtccttcgggaccgagctggctgaaacagagctgcccaatgacgtccagtcgacaagctcagtgctgtgtgcgcacacagagaagaaggacaaggcgaaggaggatttgaggctggcactgaaagaggggcacagtgtcctggagagcctcagggagctgcaggctgagggctcagagcccagtgtgaaccaggaccagcttgacaaccaggccaccgtgcagaggctcctggcccagctgaacgaaaccgaggctgccttcgatgagttctgggcaaagcatcagcagaaactggagcagtgtctgcagctccggcactttgagcagggcttccgggaggtcaaagccatcttggacgcagcgtcccagaagatagcaaccttcacagacatcggcaacagcctggcgcatgtggagcacctgctgagggacctggccagcttcgaggagaaatcaggcgtggccgtggagagggcccgggccctgtctctggacggcgagcagctcattgggaacaagcactacgcggtagactccatccgcccaaagtgccaggagctccggcacctctgtgaccagttctctgcggagatcgcaaggaggagggggctgctcagcaagtccctggagctgcaccgccgcctggagacgtccatgaagtggtgtgatgaagggatttacctgctggcctcacaacctgtggacaagtgccagtcccaggacggcgcggaggctgccctccaggaaatcgagaagtttttggagaccggtgcggaaaataagatccaggagctcaacgcgatttacaaggaatacgaatccatcctcaaccaagatctcatggagcacgtgcgaaaggtcttccagaagcaggcaagcatggaggaggtgttccaccgcaggcaggccagcctgaagaagctggcggccaggcagacgcggcccgtgcagccggtggcccccagacccgaggcactggcaaagtcgccctgcccctccccaggcattcggcgaggctctgagaactccagctccgagggcggtgcgctccggagagggccctaccggagggccaagagtgagatgagtgagagccggcagggccgcggctcagcgggggaggaggaggaaagcctggccatcctgcgcaggcacgtgatgagcgagctcctggacacagaacgggcctacgtggaggagctgctgtgcgtcctggagggctacgccgcggagatggataacccactgatggctcacctcctgtcaacaggccttcacaacaagaaggatgttttgtttggaaacatggaggaaatctatcacttccacaacaggatattcctcagggagctggaaaactacactgactgcccagaactggttggaagatgctttctggagaggatggaagatttccagatctatgagaagtactgtcagaacaagccccgctctgagagcctgtggagacagtgctccgactgcccgtttttccaggaatgccagagaaagctggaccacaagctgagcctggactcctacctgctgaagccagtgcagaggatcaccaagtaccagctgctgctcaaggaaatgctgaaatacagcaggaactgcgagggggctgaggacctgcaggaggcgctgagctccatcctgggcatcctgaaggccgtgaacgactccatgcacctcatcgctatcaccggctatgacgggaatctcggcgacctgggcaagctgctgatgcagggctcgttcagcgtctggaccgaccacaagaggggccacaccaaggtgaaggagctggccaggttcaagcccatgcagcggcacctgttcctgcacgagaaggcagtgctcttctgcaagaagagggaggagaatggggaggggtatgagaaagctccctcctacagctacaagcagtccttaaacatggctgccgttggcattacggagaacgtgaagggagatgctaagaagttcgagatctggtacaacgcgcgcgaggaggtctacatcgtccaggcgccaactcctgagattaaagccgcgtgggtgaatgaaattcggaaagtgctgaccagccagctgcaggcttgtagagaagccagccagcaccgggcgctggagcagtcacagagcctgcccctgccggccccgaccagcaccagtccctcaagaggaaactcaaggaacatcaagaagctggaagaaaggaaaacagaccccctaagcctggagggatacgtcagctcagcgccactgacaaagccccccgaaaagggcaaaggttggagcaaaacgtcccactcactggaggcacctgaggacgacgggggctggtcaagtgcagaggagcagattaactcgtccgacgcagaggaggacggcgggttgggccccaagaagctggttccaggtaaatacacggtcgtggcggaccacgagaagggaggccccgatgcgctgcgcgtgaggagcggggacgtggtggagctggtgcaggagggcgacgagggcctctggtaagaccccgcgctcagccccggactgccccgcacgtggctgccgctgaccctcgccccttgcaggtacgtcagggacccgaccactggcaaggagggctgggtgccggccagcagcctgtccgtccggctcggcccgtccggctcggcccagtgcctgagcagctcaggtaaggcccacgtgccccgagcccacccgtgacgctgccaagggcccgggcgaggaagctgccccgtgtgtgcccggcagagccgacgccgaagcccgtccccgcctgatctccccgcagagtcgagcccggggtcggccgtgctgagcaactcgtccagctgcagcgagggcggccaggcccccttctccgacctgcaggggtagcgcggcctcggcgccggagacccgcgcgctgtctggggctgcggtggcgtggggagggcgcggcccccggacgccccgaggaaggggcacctcaccgccccgacccagagcgcctggccgtgcgggctgcagaggacccctccggggcagaggcaggttccacggaagaccccggcccgctggggcttccccggagactccagagcccacagaggaggggccgcagggaacagccccgggcggcaggcgccgggcagcggcatctcgtcctggctccaccgtgctgcttctgcctccggacggtgctttcaggggacgcgcggaccgtggtggagctgcttccggagaagtggaggatcctctggccaacggcctgaggagagcggggcacggggtctctttagcttttacaagttttaggattttttcaagcagggatcaatcccgtggccattttttgtggtactttggcctcaattcttcaccaggaatcactgtgtttacatgaaatgacaatttgatactgtatttgatagaaaactatttttttgttaccggggtttacatagaagcacgttgtttataccactaagtgactttggcggggctctcccatggaaacggatggcactccctgaagctccctggtcacaggtggatgaaaacgtgtccgtgggtgacatcaggtggtgtctccaccaccaaaagcagttagaagccaaggagattcctttatctacctagggttcattttcaaaagaaaatttaaactataatttaaacaattaacgttcttttctacaaaaaaaatgcagggacttgatttttttaaagagcttcactgaattaggatatttttattgcttttaaagaaaatacaaagatgcagtttctgcagggtgtggcgtggaccagtgctgccgaccatagctcagagagccctgcccctgcctcactgcactgcagcctcctcggaggccgcacctccactccactccccacgcgccccctgcctcccacccaggtccacctgccacctggtgaccaccttgagtacagaagtgaaagtggggagagtattttattcaagtcacagcagaactggaaaaaaactcttctgttttaccaacttcttgtgtttcagaaacatattctgttcaaaacttttgaagccctttcggtgtctagtctgcagatgtttttgtatgtgtgcacctctgaccatgtgtgtacatatgtgtcttgctggaaaggacatattcgctgtccccgtgctgctgggagggccgcctcacagcctcacggttcccagccccagcacagtggaggcaggcgtggctgcattcccctcacgctaccctcccagcggcttgtagccgtcactggccagacctccagggtgcggaatcaaataggaagcatgcagagactcggcagcttttcctctgatgtgtaagttatttggaacgcgtgctgtgtcccgcgatgtccctgatgtactgtgcaggcgcggtgcctccgtctcgtcgcacagctgcgcgcccttgtgtgaccctccccataaaggcactttacagcttcatgtttcatccactgtcacttttttttaactgctgatgtaaatggaattttaaaagcagagttctttattgtatggatgacgtttgaataaatatcagcaactcctgc

SEQ ID NO: 339911 - DNA, 1681 bp, Homo sapiens
gcactcaaaggctcaactccccacaggcgtgtgttgccaggggcagaaggcttggcccctgggtcagcatactctccggacagctcatccctgccagcccaggtccctgcagccctggggctagcacaggggatgcggacctcggcctaggtccccacagctgtggggctggctcgggggacggatctctgctaagcatggcccctgccagctcaggtccctgccactcagtggatgggactttggcggagtgtggggcccctgcagggagggtctagacaagcaacaccaggaacctgaagcctccctggccggggctcagctgtcgccaggatcgcaacagttaagctgcctgcagcaggataagtgagccgatgctgctccttaatcagggacatcgaatcggaggccttgggaggagcagccggctggctgccctgcagaggccaggtctgcccagcaaacccaggaaggtgtggcgtccccgcttcgcggccaagatggtgctggtgctgcgccatcctttgtgtgcccgggaagggcgttccgggagccgggtcgggggctcctgactcgcattgggcagcatgacggtgcgccggctgtcactgctgtgccgggacctctgggcgctgtggctgctgctgaaggccggcgcaggtgcgtggggcgcgggcgggtcctcgcctccccggaaggtgttgtggggcgacagtgcggggacgccgggcgggggtggacgttctgggcccagccctgtcctcagaggctgctggggcagaagcccggggctgggggatgccggggatggatgttggggtgggtgcctccgagaccagaggagccctgttccttggcagggaaggtgtgcacgggccttgcccgatggatggtttagggccatggccctggggtccctggtgagcagtggggccgcctctgcccttggcctgtgagggactgtctgtgctggtcccagaaggctgggatcacctttccactggctcctttgttcgaggtttttcatagacaggctatgtggacaaatgagggcagcgcccacgtctggctggtggaggggctgcggctcctccttggaggggacgcctggccactgctgtccccacaatggggccacccgtggtgcaaggcgtgacaagctgccctctctaggtaagcaggacttgggaggcccctggccaagcctgtggacccggctgggcggcctctgtggtctcaggtttgggtgtgtttggtctggtcagggctcaggggctgctggtccacactggccccatcctgacaattggagctttggggcaaggtccctggagaaggggtcacgtggggaggaaacagcctgggttttgttgatgcttttctaagaatggagtactcgttttcaagagatttgtcctaattatattttccagcgggtacttatgccaagtattgatgaataattcataaaataagcatctttgtgaattttagtgaatcagaccttaactatcaacggcaatgaatgaacatctaaagtttccaattttaaagtaaagaactggctgggtacagcagttcacgcctgtaatcccagcactttgggaggccaaggctagaggatcgcttgagcccaggagtttgagatcagcctgggcaacataccaagacctcatctgtt

SEQ ID NO: 339912 - DNA, 5093 bp, Homo sapiens
agcaaatgactgagctcgggagagatggttctgcctcaatctgtgactcgaggtggttggtgttaggctgagaaataagaacacaccaaaagtgcctgcccttccgtagatgagagcaggttctgggactgcggggatggggctgccggggcccccgtgtgccatgcctctcacctggtattgcagaaatggcatcatgaatatgggggatcgctctcccaagaggttttctgagggatttcgtgggcagccggcttcccacctgcacacattaacggcggcgtctcttcctcactgcagcctgcctgcaggacgctggcatcggattcatcctggtgatagaccggcgacgggacaaatggacctccgtgaaggcgtccgtcctgcgcatcgcagcatctttcccggcaaacctgcagctcgtcctcgtgcttcgcccgacgggttttttccaaaggactctctccgacatcgctttcaaattcaatagagatgactttaagatgaaggtgccggtcataatgctgagctccgtaccagacttacacggttacatcgataagtcgcagctgaccgaggacctgggtgggaccctggactactgccactcccggtggctgtgccagcgcacggccatcgaaagtttcgccctcatggtgaagcagacggctcagatgctgcagtccttcgggaccgagctggctgaaacagagctgcccaatgacgtccagtcgacaagctcagtgctgtgtgcgcacacagagaagaaggacaaggcgaaggaggatttgaggctggcactgaaagaggggcacagtgtcctggagagcctcagggagctgcaggctgagggctcagagcccagtgtgaaccaggaccagcttgacaaccaggccaccgtgcagaggctcctggcccagctgaacgaaaccgaggctgccttcgatgagttctgggcaaagcatcagcagaaactggagcagtgtctgcagctccggcactttgagcagggcttccgggaggtcaaagccatcttggacgcagcgtcccagaagatagcaaccttcacagacatcggcaacagcctggcgcatgtggagcacctgctgagggacctggccagcttcgaggagaaatcaggcgtggccgtggagagggcccgggccctgtctctggacggcgagcagctcattgggaacaagcactacgcggtagactccatccgcccaaagtgccaggagctccggcacctctgtgaccagttctctgcggagatcgcaaggaggagggggctgctcagcaagtccctggagctgcaccgccgcctggagacgtccatgaagtggtgtgatgaagggatttacctgctggcctcacaacctgtggacaagtgccagtcccaggacggcgcggaggctgccctccaggaaatcgagaagtttttggagaccggtgcggaaaataagatccaggagctcaacgcgatttacaaggaatacgaatccatcctcaaccaagatctcatggagcacgtgcgaaaggtcttccagaagcaggcaagcatggaggaggtgttccaccgcaggcaggccagcctgaagaagctggcggccaggcagacgcggcccgtgcagccggtggcccccagacccgaggcactggcaaagtcgccctgcccctccccaggcattcggcgaggctctgagaactccagctccgagggcggtgcgctccggagagggccctaccggagggccaagagtgagatgagtgagagccggcagggccgcggctcagcgggggaggaggaggaaagcctggccatcctgcgcaggcacgtgatgagcgagctcctggacacagaacgggcctacgtggaggagctgctgtgcgtcctggagggctacgccgcggagatggataacccactgatggctcacctcctgtcaacaggccttcacaacaagaaggatgttttgtttggaaacatggaggaaatctatcacttccacaacaggatattcctcagggagctggaaaactacactgactgcccagaactggttggaagatgctttctggagaggatggaagatttccagatctatgagaagtactgtcagaacaagccccgctctgagagcctgtggagacagtgctccgactgcccgtttttccaggaatgccagagaaagctggaccacaagctgagcctggactcctacctgctgaagccagtgcagaggatcaccaagtaccagctgctgctcaaggaaatgctgaaatacagcaggaactgcgagggggctgaggacctgcaggaggcgctgagctccatcctgggcatcctgaaggccgtgaacgactccatgcacctcatcgctatcaccggctatgacgggaatctcggcgacctgggcaagctgctgatgcagggctcgttcagcgtctggaccgaccacaagaggggccacaccaaggtgaaggagctggccaggttcaagcccatgcagcggcacctgttcctgcacgagaaggcagtgctcttctgcaagaagagggaggagaatggggaggggtatgagaaagctccctcctacagctacaagcagtccttaaacatggctgccgttggcattacggagaacgtgaagggagatgctaagaagttcgagatctggtacaacgcgcgcgaggaggtctacatcgtccaggcgccaactcctgagattaaagccgcgtgggtgaatgaaattcggaaagtgctgaccagccagctgcaggcttgtagagaagccagccagcaccgggcgctggagcagtcacagagcctgcccctgccggccccgaccagcaccagtccctcaagaggaaactcaaggaacatcaagaagctggaagaaaggaaaacagaccccctaagcctggagggatacgtcagctcagcgccactgacaaagccccccgaaaagggcaaaggttggagcaaaacgtcccactcactggaggcacctgaggacgacgggggctggtcaagtgcagaggagcagattaactcgtccgacgcagaggaggacggcgggttgggccccaagaagctggttccaggtaaatacacggtcgtggcggaccacgagaagggaggccccgatgcgctgcgcgtgaggagcggggacgtggtggagctggtgcaggagggcgacgagggcctctggtacgtcagggacccgaccactggcaaggagggctgggtgccggccagcagcctgtccgtccggctcggcccgtccggctcggcccagtgcctgagcagctcagagtcgagcccggggtcggccgtgctgagcaactcgtccagctgcagcgagggcggccaggcccccttctccgacctgcaggggtagcgcggcctcggcgccggagacccgcgcgctgtctggggctgcggtggcgtggggagggcgcggcccccggacgccccgaggaaggggcacctcaccgccccgacccagagcgcctggccgtgcgggctgcagaggacccctccggggcagaggcaggttccacggaagaccccggcccgctggggcttccccggagactccagagcccacagaggaggggccgcagggaacagccccgggcggcaggcgccgggcagcggcatctcgtcctggctccaccgtgctgcttctgcctccggacggtgctttcaggggacgcgcggaccgtggtggagctgcttccggagaagtggaggatcctctggccaacggcctgaggagagcggggcacggggtctctttagcttttacaagttttaggattttttcaagcagggatcaatcccgtggccattttttgtggtactttggcctcaattcttcaccaggaatcactgtgtttacatgaaatgacaatttgatactgtatttgatagaaaactatttttttgttaccggggtttacatagaagcacgttgtttataccactaagtgactttggcggggctctcccatggaaacggatggcactccctgaagctccctggtcacaggtggatgaaaacgtgtccgtgggtgacatcaggtggtgtctccaccaccaaaagcagttagaagccaaggagattcctttatctacctagggttcattttcaaaagaaaatttaaactataatttaaacaattaacgttcttttctacaaaaaaaatgcagggacttgatttttttaaagagcttcactgaattaggatatttttattgcttttaaagaaaatacaaagatgcagtttctgcagggtgtggcgtggaccagtgctgccgaccatagctcagagagccctgcccctgcctcactgcactgcagcctcctcggaggccgcacctccactccactccccacgcgccccctgcctcccacccaggtccacctgccacctggtgaccaccttgagtacagaagtgaaagtggggagagtattttattcaagtcacagcagaactggaaaaaaactcttctgttttaccaacttcttgtgtttcagaaacatattctgttcaaaacttttgaagccctttcggtgtctagtctgcagatgtttttgtatgtgtgcacctctgaccatgtgtgtacatatgtgtcttgctggaaaggacatattcgctgtccccgtgctgctgggagggccgcctcacagcctcacggttcccagccccagcacagtggaggcaggcgtggctgcattcccctcacgctaccctcccagcggcttgtagccgtcactggccagacctccagggtgcggaatcaaataggaagcatgcagagactcggcagcttttcctctgatgtgtaagttatttggaacgcgtgctgtgtcccgcgatgtccctgatgtactgtgcaggcgcggtgcctccgtctcgtcgcacagctgcgcgcccttgtgtgaccctccccataaaggcactttacagcttcatgtttcatccactgtcacttttttttaactgctgatgtaaatggaattttaaaagcagagttctttattgtatggatgacgtttgaataaatatcagcaactcctgc

SEQ ID NO: 339913 - DNA, 5175 bp, Homo sapiens
accacgggcggcagcctcatgtttgactgttggagatttatcctgtgcaagagacctggaagcaacagttattcttccccacaacggcccaatgaggccaaaaaggaggaaacggatcaccaaattgatgtgtctgacgtcatcaggcttgttcaagacacaccggaggcgacggccatggccacagatgaaatcatgcaccaggacatcgtcccgctctgtgctgccgacatccaggaccagctaaagaagcgctttgcttacctgtccggtgggcgggggcaggacggaagcccggttatcaccttccctgactacccggccttcagcgagattccggacaaggagttccagaatgtcatgacctacctcaccagcatccccagcctgcaggacgctggcatcggattcatcctggtgatagaccggcgacgggacaaatggacctccgtgaaggcgtccgtcctgcgcatcgcagcatctttcccggcaaacctgcagctcgtcctcgtgcttcgcccgacgggttttttccaaaggactctctccgacatcgctttcaaattcaatagagatgactttaagatgaaggtgccggtcataatgctgagctccgtaccagacttacacggttacatcgataagtcgcagctgaccgaggacctgggtgggaccctggactactgccactcccggtggctgtgccagcgcacggccatcgaaagtttcgccctcatggtgaagcagacggctcagatgctgcagtccttcgggaccgagctggctgaaacagagctgcccaatgacgtccagtcgacaagctcagtgctgtgtgcgcacacagagaagaaggacaaggcgaaggaggatttgaggctggcactgaaagaggggcacagtgtcctggagagcctcagggagctgcaggctgagggctcagagcccagtgtgaaccaggaccagcttgacaaccaggccaccgtgcagaggctcctggcccagctgaacgaaaccgaggctgccttcgatgagttctgggcaaagcatcagcagaaactggagcagtgtctgcagctccggcactttgagcagggcttccgggaggtcaaagccatcttggacgcagcgtcccagaagatagcaaccttcacagacatcggcaacagcctggcgcatgtggagcacctgctgagggacctggccagcttcgaggagaaatcaggcgtggccgtggagagggcccgggccctgtctctggacggcgagcagctcattgggaacaagcactacgcggtagactccatccgcccaaagtgccaggagctccggcacctctgtgaccagttctctgcggagatcgcaaggaggagggggctgctcagcaagtccctggagctgcaccgccgcctggagacgtccatgaagtggtgtgatgaagggatttacctgctggcctcacaacctgtggacaagtgccagtcccaggacggcgcggaggctgccctccaggaaatcgagaagtttttggagaccggtgcggaaaataagatccaggagctcaacgcgatttacaaggaatacgaatccatcctcaaccaagatctcatggagcacgtgcgaaaggtcttccagaagcaggcaagcatggaggaggtgttccaccgcaggcaggccagcctgaagaagctggcggccaggcagacgcggcccgtgcagccggtggcccccagacccgaggcactggcaaagtcgccctgcccctccccaggcattcggcgaggctctgagaactccagctccgagggcggtgcgctccggagagggccctaccggagggccaagagtgagatgagtgagagccggcagggccgcggctcagcgggggaggaggaggaaagcctggccatcctgcgcaggcacgtgatgagcgagctcctggacacagaacgggcctacgtggaggagctgctgtgcgtcctggagggctacgccgcggagatggataacccactgatggctcacctcctgtcaacaggccttcacaacaagaaggatgttttgtttggaaacatggaggaaatctatcacttccacaacaggatattcctcagggagctggaaaactacactgactgcccagaactggttggaagatgctttctggagaggatggaagatttccagatctatgagaagtactgtcagaacaagccccgctctgagagcctgtggagacagtgctccgactgcccgtttttccaggaatgccagagaaagctggaccacaagctgagcctggactcctacctgctgaagccagtgcagaggatcaccaagtaccagctgctgctcaaggaaatgctgaaatacagcaggaactgcgagggggctgaggacctgcaggaggcgctgagctccatcctgggcatcctgaaggccgtgaacgactccatgcacctcatcgctatcaccggctatgacgggaatctcggcgacctgggcaagctgctgatgcagggctcgttcagcgtctggaccgaccacaagaggggccacaccaaggtgaaggagctggccaggttcaagcccatgcagcggcacctgttcctgcacgagaaggcagtgctcttctgcaagaagagggaggagaatggggaggggtatgagaaagctccctcctacagctacaagcagtccttaaacatggctgccgttggcattacggagaacgtgaagggagatgctaagaagttcgagatctggtacaacgcgcgcgaggaggtctacatcgtccaggcgccaactcctgagattaaagccgcgtgggtgaatgaaattcggaaagtgctgaccagccagctgcaggcttgtagagaagccagccagcaccgggcgctggagcagtcacagagcctgcccctgccggccccgaccagcaccagtccctcaagaggaaactcaaggaacatcaagaagctggaagaaaggaaaacagaccccctaagcctggagggatacgtcagctcagcgccactgacaaagccccccgaaaagggcaaaggttggagcaaaacgtcccactcactggaggcacctgaggacgacgggggctggtcaagtgcagaggagcagattaactcgtccgacgcagaggaggacggcgggttgggccccaagaagctggttccaggtaaatacacggtcgtggcggaccacgagaagggaggccccgatgcgctgcgcgtgaggagcggggacgtggtggagctggtgcaggagggcgacgagggcctctggtacgtcagggacccgaccactggcaaggagggctgggtgccggccagcagcctgtccgtccggctcggcccgtccggctcggcccagtgcctgagcagctcagagtcgagcccggggtcggccgtgctgagcaactcgtccagctgcagcgagggcggccaggcccccttctccgacctgcaggggtagcgcggcctcggcgccggagacccgcgcgctgtctggggctgcggtggcgtggggagggcgcggcccccggacgccccgaggaaggggcacctcaccgccccgacccagagcgcctggccgtgcgggctgcagaggacccctccggggcagaggcaggttccacggaagaccccggcccgctggggcttccccggagactccagagcccacagaggaggggccgcagggaacagccccgggcggcaggcgccgggcagcggcatctcgtcctggctccaccgtgctgcttctgcctccggacggtgctttcaggggacgcgcggaccgtggtggagctgcttccggagaagtggaggatcctctggccaacggcctgaggagagcggggcacggggtctctttagcttttacaagttttaggattttttcaagcagggatcaatcccgtggccattttttgtggtactttggcctcaattcttcaccaggaatcactgtgtttacatgaaatgacaatttgatactgtatttgatagaaaactatttttttgttaccggggtttacatagaagcacgttgtttataccactaagtgactttggcggggctctcccatggaaacggatggcactccctgaagctccctggtcacaggtggatgaaaacgtgtccgtgggtgacatcaggtggtgtctccaccaccaaaagcagttagaagccaaggagattcctttatctacctagggttcattttcaaaagaaaatttaaactataatttaaacaattaacgttcttttctacaaaaaaaatgcagggacttgatttttttaaagagcttcactgaattaggatatttttattgcttttaaagaaaatacaaagatgcagtttctgcagggtgtggcgtggaccagtgctgccgaccatagctcagagagccctgcccctgcctcactgcactgcagcctcctcggaggccgcacctccactccactccccacgcgccccctgcctcccacccaggtccacctgccacctggtgaccaccttgagtacagaagtgaaagtggggagagtattttattcaagtcacagcagaactggaaaaaaactcttctgttttaccaacttcttgtgtttcagaaacatattctgttcaaaacttttgaagccctttcggtgtctagtctgcagatgtttttgtatgtgtgcacctctgaccatgtgtgtacatatgtgtcttgctggaaaggacatattcgctgtccccgtgctgctgggagggccgcctcacagcctcacggttcccagccccagcacagtggaggcaggcgtggctgcattcccctcacgctaccctcccagcggcttgtagccgtcactggccagacctccagggtgcggaatcaaataggaagcatgcagagactcggcagcttttcctctgatgtgtaagttatttggaacgcgtgctgtgtcccgcgatgtccctgatgtactgtgcaggcgcggtgcctccgtctcgtcgcacagctgcgcgcccttgtgtgaccctccccataaaggcactttacagcttcatgtttcatccactgtcacttttttttaactgctgatgtaaatggaattttaaaagcagagttctttattgtatggatgacgtttgaataaatatcagcaactcctgc

SEQ ID NO: 339914 - DNA, 5039 bp, Homo sapiens
tgtggtcactgcccaggaggcgccggggaactgcagggcgctcgaggccagatgaaatcatgcaccaggacatcgtcccgctctgtgctgccgacatccaggaccagctaaagaagcgctttgcttacctgtccggtgggcgggggcaggacggaagcccggttatcaccttccctgactacccggccttcagcgagattccggacaaggagttccagaatgtcatgacctacctcaccagcatccccagcctgcaggacgctggcatcggattcatcctggtgatagaccggcgacgggacaaatggacctccgtgaaggcgtccgtcctgcgcatcgcagcatctttcccggcaaacctgcagctcgtcctcgtgcttcgcccgacgggttttttccaaaggactctctccgacatcgctttcaaattcaatagagatgactttaagatgaaggtgccggtcataatgctgagctccgtaccagacttacacggttacatcgataagtcgcagctgaccgaggacctgggtgggaccctggactactgccactcccggtggctgtgccagcgcacggccatcgaaagtttcgccctcatggtgaagcagacggctcagatgctgcagtccttcgggaccgagctggctgaaacagagctgcccaatgacgtccagtcgacaagctcagtgctgtgtgcgcacacagagaagaaggacaaggcgaaggaggatttgaggctggcactgaaagaggggcacagtgtcctggagagcctcagggagctgcaggctgagggctcagagcccagtgtgaaccaggaccagcttgacaaccaggccaccgtgcagaggctcctggcccagctgaacgaaaccgaggctgccttcgatgagttctgggcaaagcatcagcagaaactggagcagtgtctgcagctccggcactttgagcagggcttccgggaggtcaaagccatcttggacgcagcgtcccagaagatagcaaccttcacagacatcggcaacagcctggcgcatgtggagcacctgctgagggacctggccagcttcgaggagaaatcaggcgtggccgtggagagggcccgggccctgtctctggacggcgagcagctcattgggaacaagcactacgcggtagactccatccgcccaaagtgccaggagctccggcacctctgtgaccagttctctgcggagatcgcaaggaggagggggctgctcagcaagtccctggagctgcaccgccgcctggagacgtccatgaagtggtgtgatgaagggatttacctgctggcctcacaacctgtggacaagtgccagtcccaggacggcgcggaggctgccctccaggaaatcgagaagtttttggagaccggtgcggaaaataagatccaggagctcaacgcgatttacaaggaatacgaatccatcctcaaccaagatctcatggagcacgtgcgaaaggtcttccagaagcaggcaagcatggaggaggtgttccaccgcaggcaggccagcctgaagaagctggcggccaggcagacgcggcccgtgcagccggtggcccccagacccgaggcactggcaaagtcgccctgcccctccccaggcattcggcgaggctctgagaactccagctccgagggcggtgcgctccggagagggccctaccggagggccaagagtgagatgagtgagagccggcagggccgcggctcagcgggggaggaggaggaaagcctggccatcctgcgcaggcacgtgatgagcgagctcctggacacagaacgggcctacgtggaggagctgctgtgcgtcctggagggctacgccgcggagatggataacccactgatggctcacctcctgtcaacaggccttcacaacaagaaggatgttttgtttggaaacatggaggaaatctatcacttccacaacaggatattcctcagggagctggaaaactacactgactgcccagaactggttggaagatgctttctggagaggatggaagatttccagatctatgagaagtactgtcagaacaagccccgctctgagagcctgtggagacagtgctccgactgcccgtttttccaggaatgccagagaaagctggaccacaagctgagcctggactcctacctgctgaagccagtgcagaggatcaccaagtaccagctgctgctcaaggaaatgctgaaatacagcaggaactgcgagggggctgaggacctgcaggaggcgctgagctccatcctgggcatcctgaaggccgtgaacgactccatgcacctcatcgctatcaccggctatgacgggaatctcggcgacctgggcaagctgctgatgcagggctcgttcagcgtctggaccgaccacaagaggggccacaccaaggtgaaggagctggccaggttcaagcccatgcagcggcacctgttcctgcacgagaaggcagtgctcttctgcaagaagagggaggagaatggggaggggtatgagaaagctccctcctacagctacaagcagtccttaaacatggctgccgttggcattacggagaacgtgaagggagatgctaagaagttcgagatctggtacaacgcgcgcgaggaggtctacatcgtccaggcgccaactcctgagattaaagccgcgtgggtgaatgaaattcggaaagtgctgaccagccagctgcaggcttgtagagaagccagccagcaccgggcgctggagcagtcacagagcctgcccctgccggccccgaccagcaccagtccctcaagaggaaactcaaggaacatcaagaagctggaagaaaggaaaacagaccccctaagcctggagggatacgtcagctcagcgccactgacaaagccccccgaaaagggcaaaggttggagcaaaacgtcccactcactggaggcacctgaggacgacgggggctggtcaagtgcagaggagcagattaactcgtccgacgcagaggaggacggcgggttgggccccaagaagctggttccaggtaaatacacggtcgtggcggaccacgagaagggaggccccgatgcgctgcgcgtgaggagcggggacgtggtggagctggtgcaggagggcgacgagggcctctggtacgtcagggacccgaccactggcaaggagggctgggtgccggccagcagcctgtccgtccggctcggcccgtccggctcggcccagtgcctgagcagctcagagtcgagcccggggtcggccgtgctgagcaactcgtccagctgcagcgagggcggccaggcccccttctccgacctgcaggggtagcgcggcctcggcgccggagacccgcgcgctgtctggggctgcggtggcgtggggagggcgcggcccccggacgccccgaggaaggggcacctcaccgccccgacccagagcgcctggccgtgcgggctgcagaggacccctccggggcagaggcaggttccacggaagaccccggcccgctggggcttccccggagactccagagcccacagaggaggggccgcagggaacagccccgggcggcaggcgccgggcagcggcatctcgtcctggctccaccgtgctgcttctgcctccggacggtgctttcaggggacgcgcggaccgtggtggagctgcttccggagaagtggaggatcctctggccaacggcctgaggagagcggggcacggggtctctttagcttttacaagttttaggattttttcaagcagggatcaatcccgtggccattttttgtggtactttggcctcaattcttcaccaggaatcactgtgtttacatgaaatgacaatttgatactgtatttgatagaaaactatttttttgttaccggggtttacatagaagcacgttgtttataccactaagtgactttggcggggctctcccatggaaacggatggcactccctgaagctccctggtcacaggtggatgaaaacgtgtccgtgggtgacatcaggtggtgtctccaccaccaaaagcagttagaagccaaggagattcctttatctacctagggttcattttcaaaagaaaatttaaactataatttaaacaattaacgttcttttctacaaaaaaaatgcagggacttgatttttttaaagagcttcactgaattaggatatttttattgcttttaaagaaaatacaaagatgcagtttctgcagggtgtggcgtggaccagtgctgccgaccatagctcagagagccctgcccctgcctcactgcactgcagcctcctcggaggccgcacctccactccactccccacgcgccccctgcctcccacccaggtccacctgccacctggtgaccaccttgagtacagaagtgaaagtggggagagtattttattcaagtcacagcagaactggaaaaaaactcttctgttttaccaacttcttgtgtttcagaaacatattctgttcaaaacttttgaagccctttcggtgtctagtctgcagatgtttttgtatgtgtgcacctctgaccatgtgtgtacatatgtgtcttgctggaaaggacatattcgctgtccccgtgctgctgggagggccgcctcacagcctcacggttcccagccccagcacagtggaggcaggcgtggctgcattcccctcacgctaccctcccagcggcttgtagccgtcactggccagacctccagggtgcggaatcaaataggaagcatgcagagactcggcagcttttcctctgatgtgtaagttatttggaacgcgtgctgtgtcccgcgatgtccctgatgtactgtgcaggcgcggtgcctccgtctcgtcgcacagctgcgcgcccttgtgtgaccctccccataaaggcactttacagcttcatgtttcatccactgtcacttttttttaactgctgatgtaaatggaattttaaaagcagagttctttattgtatggatgacgtttgaataaatatcagcaactcctgc

SEQ ID NO: 339915 - DNA, 2547 bp, Homo sapiens
tgagcttcagtcattcactttagaaactgcttcccggctcggtctgctaggtgttgaacatgaccgtggcactcactgaaaacacctgcctgggagggcatctgcggcaggaaggctgcttccctcctggctgaggggcactgccctgcctgacaagggcgtggcttcccagggcctggggatcgaggtctcccacagggtggcccagcaattggaagcagatggtctcaaaccctgaaacgtgccaggcattctggaagtttgcaggggtgtcctgctcagctctttatgaacccgggaagatgacaggctctgttgggggcccacggcacacatttcagggggtctgtgggacttagctgaccccacctcagacagatgcagacagcggctcatcaccggggggtccctcacgggtgtctgtctctcttaggttggagcaaaacgtcccactcactggaggcacctgaggacgacgggggctggtcaagtgcagaggagcagattaactcgtccgacgcagaggaggacggcgggttgggccccaagaagctggttccaggtaaatacacggtcgtggcggaccacgagaagggaggccccgatgcgctgcgcgtgaggagcggggacgtggtggagctggtgcaggagggcgacgagggcctctggtacgtcagggacccgaccactggcaaggagggctgggtgccggccagcagcctgtccgtccggctcggcccgtccggctcggcccagtgcctgagcagctcagagtcgagcccggggtcggccgtgctgagcaactcgtccagctgcagcgagggcggccaggcccccttctccgacctgcaggggtagcgcggcctcggcgccggagacccgcgcgctgtctggggctgcggtggcgtggggagggcgcggcccccggacgccccgaggaaggggcacctcaccgccccgacccagagcgcctggccgtgcgggctgcagaggacccctccggggcagaggcaggttccacggaagaccccggcccgctggggcttccccggagactccagagcccacagaggaggggccgcagggaacagccccgggcggcaggcgccgggcagcggcatctcgtcctggctccaccgtgctgcttctgcctccggacggtgctttcaggggacgcgcggaccgtggtggagctgcttccggagaagtggaggatcctctggccaacggcctgaggagagcggggcacggggtctctttagcttttacaagttttaggattttttcaagcagggatcaatcccgtggccattttttgtggtactttggcctcaattcttcaccaggaatcactgtgtttacatgaaatgacaatttgatactgtatttgatagaaaactatttttttgttaccggggtttacatagaagcacgttgtttataccactaagtgactttggcggggctctcccatggaaacggatggcactccctgaagctccctggtcacaggtggatgaaaacgtgtccgtgggtgacatcaggtggtgtctccaccaccaaaagcagttagaagccaaggagattcctttatctacctagggttcattttcaaaagaaaatttaaactataatttaaacaattaacgttcttttctacaaaaaaaatgcagggacttgatttttttaaagagcttcactgaattaggatatttttattgcttttaaagaaaatacaaagatgcagtttctgcagggtgtggcgtggaccagtgctgccgaccatagctcagagagccctgcccctgcctcactgcactgcagcctcctcggaggccgcacctccactccactccccacgcgccccctgcctcccacccaggtccacctgccacctggtgaccaccttgagtacagaagtgaaagtggggagagtattttattcaagtcacagcagaactggaaaaaaactcttctgttttaccaacttcttgtgtttcagaaacatattctgttcaaaacttttgaagccctttcggtgtctagtctgcagatgtttttgtatgtgtgcacctctgaccatgtgtgtacatatgtgtcttgctggaaaggacatattcgctgtccccgtgctgctgggagggccgcctcacagcctcacggttcccagccccagcacagtggaggcaggcgtggctgcattcccctcacgctaccctcccagcggcttgtagccgtcactggccagacctccagggtgcggaatcaaataggaagcatgcagagactcggcagcttttcctctgatgtgtaagttatttggaacgcgtgctgtgtcccgcgatgtccctgatgtactgtgcaggcgcggtgcctccgtctcgtcgcacagctgcgcgcccttgtgtgaccctccccataaaggcactttacagcttcatgtttcatccactgtcacttttttttaactgctgatgtaaatggaattttaaaagcagagttctttattgtatggatgacgtttgaataaatatcagcaactcctgc

SEQ ID NO: 339916 - DNA, 1718 bp, Homo sapiens
gtggggggggggggggggtcttgctacattgcccaggctcaaacttctgggctcaaatgatcctcctgcttctgcctcagcttctgcctcggcctccggagtagctgggactacaggcctgaaatactgtttctttaaggaagggcatgttacctataataccaaaccacaaaaggatagctgcggttttgggcgaggagagctcagagagtttcttgcatatggccctgtgatggcggccatggccctgcatagacacgagctggaatctgcaggtggcagccaggacgctgcgtgtgtcgagtgcacagtgtggcttggtgccaaccatggcgagggtggagagccccgtgcctgcagcgcgcgcttccctcactgggtcctgcgtccttgggcaggcgatgcccctgcggggaggggctggtccatccccggccagccacggacccacgcatggacccagcgacccacggacctgcttacctgggcgcggcgcgggtggcatgcggccacacggaaggggcgcgctgggctgctgcggcctctgcagcttctacacctgccacggggcggccggagatgaaatcatgcaccaggacatcgtcccgctctgtgctgccgacatccaggaccagctaaagaagcgctttgcttacctgtccggtgggcgggggcaggacggaagcccggttatcaccttccctgactacccggccttcagcgagattccggacaaggagttccagaatgtcatgacctacctcaccagcatccccagcctgcaggacgctggcatcggattcatcctggtgatagaccggcgacgggacaaatggacctccgtgaaggcgtccgtcctgcgcatcgcagcatctttcccggcaaacctgcagctcgtcctcgtgcttcgcccgacgggttttttccaaaggactctctccgacatcgctttcaaattcaatagagatgactttaagatgaaggtgccggtcataatgctgagctccgtaccagacttacacggttacatcgataagtcgcagctgaccgaggacctgggtgggaccctggactactgccactcccggtggctgtgccagcgcacggccatcgaaagtttcgccctcatggtgaagcagacggctcagatgctgcagtccttcgggaccgagctggctgaaacagagctgcccaatgacgtccagtcgacaagctcagtgctgtgtgcgcacacagagaagaaggacaaggcgaaggaggatttgaggctggcactgaaagaggggcacagtgtcctggagagcctcagggagctgcaggctgagggctcagagcccagtgtgaaccaggaccagcttgacaaccaggccaccgtgcagaggctcctggcccagctgaacgaaaccgaggctgccttcgatgagttctgggcaaagcatcagcagaaactggagcagtgtctgcagctccggcactttgagcagggcttccgggaggtgagtggccctgggtggagccggcagccgccctgatgctcacggggcctcctgtgcctgcgccctggtcccagtgccgggagctgagccgtgccacccagttgactttggcttaatgcagaaaagtctccgcttgccaggtggagcctgtgagattaagtcaggctgagccttgaaatgcacgattgatgactgcgtcattgtatagaaaggtgattgaaa

SEQ ID NO: 339917 - DNA, 1045 bp, Homo sapiens
gtggggggggggggggggtcttgctacattgcccaggctcaaacttctgggctcaaatgatcctcctgcttctgcctcagcttctgcctcggcctccggagtagctgggactacaggcctgaaatactgtttctttaaggaagggcatgttacctataataccaaaccacaaaaggatagctgcggttttgggcgaggagagctcagagagtttcttgcatatggccctgtgatggcggccatggccctgcatagacacgagctggaatctgcaggtggcagccaggacgctgcgtgtgtcgagtgcacagtgtggcttggtgccaaccatggcgagggtggagagccccgtgcctgcagcgcgcgcttccctcactgggtcctgcgtccttgggcaggcgatgcccctgcggggaggggctggtccatccccggccagccacggacccacgcatggacccagcgacccacggacctgcttacctgggcgcggcgcgggtggcatgcggccacacggaaggggcgcgctgggctgctgcggcctctgcagcttctacacctgccacggggcggccggagatgaaatcatgcaccaggacatcgtcccgctctgtgctgccgacatccaggaccagctaaagaagcgctttgcttacctgtccggtgggcgggggcaggacggaagcccggttatcaccttccctgactacccggccttcagcgagattccggacaaggagttccagaatgtcatgacctacctcaccagcatccccagcattttgttcatggagtctgctgcttctgagcactggggacacgtcgcggaggccctgccattccttcctccgggttctgcacacaccgcggtgaccacctcccccgaggtcctctccccgcaccttcccaaaacgtgttccccaggtccttttctgttactgctgttgaattcaacagctactgaccacctgtggccatttaaatgtaaaatgaaagcaaaataaaattaaaaatccagcccatggcaggcagggctgcctctttt

SEQ ID NO: 339918 - DNA, 359 bp, Homo sapiens
aacatagtgagatcccatctctgaaaacaaaattctgaataaaaataaacagcccaccctgtttcaggtatacctcaactgtcaaatcacttttaggcagggtgttttgttatttttgttttgtttcagagtgttgtttaactttatttttgaaactgaatttgtctagaaaagaatcatattcaccttttggtcttagctactcttcatttttataaaatacatcaagttgatgcttaaaattggggatctagttacagatgaaatttttcctttcaaaagagagttccccccagttttgctgtagtcttaggagatacttaagggaggggaatcatttttagttccccctaggtgag

SEQ ID NO: 339919 - DNA, 182 bp, Homo sapiens
atcctcctctcccttagggagaagtgcagcggtcttggggccactccacactggggcgtctgggctggaagtcaccccaggaagcacctgtgggcctggctaatcagggcccgatgaaggacacagacttctaacccccaaggccctcagaataactgggtctggcttcctgggtccagctg

SEQ ID NO: 339920 - DNA, 529 bp, Homo sapiens
taaataggatctgggttatggagaccccatagtctcctctctaagagagagccgaacaataataaatattgcagaaggatttgaaacttcagagctcccgaaaaaagatgagcctcataaatcaagcaccttcctttttcaaaaattgcatttacatattttctgaaatgtgacttttttacatatgtatttaattatataaataaacatttttagtcacctggattgaaccaaacattctaatgaactatgctaattggctggaatgccaacaaaatcaaaattaatgttaaattttacttttaaaaaaaacctcagggaatcagcttgctcaaggatggaatatgtatattttctttaaagcttcaactttaataaagtaggatcatccaaagagcttctgatccaggagatcaattttagagcccaaagccaaatttaatccacataagatttttaaaaataattttatttgtaaaatgatcctatggtaaaatggacctcttgtgggcatataggcctatagatt

SEQ ID NO: 339921 - DNA, 5542 bp, Homo sapiens
ctgggagcgagaatttaatacatggacagaaatgaacactattgtgtaccatggcagtctggccagcaggcagatgattcaacagtatgaaatgtactgcaaagattcacggggacgcctcatcccaggcgcatacaagtttgacgctctgatcaccacttttgagatgattttgtcagattgtcctgagcttcgtgaaattgaatggcgttgtgttatcattgatgaagcccatcgactgaaaaaccgtaattgcaagctgcttgatagtctcaagcacatggacctggaacacaaggtgctactcacaggaacaccattgcaaaatactgtagaagaactgtttagcttgcttcatttcttggaaccgtcacaatttccctcagaatcagagtttctcaaggactttggggatctcaagacagaggaacaggttcaaaagctacaggccattcttaagccaatgatgctgagaagactcaaagaggatgttgaaaaaaacttggcacccaaacaggaaacaattattgaagtagagctgactaatatccagaagaaatactatcgggctattttggagaagaatttctccttcctttccaaaggggcaggtcataccaacatgcctaatctacttaacacaatgatggagttgcgcaagtgctgcaaccacccatatctcatcaatggtgctgaagaaaaaatcctaacagaattccgtgaagcttgccatattatacctcatgactttcacctgcaggccatggttcgttcagccggcaaactggttcttattgacaagttgcttccaaagcttaaagctggtggccataaagttctgatcttctctcagatggtgcgctgcctagacatcctagaggattatttaatccagaggaggtacttatatgaacgtattgatgggcgagttagaggcaaccttcgacaggctgccattgaccgcttcagcaagcctgactcagaccgctttgtcttcttactgtgtacccgggctggtggacttggtattaatcttacagctgctgatacctgcatcatctttgattcagactggaatccacaaaatgacctgcaggcccaggcacgatgtcatcgaattgggcagagcaaagctgtgaaggtgtaccgcctcatcactcgtaattcctacgagagagagatgtttgataaggccagcctcaagttggggttggataaggctgtgcttcaatccatgagtggtcgggatggcaacattactggaatccaacagttctctaagaaggagattgaagatcttttaagaaaaggagcatatgcagccatcatggaggaagatgatgaaggctccaagttttgtgaagaggacattgaccagatcttgttaagacgaactacaaccatcaccattgaatctgaaggaaaaggttccacctttgctaaggcaagctttgttgcttctgaaaacaggacagatatttctttggatgaccccaacttttggcaaaagtgggccaaaaaggctgacctagacatggatctgctcaacagcaagaataatttggtaattgacacacctagagtacgaaaacaaacgcgccactttagcactctgaaagatgatgacctggtggaattctctgatttggaaagtgaggatgatgagcggccacgctcccgcagacatgaccgtcatcatgcctatgggcgcactgactgctttcgggtggaaaagcatctcctggtatatggttggggacgatggcgagatattttatctcatggacgcttcaagcgacgtatgactgaacgagatgtggagaccatttgtcgggccattctcgtgtactgtcttctacactaccgtggggatgaaaatattaaaggcttcatctgggacttgattagcccagctgaaaatggcaagacaaaagaattgcagaatcattcaggtctatctatccctgtgcctcgtggacgcaaaggaaaaaaagtaaagtcacaaagcacttttgatatccataaggcagattggatccggaaatataaccctgacactttgttccaagatgaaagttataagaagcacttgaaacatcagtgtaacaaggtactgttgcgggtacgaatgctatactacctgaggcaggaggttattggagaccaagcagaaaaggtgttagggggtgcgattgccagtgagattgacatatggttcccagtagtggatcaactggaggttccaacaacttggtgggacagtgaggctgacaagtcgctgctcattggagtctttaaacatggctatgagaaatataataccatgagggcagacccagccttatgtttcctagaaaaggctggccgaccagatgacaaagcaattgcagcagaacatcgagtgttggataacttctctgacatagtagaaggggttgactttgataaagattgtgaagatcctgaatataaaccactccaaggtcccccaaaggaccaagatgatgagggtgatcccttgatgatgatggatgaggagatctcagtgattgatggagatgaagcccaggtgacccaacagccaggccatttattctggcctccgggctctgccctaacagctaggcttcggcgtctagtaacagcgtatcagcgcagctacaagagagaacaaatgaagatagaggctgcagaacgtggggaccggcgaaggcggcgttgtgaagcagccttcaagctgaaagaaattgcacggcgggagaaacaacaacgatggacaaggcgtgaacaaactgatttttatcgagtggtgtctacgtttggtgtggaatatgaccctgacaccatgcagttccattgggatcgcttccgcacttttgctcgactagacaaaaagacagatgaaagccttaccaagtacttccatggctttgtggccatgtgccgccaagtatgccgccttcccccagcagctggagatgaaccccccgaccctaacctgttcattgagcccatcactgaggagagagcctcacggactctctaccgtatagaattgcttcggcgcttacgggaacaagttttatgccacccccttttggaagatcggctggcattgtgtcagcctcctggtcctgaattgcccaaatggtgggagcctgttcggcatgatggggagcttctaagaggggcagcccgccatggggtgagccaaacagactgcaacatcatgcaggacccagacttctcttttctggctgcccgtatgaattatatgcagaaccatcaagcaggagcaccagctccatccttgtcacgctgctctactccactgctgcaccagcagtatacctcacgcactgcctcaccactgcccctgcgcccagatgctcctgttgaaaagtcacccgaggagacagctacccaggtccccagtctggagagtctgactttaaagctagagcacgaggtggtggccaggagccgaccaaccccacaagactatgagatgcgagtatccccctctgatactacccctctggtttcccggagtgttccaccagtcaaactggaggatgaggatgattcggactctgagctggacttgagcaagctgtcaccatcttcttcttcttcctcatcctcatccagctccagctccagcactgatgagagtgaggatgagaaggaagagaagctaactgaccagtcccgctcaaagctctatgatgaagagagtctcctgtccctcactatgtcccaagatggattcccaaatgaagatggagaacaaatgacccctgagcttctgctactgcaggaaagacaaagagcctctgagtggcccaaggatcgtgtcctgataaaccgtattgacctcgtctgccaggctgtactctcagggaagtggccttctagccgtaggagccaggaaatggtaacaggaggaattttggggccaggcaaccacttgctagacagtccctcattgactcctggagaatatggtgactctccagtccccacaccacgaagtagtagtgcagcttccatggcagaggaggaagcatctgcagtcagcacagcggcagcccagttcaccaaacttcgccgaggcatggatgaaaaggagtttacagttcaaatcaaagatgaggaaggattgaagttaacattccagaagcacaagttgatggcgaatggagtaatgggagatggacatccactgtttcataagaagaaggggaacagaaagaagctagtagagctggaggtggagtgcatggaagagcctaatcaccttgatgtggacctggagacccggatccctgtcatcaataaggtggatggtactttgctggtgggtgaggatgcccctcgccgggctgaactggagatgtggttacagggtcatccagagtttgctgttgatccccgatttctagcgtatatggaggatcgcagaaaacagaagtggcaaagatgtaaaaaaaataataaggcagaattgaactgtttgggaatggaaccagtacagacagctaactctagaaatgggaaaaagggtcatcacactgaaacggtgttcaaccgggttttgccagggcctattgcaccagagagcagcaagaagcgggcccgtaggatgcgaccagacctttctaagatgatggccctcatgcagggtggaagcactgggtctctatctctgcataacacgttccaacacagcagtagtggcctacagtctgtgtcatctttgggtcacagcagtgccacttctgcatctttgccttttatgccatttgtgatgggtggtgcaccatcatcccctcatgtagactccagcaccatgcttcatcaccaccaccaccacccccacccccaccatcaccaccatcaccatccaggcttgagagcccctggctacccctcttcaccagtgactaccgcctctggtactaccttgcggttgccaccactgcaacctgaggaggatgacgatgaggatgaagaagatgatgatgacttatctcagggctatgatagctcagaaagggacttctcactcattgatgatcctatgatgccagctaactcagactccagtgaagatgctgatgactgaagccccagcatgggccccattgcttgggcggctgctgtattttcatttactctggcccttggactatggaaacgtgggaggggcaggggagatgtggggaagtccaggactccaggaggtgaaaaggaaaaaaaaaaaaaaatgtacctgattgctcccaattatgagaggattgggtgggcaggggaactcctaaaataatacatgaccacttcctcatttctggggaaggaaaggagactagagcagctggtgtgctcacccctccctagtcacctccattaaccacagactatgtagcgctggccctagcctctggcagagcctgttcctggccgaactgtggatacagctggagggtcaggaactgttaccttctttccccttggcattaataaatttaagttaatcctt

SEQ ID NO: 339922 - DNA, 3685 bp, Homo sapiens
  misc_feature (5)..(5): n is a, c, g, or t
  misc_feature (84)..(84): n is a, c, g, or t
  misc_feature (87)..(87): n is a, c, g, or t
  misc_feature (105)..(105): n is a, c, g, or t
  misc_feature (135)..(135): n is a, c, g, or t
caggncatgcagcttggggaccggcgaaggcggcgttgtaaagcagccttcaagctgaaagaaattgcacggcgggagaaacancancgatggacaaggcgtgancaaactgatttttatcgagtggtgtctacntttggtgtggaatatgaccctgacaccatgcagttccattgggatcgcttccgcacttttgctcgactagacaaaaagacagatgaaagccttaccaagtacttccatggctttgtggccatgtgccgccaagtatgccgccttcccccagcagcaggaggttattggagaccaagcagaaaaggtgttagggggtgcgattgccagtgagattgacatatggttcccagtagtggatcaactggaggttccaacaacttggtgggacagtgaggctgacaagtcgctgctcattggagtctttaaacatggctatgagaaatataataccatgagggcagacccagccttatgtttcctagaaaaggctggccgaccagatgacaaagcaattgcagcagaacatcgagtgttggataacttctctgacatagtagaaggggttgactttgataaagattgtgaagatcctgaatataaaccactccaaggtcccccaaaggaccaagatgatgagggtgatcccttgatgatgatggatgaggagatctcagtgattgatggagatgaagcccaggtgacccaacagccaggccatttattctggcctccgggctctgccctaacagctaggcttcggcgtctagtaacagcgtatcagcgcagctacaagagagaacaaatgaagatagaggctgcagaacgtggggaccggcgaaggcggcgttgtgaagcagccttcaagctgaaagaaattgcacggcgggagaaacaacaacgatggacaaggcgtgaacaaactgatttttatcgagtggtgtctacgtttggtgtggaatatgaccctgacaccatgcagttccattgggatcgcttccgcacttttgctcgactagacaaaaagacagatgaaagccttaccaagtacttccatggctttgtggccatgtgccgccaagtatgccgccttcccccagcagctggagatgaaccccccgaccctaacctgttcattgagcccatcactgaggagagagcctcacggactctctaccgtatagaattgcttcggcgcttacgggaacaagttttatgccacccccttttggaagatcggctggcattgtgtcagcctcctggtcctgaattgcccaaatggtgggagcctgttcggcatgatggggagcttctaagaggggcagcccgccatggggtgagccaaacagactgcaacatcatgcaggacccagacttctcttttctggctgcccgtatgaattatatgcagaaccatcaagcaggagcaccagctccatccttgtcacgctgctctactccactgctgcaccagcagtatacctcacgcactgcctcaccactgcccctgcgcccagatgctcctgttgaaaagtcacccgaggagacagctacccaggtccccagtctggagagtctgactttaaagctagagcacgaggtggtggccaggagccgaccaaccccacaagactatgagatgcgagtatccccctctgatactacccctctggtttcccggagtgttccaccagtcaaactggaggatgaggatgattcggactctgagctggacttgagcaagctgtcaccatcttcttcttcttcctcatcctcatccagctccagctccagcactgatgagagtgaggatgagaaggaagagaagctaactgaccagtcccgctcaaagctctatgatgaagagagtctcctgtccctcactatgtcccaagatggattcccaaatgaagatggagaacaaatgacccctgagcttctgctactgcaggaaagacaaagagcctctgagtggcccaaggatcgtgtcctgataaaccgtattgacctcgtctgccaggctgtactctcagggaagtggccttctagccgtaggagccaggaaatggtaacaggaggaattttggggccaggcaaccacttgctagacagtccctcattgactcctggagaatatggtgactctccagtccccacaccacgaagtagtagtgcagcttccatggcagaggaggaagcatctgcagtcagcacagcggcagcccagttcaccaaacttcgccgaggcatggatgaaaaggagtttacagttcaaatcaaagatgaggaaggattgaagttaacattccagaagcacaagttgatggcgaatggagtaatgggagatggacatccactgtttcataagaagaaggggaacagaaagaagctagtagagctggaggtggagtgcatggaagagcctaatcaccttgatgtggacctggagacccggatccctgtcatcaataaggtggatggtactttgctggtgggtgaggatgcccctcgccgggctgaactggagatgtggttacagggtcatccagagtttgctgttgatccccgatttctagcgtatatggaggatcgcagaaaacagaagtggcaaagatgtaaaaaaaataataaggcagaattgaactgtttgggaatggaaccagtacagacagctaactctagaaatgggaaaaagggtcatcacactgaaacggtgttcaaccgggttttgccagggcctattgcaccagagagcagcaagaagcgggcccgtaggatgcgaccagacctttctaagatgatggccctcatgcagggtggaagcactgggtctctatctctgcataacacgttccaacacagcagtagtggcctacagtctgtgtcatctttgggtcacagcagtgccacttctgcatctttgccttttatgccatttgtgatgggtggtgcaccatcatcccctcatgtagactccagcaccatgcttcatcaccaccaccaccacccccacccccaccatcaccaccatcaccatccaggcttgagagcccctggctacccctcttcaccagtgactaccgcctctggtactaccttgcggttgccaccactgcaacctgaggaggatgacgatgaggatgaagaagatgatgatgacttatctcagggctatgatagctcagaaagggacttctcactcattgatgatcctatgatgccagctaactcagactccagtgaagatgctgatgactgaagccccagcatgggccccattgcttgggcggctgctgtattttcatttactctggcccttggactatggaaacgtgggaggggcaggggagatgtggggaagtccaggactccaggaggtgaaaaggaaaaaaaaaaaaaaatgtacctgattgctcccaattatgagaggattgggtgggcaggggaactcctaaaataatacatgaccacttcctcatttctggggaaggaaaggagactagagcagctggtgtgctcacccctccctagtcacctccattaaccacagactatgtagcgctggccctagcctctggcagagcctgttcctggccgaactgtggatacagctggagggtcaggaactgttaccttctttccccttggcattaataaatttaagttaatcctt

SEQ ID NO: 339923 - DNA, 5217 bp, Homo sapiens
ctgggagcgagaatttaatacatggacagaaatgaacactattgtgtaccatggcagtctggccagcaggcagatgattcaacagtatgaaatgtactgcaaagattcacggggacgcctcatcccaggcgcatacaagtttgacgctctgatcaccacttttgagatgattttgtcagattgtcctgagcttcgtgaaattgaatggcgttgtgttatcattgatgaagcccatcgactgaaaaaccgtaattgcaagctgcttgatagtctcaagcacatggacctggaacacaaggtgctactcacaggaacaccattgcaaaatactgtagaagaactgtttagcttgcttcatttcttggaaccgtcacaatttccctcagaatcagagtttctcaaggactttggggatctcaagacagaggaacaggttcaaaagctacaggccattcttaagccaatgatgctgagaagactcaaagaggatgttgaaaaaaacttggcacccaaacaggaaacaattattgaagtagagctgactaatatccagaagaaatactatcgggctattttggagaagaatttctccttcctttccaaaggggcaggtcataccaacatgcctaatctacttaacacaatgatggagttgcgcaagtgctgcaaccacccatatctcatcaatggtgctgaagaaaaaatcctaacagaattccgtgaagcttgccatattatacctcatgactttcacctgcaggccatggttcgttcagccggcaaactggttcttattgacaagttgcttccaaagcttaaagctggtggccataaagttctgatcttctctcagatggtgcgctgcctagacatcctagaggattatttaatccagaggaggtacttatatgaacgtattgatgggcgagttagaggcaaccttcgacaggctgccattgaccgcttcagcaagcctgactcagaccgctttgtcttcttactgtgtacccgggctggtggacttggtattaatcttacagctgctgatacctgcatcatctttgattcagactggaatccacaaaatgacctgcaggcccaggcacgatgtcatcgaattgggcagagcaaagctgtgaaggtgtaccgcctcatcactcgtaattcctacgagagagagatgtttgataaggccagcctcaagttggggttggataaggctgtgcttcaatccatgagtggtcgggatggcaacattactggaatccaacagttctctaagaaggagattgaagatcttttaagaaaaggagcatatgcagccatcatggaggaagatgatgaaggctccaagttttgtgaagaggacattgaccagatcttgttaagacgaactacaaccatcaccattgaatctgaaggaaaaggttccacctttgctaaggcaagctttgttgcttctgaaaacaggacagatatttctttggatgaccccaacttttggcaaaagtgggccaaaaaggctgacctagacatggatctgctcaacagcaagaataatttggtaattgacacacctagagtacgaaaacaaacgcgccactttagcactctgaaagatgatgacctggtggaattctctgatttggaaagtgaggatgatgagcggccacgctcccgcagacatgaccgtcatcatgcctatgggcgcactgactgctttcgggtggaaaagcatctcctggtatatggttggggacgatggcgagatattttatctcatggacgcttcaagcgacgtatgactgaacgagatgtggagaccatttgtcgggccattctcgtgtactgtcttctacactaccgtggggatgaaaatattaaaggcttcatctgggacttgattagcccagctgaaaatggcaagacaaaagaattgcagaatcattcaggtctatctatccctgtgcctcgtggacgcaaaggaaaaaaagtaaagtcacaaagcacttttgatatccataaggcagattggatccggaaatataaccctgacactttgttccaagatgaaagttataagaagcacttgaaacatcagtgtaacaaggtactgttgcgggtacgaatgctatactacctgaggcaggaggttattggagaccaagcagaaaaggtgttagggggtgcgattgccagtgagattgacatatggttcccagtagtggatcaactggaggttccaacaacttggtgggacagtgaggctgacaagtcgctgctcattggagtctttaaacatggctatgagaaatataataccatgagggcagacccagccttatgtttcctagaaaaggctggccgaccagatgacaaagcaattgcagcagaacatcgagtgttggataacttctctgacatagtagaaggggttgactttgataaagattgtgaagatcctgaatataaaccactccaaggtcccccaaaggaccaagatgatgagggtgatcccttgatgatgatggatgaggagatctcagtgattgatggagatgaagcccaggtgacccaacagccaggccatttattctggcctccgggctctgccctaacagctaggcttcggcgtctagtaacagcgtatcagcgcagctacaagagagaacaaatgaagatagaggctgcagaacgtggggaccggcgaaggcggcgttgtgaagcagccttcaagctgaaagaaattgcacggcgggagaaacaacaacgatggacaaggcgtgaacaaactgatttttatcgagtggtgtctacgtttggtgtggaatatgaccctgacaccatgcagttccattgggatcgcttccgcacttttgctcgactagacaaaaagacagatgaaagccttaccaagtacttccatggctttgtggccatgtgccgccaagtatgccgccttcccccagcagctggagatgaaccccccgaccctaacctgttcattgagcccatcactgaggagagagcctcacggactctctaccgtatagaattgcttcggcgcttacgggaacaagttttatgccacccccttttggaagatcggctggcattgtgtcagcctcctggtcctgaattgcccaaatggtgggagcctgttcggcatgatggggagcttctaagaggggcagcccgccatggggtgagccaaacagactgcaacatcatgcaggacccagacttctcttttctggctgcccgtatgaattatatgcagaaccatcaagcaggagcaccagctccatccttgtcacgctgctctactccactgctgcaccagcagtatacctcacgcactgcctcaccactgcccctgcgcccagatgctcctgttgaaaagtcacccgaggagacagctacccaggtccccagtctggagagtctgactttaaagctagagcacgaggtggtggccaggagccgaccaaccccacaagactatgagatgcgagtatccccctctgatactacccctctggtttcccggagtgttccaccagtcaaactggaggatgaggatgattcggactctgagctggacttgagcaagctgtcaccatcttcttcttcttcctcatcctcatccagctccagctccagcactgatgagagtgaggatgagaaggaagagaagctaactgaccagtcccgctcaaagctctatgatgaagagagtctcctgtccctcactatgtcccaagatggattcccaaatgaagatggagaacaaatgacccctgagcttctgctactgcaggaaagacaaagagcctctgagtggcccaaggatcgtgtcctgataaaccgtattgacctcgtctgccaggctgtactctcagggaagtggccttctagccgtaggagccaggaaatggtaacaggaggaattttggggccaggcaaccacttgctagacagtccctcattgactcctggagaatatggtgactctccagtccccacaccacgaagtagtagtgcagcttccatggcagaggaggaagcatctgcagtcagcacagcggcagcccagttcaccaaacttcgccgaggcatggatgaaaaggagtttacagttcaaatcaaagatgaggaaggattgaagttaacattccagaagcacaagttgatggcgaatggagtaatgggagatggacatccactgtttcataagaagaaggggaacagaaagaagctagtagagctggaggtggagtgcatggaagagcctaatcaccttgatgtggacctggagacccggatccctgtcatcaataaggtggatggtactttgctggtgggtgaggatgcccctcgccgggctgaactggagatgtggttacagggtcatccagagtttgctgttgatccccgatttctagcgtatatggaggatcgcagaaaacagaagtggcaaagatgtaaaaaaaataataaggcagaattgaactgtttgggaatggaaccagtacagacagctaactctagaaatgggaaaaagggtcatcacactgaaacggtgttcaaccgggttttgccagggcctattgcaccagagagcagcaagaagcgggcccgtaggatgcgaccagacctttctaagatgatggccctcatgcagggtggaagcactgggtctctatctctgcataacacgttccaacacagcagtagtggcctacagtctgtgtcatctttgggtcacagcagtgccacttctgcatctttgccttttatgccatttgtgatgggtggtgcaccatcatcccctcatgtagactccagcaccatgcttcatcaccaccaccaccacccccacccccaccatcaccaccatcaccatccaggactccaggaggtgaaaaggaaaaaaaaaaaaaaatgtacctgattgctcccaattatgagaggattgggtgggcaggggaactcctaaaataatacatgaccacttcctcatttctggggaaggaaaggagactagagcagctggtgtgctcacccctccctagtcacctccattaaccacagactatgtagcgctggccctagcctctggcagagcctgttcctggccgaactgtggatacagctggagggtcaggaactgttaccttctttccccttggcattaataaatttaagttaatcctt

SEQ ID NO: 339924 - DNA, 4678 bp, Homo sapiens
ctgggagcgagaatttaatacatggacagaaatgaacactattgtgtaccatggcagtctggccagcaggcagatgattcaacagtatgaaatgtactgcaaagattcacggggacgcctcatcccaggcgcatacaagtttgacgctctgatcaccacttttgagatgattttgtcagattgtcctgagcttcgtgaaattgaatggcgttgtgttatcattgatgaagcccatcgactgaaaaaccgtaattgcaagctgcttgatagtctcaagcacatggacctggaacacaaggtgctactcacaggaacaccattgcaaaatactgtagaagaactgtttagcttgcttcatttcttggaaccgtcacaatttccctcagaatcagagtttctcaaggactttggggatctcaagacagaggaacaggttcaaaagctacaggccattcttaagccaatgatgctgagaagactcaaagaggatgttgaaaaaaacttggcacccaaacaggaaacaattattgaagtagagctgactaatatccagaagaaatactatcgggctattttggagaagaatttctccttcctttccaaaggggcaggtcataccaacatgcctaatctacttaacacaatgatggagttgcgcaagtgctgcaaccacccatatctcatcaatggtgctgaagaaaaaatcctaacagaattccgtgaagcttgccatattatacctcatgactttcacctgcaggccatggttcgttcagccggcaaactggttcttattgacaagttgcttccaaagcttaaagctggtggccataaagttctgatcttctctcagatggtgcgctgcctagacatcctagaggattatttaatccagaggaggtacttatatgaacgtattgatgggcgagttagaggcaaccttcgacaggctgccattgaccgcttcagcaagcctgactcagaccgctttgtcttcttactgtgtacccgggctggtggacttggtattaatcttacagctgctgatacctgcatcatctttgattcagactggaatccacaaaatgacctgcaggcccaggcacgatgtcatcgaattgggcagagcaaagctgtgaaggtgtaccgcctcatcactcgtaattcctacgagagagagatgtttgataaggccagcctcaagttggggttggataaggctgtgcttcaatccatgagtggtcgggatggcaacattactggaatccaacagttctctaagaaggagattgaagatcttttaagaaaaggagcatatgcagccatcatggaggaagatgatgaaggctccaagttttgtgaagaggacattgaccagatcttgttaagacgaactacaaccatcaccattgaatctgaaggaaaaggttccacctttgctaaggcaagctttgttgcttctgaaaacaggacagatatttctttggatgaccccaacttttggcaaaagtgggccaaaaaggctgacctagacatggatctgctcaacagcaagaataatttggtaattgacacacctagagtacgaaaacaaacgcgccactttagcactctgaaagatgatgacctggtggaattctctgatttggaaagtgaggatgatgagcggccacgctcccgcagacatgaccgtcatcatgcctatgggcgcactgactgctttcgggtggaaaagcatctcctggtatatggttggggacgatggcgagatattttatctcatggacgcttcaagcgacgtatgactgaacgagatgtggagaccatttgtcgggccattctcgtgtactgtcttctacactaccgtggggatgaaaatattaaaggcttcatctgggacttgattagcccagctgaaaatggcaagacaaaagaattgcagaatcattcaggtctatctatccctgtgcctcgtggacgcaaaggaaaaaaagtaaagtcacaaagcacttttgatatccataaggcagattggatccggaaatataaccctgacactttgttccaagatgaaagttataagaagcacttgaaacatcagtgtaacaaggtactgttgcgggtacgaatgctatactacctgaggcaggaggttattggagaccaagcagaaaaggtgttagggggtgcgattgccagtgagattgacatatggttcccagtagtggatcaactggaggttccaacaacttggtgggacagtgaggctgacaagtcgctgctcattggagtctttaaacatggctatgagaaatataataccatgagggcagacccagccttatgtttcctagaaaaggctggccgaccagatgacaaagcaattgcagcagaacatcgagtgttggataacttctctgacatagtagaaggggttgactttgataaagattgtgaagatcctgaatataaaccactccaaggtcccccaaaggaccaagatgatgagggtgatcccttgatgatgatggatgaggagatctcagtgattgatggagatgaagcccaggtgacccaacagccaggccatttattctggcctccgggctctgccctaacagctaggcttcggcgtctagtaacagcgtatcagcgcagctacaagagagaacaaatgaagatagaggctgcagaacgtggggaccggcgaaggcggcgttgtgaagcagccttcaagctgaaagaaattgcacggcgggagaaacaacaacgatggacaaggcgtgaacaaactgatttttatcgagtggtgtctacgtttggtgtggaatatgaccctgacaccatgcagttccattgggatcgcttccgcacttttgctcgactagacaaaaagacagatgaaagccttaccaagtacttccatggctttgtggccatgtgccgccaagtatgccgccttcccccagcagctggagatgaaccccccgaccctaacctgttcattgagcccatcactgaggagagagcctcacggactctctaccgtatagaattgcttcggcgcttacgggaacaagttttatgccacccccttttggaagatcggctggcattgtgtcagcctcctggtcctgaattgcccaaatggtgggagcctgttcggcatgatggggagcttctaagaggggcagcccgccatggggtgagccaaacagactgcaacatcatgcaggacccagacttctcttttctggctgcccgtatgaattatatgcagaaccatcaagcaggagcaccagctccatccttgtcacgctgctctactccactgctgcaccagcagtatacctcacgcactgcctcaccactgcccctgcgcccagatgctcctgttgaaaagtcacccgaggagacagctacccaggtccccagtctggagagtctgactttaaagctagagcacgaggtggtggccaggagccgaccaaccccacaagactatgagatgcgagtatccccctctgatactacccctctggtttcccggagtgttccaccagtcaaactggaggatgaggatgattcggactctgagctggacttgagcaagctgtcaccatcttcttcttcttcctcatcctcatccagctccagctccagcactgatgagagtgaggatgagaaggaagagaagctaactgaccagtcccgctcaaagctctatgatgaagagagtctcctgtccctcactatgtcccaagatggattcccaaatgaagatggagaacaaatgacccctgagcttctgctactgcaggaaagacaaagagcctctgagtggcccaaggatcgtgtcctgataaaccgtattgacctcgtctgccaggctgtactctcagggaagtggccttctagccgtaggagccaggaaatggtaacaggaggaattttggggccaggcaaccacttgctagacagtccctcattgactcctggagaatatggtgactctccagtccccacaccacgaagtagtagtgcagcttccatggcagaggaggaagcatctgcagtcagcacagcggcagcccagttcaccaaacttcgccgaggcatggatgaaaaggagtttacagttcaaatcaaagatgaggaaggattgaagttaacattccagaagcacaagttgatggcgaatggagtaatgggagatggacatccactgtttcataagaagaaggggaacagaaagaagctagtagagctggaggtggagtgcatggaagagcctaatcaccttgatgtggacctggagacccggatccctgtcatcaataaggtggatggtactttgctggtgggtgaggatgcccctcgccgggctgaactggagaatatggtgactctccagtccccacaccacgaagtagtagtgcagcttccatggcagaggaggaagcatctgcagtcagcacagcggcagcccagttcaccaaacttcgccgaggcatggatgaaaaggagtttacagttcaaatcaaagatgaggaaggattgaagttaacattcctagcctctggcagagcctgttcctggccgaactgtggatacagctggagggtcaggaactgttaccttctttccccttggcattaataaatttaagttaatcctt

SEQ ID NO: 339925 - DNA, 1237 bp, Homo sapiens
aagaagcaaaaactggttaatatgagtttcggtacaaaatcattgatcttaactttagtatcagaatgtttcaaccagctaagtccagcatttcctccttcccattaccaccaatcaagcctagtatcgctgtgcttgttttgcctcttctaaggtacattcagtaaaaaagcattgtaagctaggactctgttggctttggtttcttttcttttttcccctttctttctttttattatcttctattccctcctcctagggtcatcacactgaaacggtgttcaaccgggttttgccagggcctattgcaccagagagcagcaagaagcgggcccgtaggatgcgaccagacctttctaagatgatggccctcatgcagggtggaagcactgggtctctatctctgcataacacgttccaacacagcagtagtggcctacagtctgtgtcatctttgggtcacagcagtgccacttctgcatctttgccttttatgccatttgtgatgggtggtgcaccatcatcccctcatgtagactccagcaccatgcttcatcaccaccaccaccacccccacccccaccatcaccaccatcaccatccaggcttgagagcccctggctacccctcttcaccagtgactaccgcctctggtactaccttgcggttgccaccactgcaacctgaggaggatgacgatgaggatgaagaagatgatgatgacttatctcagggctatgatagctcagaaagggacttctcactcattgatgatcctatgatgccagctaactcagactccagtgaagatgctgatgactgaagccccagcatgggccccattgcttgggcggctgctgtattttcatttactctggcccttggactatggaaacgtgggaggggcaggggagatgtggggaagtccaggactccaggaggtgaaaaggaaaaaaaaaaaaaaatgtacctgattgctcccaattatgagaggattgggtgggcaggggaactcctaaaataatacatgaccacttcctcatttctggggaaggaaaggagactagagcagctggtgtgctcacccctccctagtcacctccattaaccacagactatgtagcgctggccctagcctctggcagagcctgttcctggccgaactgtggatacagctggagggtcaggaactgttaccttctttccccttggcattaataaatttaagttaatcctt

SEQ ID NO: 339926 - DNA, 4228 bp, Homo sapiens
ctgggagcgagaatttaatacatggacagaaatgaacactattgtgtaccatggcagtctggccagcaggcagatgattcaacagtatgaaatgtactgcaaagattcacggggacgcctcatcccaggcgcatacaagtttgacgctctgatcaccacttttgagatgattttgtcagattgtcctgagcttcgtgaaattgaatggcgttgtgttatcattgatgaagcccatcgactgaaaaaccgtaattgcaagctgcttgatagtctcaagcacatggacctggaacacaaggtgctactcacaggaacaccattgcaaaatactgtagaagaactgtttagcttgcttcatttcttggaaccgtcacaatttccctcagaatcagagtttctcaaggactttggggatctcaagacagaggaacaggttcaaaagctacaggccattcttaagccaatgatgctgagaagactcaaagaggatgttgaaaaaaacttggcacccaaacaggaaacaattattgaagtagagctgactaatatccagaagaaatactatcgggctattttggagaagaatttctccttcctttccaaaggggcaggtcataccaacatgcctaatctacttaacacaatgatggagttgcgcaagtgctgcaaccacccatatctcatcaatggtgctgaagaaaaaatcctaacagaattccgtgaagcttgccatattatacctcatgactttcacctgcaggccatggttcgttcagccggcaaactggttcttattgacaagttgcttccaaagcttaaagctggtggccataaagttctgatcttctctcagatggtgcgctgcctagacatcctagaggattatttaatccagaggaggtacttatatgaacgtattgatgggcgagttagaggcaaccttcgacaggctgccattgaccgcttcagcaagcctgactcagaccgctttgtcttcttactgtgtacccgggctggtggacttggtattaatcttacagctgctgatacctgcatcatctttgattcagactggaatccacaaaatgacctgcaggcccaggcacgatgtcatcgaattgggcagagcaaagctgtgaaggtgtaccgcctcatcactcgtaattcctacgagagagagatgtttgataaggccagcctcaagttggggttggataaggctgtgcttcaatccatgagtggtcgggatggcaacattactggaatccaacagttctctaagaaggagattgaagatcttttaagaaaaggagcatatgcagccatcatggaggaagatgatgaaggctccaagttttgtgaagaggacattgaccagatcttgttaagacgaactacaaccatcaccattgaatctgaaggaaaaggttccacctttgctaaggcaagctttgttgcttctgaaaacaggacagatatttctttggatgaccccaacttttggcaaaagtgggccaaaaaggctgacctagacatggatctgctcaacagcaagaataatttggtaattgacacacctagagtacgaaaacaaacgcgccactttagcactctgaaagatgatgacctggtggaattctctgatttggaaagtgaggatgatgagcggccacgctcccgcagacatgaccgtcatcatgcctatgggcgcactgactgctttcgggtggaaaagcatctcctggtatatggttggggacgatggcgagatattttatctcatggacgcttcaagcgacgtatgactgaacgagatgtggagaccatttgtcgggccattctcgtgtactgtcttctacactaccgtggggatgaaaatattaaaggcttcatctgggacttgattagcccagctgaaaatggcaagacaaaagaattgcagaatcattcaggtctatctatccctgtgcctcgtggacgcaaaggaaaaaaagtaaagtcacaaagcacttttgatatccataaggcagattggatccggaaatataaccctgacactttgttccaagatgaaagttataagaagcacttgaaacatcagtgtaacaaggtactgttgcgggtacgaatgctatactacctgaggcaggaggttattggagaccaagcagaaaaggtgttagggggtgcgattgccagtgagattgacatatggttcccagtagtggatcaactggaggttccaacaacttggtgggacagtgaggctgacaagtcgctgctcattggagtctttaaacatggctatgagaaatataataccatgagggcagacccagccttatgtttcctagaaaaggctggccgaccagatgacaaagcaattgcagcagaacatcgagtgttggataacttctctgacatagtagaaggggttgactttgataaagattgtgaagatcctgaatataaaccactccaaggtcccccaaaggaccaagatgatgagggtgatcccttgatgatgatggatgaggagatctcagtgattgatggagatgaagcccaggtgacccaacagccaggccatttattctggcctccgggctctgccctaacagctaggcttcggcgtctagtaacagcgtatcagcgcagctacaagagagaacaaatgaagatagaggctgcagaacgtggggaccggcgaaggcggcgttgtgaagcagccttcaagctgaaagaaattgcacggcgggagaaacaacaacgatggacaaggcgtgaacaaactgatttttatcgagtggtgtctacgtttggtgtggaatatgaccctgacaccatgcagttccattgggatcgcttccgcacttttgctcgactagacaaaaagacagatgaaagccttaccaagtacttccatggctttgtggccatgtgccgccaagtatgccgccttcccccagcagctggagatgaaccccccgaccctaacctgttcattgagcccatcactgaggagagagcctcacggactctctaccgtatagaattgcttcggcgcttacgggaacaagttttatgccacccccttttggaagatcggctggcattgtgtcagcctcctggtcctgaattgcccaaatggtgggagcctgttcggcatgatggggagcttctaagaggggcagcccgccatggggtgagccaaacagactgcaacatcatgcaggacccagacttctcttttctggctgcccgtatgaattatatgcagaaccatcaagcaggagcaccagctccatccttgtcacgctgctctactccactgctgcaccagcagtatacctcacgcactgcctcaccactgcccctgcgcccagatgctcctgttgaaaagtcacccgaggagacagctacccaggtccccagtctggagagtctgactttaaagctagagcacgaggtggtggccaggagccgaccaaccccacaagactatgagatgcgagtatccccctctgatactacccctctggtttcccggagtgttccaccagtcaaactggaggatgaggatgattcggactctgagctggacttgagcaagctgtcaccatcttcttcttcttcctcatcctcatccagctccagctccagcactgatgagagtgaggatgagaaggaagagaagctaactgaccagtcccgctcaaagctctatgatgaagagagtctcctgtccctcactatgtcccaagatggacatccactgtttcataagaagaaggggaacagaaagaagctagtagagctggaggtggagtgcatggaagagcctaatcaccttgatgtggacctggagacccggatccctgtcatcaataaggtggatggtactttgctggtgggtgaggatgcccctcgccgggctgaactggagaatatggtgactctccagtccccacaccacgaagtagtagtgcagcttccatggcagaggaggaagcatctgcagtcagcacagcggcagcccagttcaccaaacttcgccgaggcatggatgaaaaggagtttacagttcaaatcaaagatgaggaaggattgaagttaacattcctagcctctggcagagcctgttcctggccgaactgtggatacagctggagggtcaggaactgttaccttctttccccttggcattaataaatttaagttaatcctt

SEQ ID NO: 339927 - DNA, 3078 bp, Homo sapiens
ctgggagcgagaatttaatacatggacagaaatgaacactattgtgtaccatggcagtctggccagcaggcagatgattcaacagtatgaaatgtactgcaaagattcacggggacgcctcatcccaggcgcatacaagtttgacgctctgatcaccacttttgagatgattttgtcagattgtcctgagcttcgtgaaattgaatggcgttgtgttatcattgatgaagcccatcgactgaaaaaccgtaattgcaagctgcttgatagtctcaagcacatggacctggaacacaaggtgctactcacaggaacaccattgcaaaatactgtagaagaactgtttagcttgcttcatttcttggaaccgtcacaatttccctcagaatcagagtttctcaaggactttggggatctcaagacagaggaacaggttcaaaagctacaggccattcttaagccaatgatgctgagaagactcaaagaggatgttgaaaaaaacttggcacccaaacaggaaacaattattgaagtagagctgactaatatccagaagaaatactatcgggctattttggagaagaatttctccttcctttccaaaggggcaggtcataccaacatgcctaatctacttaacacaatgatggagttgcgcaagtgctgcaaccacccatatctcatcaatggtgctgaagaaaaaatcctaacagaattccgtgaagcttgccatattatacctcatgactttcacctgcaggccatggttcgttcagccggcaaactggttcttattgacaagttgcttccaaagcttaaagctggtggccataaagttctgatcttctctcagatggtgcgctgcctagacatcctagaggattatttaatccagaggaggtacttatatgaacgtattgatgggcgagttagaggcaaccttcgacaggctgccattgaccgcttcagcaagcctgactcagaccgctttgtcttcttactgtgtacccgggctggtggacttggtattaatcttacagctgctgatacctgcatcatctttgattcagactggaatccacaaaatgacctgcaggcccaggcacgatgtcatcgaattgggcagagcaaagctgtgaaggtgtaccgcctcatcactcgtaattcctacgagagagagatgtttgataaggccagcctcaagttggggttggataaggctgtgcttcaatccatgagtggtcgggatggcaacattactggaatccaacagttctctaagaaggagattgaagatcttttaagaaaaggagcatatgcagccatcatggaggaagatgatgaaggctccaagttttgtgaagaggacattgaccagatcttgttaagacgaactacaaccatcaccattgaatctgaaggaaaaggttccacctttgctaaggcaagctttgttgcttctgaaaacaggacagatatttctttggatgaccccaacttttggcaaaagtgggccaaaaaggctgacctagacatggatctgctcaacagcaagaataatttggtaattgacacacctagagtacgaaaacaaacgcgccactttagcactctgaaagatgatgacctggtggaattctctgatttggaaagtgaggatgatgagcggccacgctcccgcagacatgaccgtcatcatgcctatgggcgcactgactgctttcgggtggaaaagcatctcctggtatatggttggggacgatggcgagatattttatctcatggacgcttcaagcgacgtatgactgaacgagatgtggagaccatttgtcgggccattctcgtgtactgtcttctacactaccgtggggatgaaaatattaaaggcttcatctgggacttgattagcccagctgaaaatggcaagacaaaagaattgcagaatcattcaggtctatctatccctgtgcctcgtggacgcaaaggaaaaaaagtaaagtcacaaagcacttttgatatccataaggcagattggatccggaaatataaccctgacactttgttccaagatgaaagttataagaagcacttgaaacatcagtgtaacaaggtactgttgcgggtacgaatgctatactacctgaggcaggaggttattggagaccaagcagaaaaggtgttagggggtgcgattgccagtgagattgacatatggttcccagtagtggatcaactggaggttccaacaacttggtgggacagtgaggctgacaagtcgctgctcattggagtctttaaacatggctatgagaaatataataccatgagggcagacccagccttatgtttcctagaaaaggctggccgaccagatgacaaagcaattgcagcagaacatcgagtgttggataacttctctgacatagtagaaggggttgactttgataaagattgtgaagatcctgaatataaaccactccaaggtcccccaaaggaccaagatgatgagggtgatcccttgatgatgatggatgaggagatctcagtgattgatggagatgaagcccaggtgacccaacagccaggccatttattctggcctccgggctctgccctaacagctaggcttcggcgtctagtaacagcgtatcagcgcagctacaagagagaacaaatgaagatagaggctgcagaacgtggggaccggcgaaggcggcgttgtgaagcagccttcaagctgaaagaaattgcacggcgggagaaacaacaacgatggacaaggcgtgaaacaaactgatagcaatcgaaggggtgtctaacgttggacgtggaactatgacccatgagacacaatgacaggaccataaggagatacgctatacgcactataggaacgacaaagacaacagaagaaagatgaaaagaccagaccaagtaaatcgcaagggcatacgaggggcaatggagccggacacagtaagacgacataaccccagcaagatggagatgaacacagcggaagcaaagctggtcactggagacaaacactgaagaagaagaggcataaagacagcaaaa

SEQ ID NO: 339928 - DNA, 375 bp, Homo sapiens
catggtgaatctgcaggcagaactgcatcctggctgatgagatgggattgggcaaaactattcagtccattgccttcttgcaggaagtatataatgtgggcatccatggtcccttcttggtcattgccccactgtccacaattactaactgggagcgagaatttaatacatggacagaaatgaacactattgtgtaccatggcagtctggccagcaggcagatgattcaacagtatgaaatgtactgcaaagattcacgggtgagttgcatgtcttgggaatactatgagttagagaaagtcggccaaggtacctggtattttaagggctatatatgaatagaagacttttattgaaagtcttcaatatgcctat

SEQ ID NO: 339929 - DNA, 432 bp, Homo sapiens
ggccattctcgtgtactgtcttctacactaccgtggggatgaaaatattaaaggcttcatctgggacttgattagcccagctgaaaatggcaagacaaaagaattgcagaatcattcaggtaattatcaactctttactttatgtttttctataggttaatctaatccttttcaggtccaagggtttttctcaatccaagtctttgatgtctcccctttcccaggtctatctatccctgtgcctcgtggacgcaaaggaaaaaaagtaaagtcacaaagcacttttgatatccataaggcagattggatccggaaatataaccctgacactttgttccaagatgaaagttataagaagcacttgaaacatcagtgtaacaagtaagcatagaattagcagacattttccacctcaaacttctacagtgttac

SEQ ID NO: 339930 - DNA, 398 bp, Homo sapiens
gactttaaagctagagcacgaggtggtggccaggagccgaccaaccccacaagactatgagatgcgagtatccccctctgatactacccctctggtttcccggagtgttccaccagtcaaactggaggatgaggatgattcggactctgagctggacttgagcaagctgtcaccatcttcttcttcttcctcatcctcatccagctccagctccagcactgatgagagtgaggatgagaaggaagagaagctaagtgagtgcatgtgacaggctgttggcccccttccctatttccccctctcttctctttcccttttctaaatgcatcctcttgagagagatttggattttgatttgataaaatgtcaaaagagtgccattctttgggcctttattc

SEQ ID NO: 339931 - DNA, 3649 bp, Homo sapiens
ctagggtgaggccggcgtgaatcggccgaggcagaccaaagaattgcagaatcattcaggtctatctatccctgtgcctcgtggacgcaaaggaaaaaaagtaaagtcacaaagcacttttgatatccataaggcagattggatccggaaatataaccctgacactttgttccaagatgaaagttataagaagcacttgaaacatcagtgtaacaaggtactgttgcgggtacgaatgctatactacctgaggcaggaggttattggagaccaagcagaaaaggtgttagggggtgcgattgccagtgagattgacatatggttcccagtagtggatcaactggaggttccaacaacttggtgggacagtgaggctgacaagtcgctgctcattggagtctttaaacatggctatgagaaatataataccatgagggcagacccagccttatgtttcctagaaaaggctggccgaccagatgacaaagcaattgcagcagaacatcgagtgttggataacttctctgacatagtagaaggggttgactttgataaagattgtgaagatcctgaatataaaccactccaaggtcccccaaaggaccaagatgatgagggtgatcccttgatgatgatggatgaggagatctcagtgattgatggagatgaagcccaggtgacccaacagccaggccatttattctggcctccgggctctgccctaacagctaggcttcggcgtctagtaacagcgtatcagcgcagctacaagagagaacaaatgaagatagaggctgcagaacgtggggaccggcgaaggcggcgttgtgaagcagccttcaagctgaaagaaattgcacggcgggagaaacaacaacgatggacaaggcgtgaacaaactgatttttatcgagtggtgtctacgtttggtgtggaatatgaccctgacaccatgcagttccattgggatcgcttccgcacttttgctcgactagacaaaaagacagatgaaagccttaccaagtacttccatggctttgtggccatgtgccgccaagtatgccgccttcccccagcagctggagatgaaccccccgaccctaacctgttcattgagcccatcactgaggagagagcctcacggactctctaccgtatagaattgcttcggcgcttacgggaacaagttttatgccacccccttttggaagatcggctggcattgtgtcagcctcctggtcctgaattgcccaaatggtgggagcctgttcggcatgatggggagcttctaagaggggcagcccgccatggggtgagccaaacagactgcaacatcatgcaggacccagacttctcttttctggctgcccgtatgaattatatgcagaaccatcaagcaggagcaccagctccatccttgtcacgctgctctactccactgctgcaccagcagtatacctcacgcactgcctcaccactgcccctgcgcccagatgctcctgttgaaaagtcacccgaggagacagctacccaggtccccagtctggagagtctgactttaaagctagagcacgaggtggtggccaggagccgaccaaccccacaagactatgagatgcgagtatccccctctgatactacccctctggtttcccggagtgttccaccagtcaaactggaggatgaggatgattcggactctgagctggacttgagcaagctgtcaccatcttcttcttcttcctcatcctcatccagctccagctccagcactgatgagagtgaggatgagaaggaagagaagctaactgaccagtcccgctcaaagctctatgatgaagagagtctcctgtccctcactatgtcccaagatggattcccaaatgaagatggagaacaaatgacccctgagcttctgctactgcaggaaagacaaagagcctctgagtggcccaaggatcgtgtcctgataaaccgtattgacctcgtctgccaggctgtactctcagggaagtggccttctagccgtaggagccaggaaatggtaacaggaggaattttggggccaggcaaccacttgctagacagtccctcattgactcctggagaatatggtgactctccagtccccacaccacgaagtagtagtgcagcttccatggcagaggaggaagcatctgcagtcagcacagcggcagcccagttcaccaaacttcgccgaggcatggatgaaaaggagtttacagttcaaatcaaagatgaggaaggattgaagttaacattccagaagcacaagttgatggcgaatggagtaatgggagatggacatccactgtttcataagaagaaggggaacagaaagaagctagtagagctggaggtggagtgcatggaagagcctaatcaccttgatgtggacctggagacccggatccctgtcatcaataaggtggatggtactttgctggtgggtgaggatgcccctcgccgggctgaactggagatgtggttacagggtcatccagagtttgctgttgatccccgatttctagcgtatatggaggatcgcagaaaacagaagtggcaaagatgtaaaaaaaataataaggcagaattgaactgtttgggaatggaaccagtacagacagctaactctagaaatgggaaaaagggtcatcacactgaaacggtgttcaaccgggttttgccagggcctattgcaccagagagcagcaagaagcgggcccgtaggatgcgaccagacctttctaagatgatggccctcatgcagggtggaagcactgggtctctatctctgcataacacgttccaacacagcagtagtggcctacagtctgtgtcatctttgggtcacagcagtgccacttctgcatctttgccttttatgccatttgtgatgggtggtgcaccatcatcccctcatgtagactccagcaccatgcttcatcaccaccaccaccacccccacccccaccatcaccaccatcaccatccaggcttgagagcccctggctacccctcttcaccagtgactaccgcctctggtactaccttgcggttgccaccactgcaacctgaggaggatgacgatgaggatgaagaagatgatgatgacttatctcagggctatgatagctcagaaagggacttctcactcattgatgatcctatgatgccagctaactcagactccagtgaagatgctgatgactgaagccccagcatgggccccattgcttgggcggctgctgtattttcatttactctggcccttggactatggaaacgtgggaggggcaggggagatgtggggaagtccaggactccaggaggtgaaaaggaaaaaaaaaaaaaaatgtacctgattgctcccaattatgagaggattgggtgggcaggggaactcctaaaataatacatgaccacttcctcatttctggggaaggaaaggagactagagcagctggtgtgctcacccctccctagtcacctccattaaccacagactatgtagcgctggccctagcctctggcagagcctgttcctggccgaactgtggatacagctggagggtcaggaactgttaccttctttccccttggcattaataaatttaagttaatcctt

SEQ ID NO: 339932 - DNA, 5941 bp, Homo sapiens
ctgggagcgagaatttaatacatggacagaaatgaacactattgtgtaccatggcagtctggccagcaggcagatgattcaacagtatgaaatgtactgcaaagattcacggggacgcctcatcccaggcgcatacaagtttgacgctctgatcaccacttttgagatgattttgtcagattgtcctgagcttcgtgaaattgaatggcgttgtgttatcattgatgaagcccatcgactgaaaaaccgtaattgcaagctgcttgatagtctcaagcacatggacctggaacacaaggtgctactcacaggaacaccattgcaaaatactgtagaagaactgtttagcttgcttcatttcttggaaccgtcacaatttccctcagaatcagagtttctcaaggactttggggatctcaagacagaggaacaggttcaaaagctacaggccattcttaagccaatgatgctgagaagactcaaagaggatgttgaaaaaaacttggcacccaaacaggaaacaattattgaagtagagctgactaatatccagaagaaatactatcgggctattttggagaagaatttctccttcctttccaaaggggcaggtcataccaacatgcctaatctacttaacacaatgatggagttgcgcaagtgctgcaaccacccatatctcatcaatggtgctgaagaaaaaatcctaacagaattccgtgaagcttgccatattatacctcatgactttcacctgcaggccatggttcgttcagccggcaaactggttcttattgacaagttgcttccaaagcttaaagctggtggccataaagttctgatcttctctcagatggtgcgctgcctagacatcctagaggattatttaatccagaggaggtacttatatgaacgtattgatgggcgagttagaggcaaccttcgacaggctgccattgaccgcttcagcaagcctgactcagaccgctttgtcttcttactgtgtacccgggctggtggacttggtattaatcttacagctgctgatacctgcatcatctttgattcagactggaatccacaaaatgacctgcaggcccaggcacgatgtcatcgaattgggcagagcaaagctgtgaaggtgtaccgcctcatcactcgtaattcctacgagagagagatgtttgataaggccagcctcaagttggggttggataaggctgtgcttcaatccatgagtggtcgggatggcaacattactggaatccaacagttctctaagaaggagattgaagatcttttaagaaaaggagcatatgcagccatcatggaggaagatgatgaaggctccaagttttgtgaagaggacattgaccagatcttgttaagacgaactacaaccatcaccattgaatctgaaggaaaaggttccacctttgctaaggcaagctttgttgcttctgaaaacaggacagatatttctttggatgaccccaacttttggcaaaagtgggccaaaaaggctgacctagacatggatctgctcaacagcaagaataatttggtaattgacacacctagagtacgaaaacaaacgcgccactttagcactctgaaagatgatgacctggtggaattctctgatttggaaagtgaggatgatgagcggccacgctcccgcagacatgaccgtcatcatgcctatgggcgcactgactgctttcgggtggaaaagcatctcctggtatatggttggggacgatggcgagatattttatctcatggacgcttcaagcgacgtatgactgaacgagatgtggagaccatttgtcgggccattctcgtgtactgtcttctacactaccgtggggatgaaaatattaaaggcttcatctgggacttgattagcccagctgaaaatggcaagacaaaagaattgcagaatcattcaggtctatctatccctgtgcctcgtggacgcaaaggaaaaaaagtaaagtcacaaagcacttttgatatccataaggcagattggatccggaaatataaccctgacactttgttccaagatgaaagttataagaagcacttgaaacatcagtgtaacaaggtactgttgcgggtacgaatgctatactacctgaggcaggaggttattggagaccaagcagaaaaggtgttagggggtgcgattgccagtgagattgacatatggttcccagtagtggatcaactggaggttccaacaacttggtgggacagtgaggctgacaagtcgctgctcattggagtctttaaacatggctatgagaaatataataccatgagggcagacccagccttatgtttcctagaaaaggctggccgaccagatgacaaagcaattgcagcagaacatcgagtgttggataacttctctgacatagtagaaggggttgactttgataaagattgtgaagatcctgaatataaaccactccaaggtcccccaaaggaccaagatgatgagggtgatcccttgatgatgatggatgaggagatctcagtgattgatggagatgaagcccaggtgacccaacagccaggccatttattctggcctccgggctctgccctaacagctaggcttcggcgtctagtaacagcgtatcagcgcagctacaagagagaacaaatgaagatagaggctgcagaacgtggggaccggcgaaggcggcgttgtgaagcagccttcaagctgaaagaaattgcacggcgggagaaacaacaacgatggacaaggcgtgaacaaactgatttttatcgagtggtgtctacgtttggtgtggaatatgaccctgacaccatgcagttccattgggatcgcttccgcacttttgctcgactagacaaaaagacagatgaaagccttaccaagtacttccatggctttgtggccatgtgccgccaagtatgccgccttcccccagcagctggagatgaaccccccgaccctaacctgttcattgagcccatcactgaggagagagcctcacggactctctaccgtatagaattgcttcggcgcttacgggaacaagttttatgccacccccttttggaagatcggctggcattgtgtcagcctcctggtcctgaattgcccaaatggtgggagcctgttcggcatgatggggagcttctaagaggggcagcccgccatggggtgagccaaacagactgcaacatcatgcaggacccagacttctcttttctggctgcccgtatgaattatatgcagaaccatcaagcaggagcaccagctccatccttgtcacgctgctctactccactgctgcaccagcagtatacctcacgcactgcctcaccactgcccctgcgcccagatgctcctgttgaaaagtcacccgaggagacagctacccaggtccccagtctggagagtctgactttaaagctagagcacgaggtggtggccaggagccgaccaaccccacaagactatgagatgcgagtatccccctctgatactacccctctggtttcccggagtgttccaccagtcaaactggaggatgaggatgattcggactctgagctggacttgagcaagctgtcaccatcttcttcttcttcctcatcctcatccagctccagctccagcactgatgagagtgaggatgagaaggaagagaagctaactgaccagtcccgctcaaagctctatgatgaagagagtctcctgtccctcactatgtcccaagatggattcccaaatgaagatggagaacaaatgacccctgagcttctgctactgcaggaaagacaaagagcctctgagtggcccaaggatcgtgtcctgataaaccgtattgacctcgtctgccaggctgtactctcagggaagtggccttctagccgtaggagccaggaaatggtaacaggaggaattttggggccaggcaaccacttgctagacagtccctcattgactcctggagaatatggtgactctccagtccccacaccacgaagtagtagtgcagcttccatggcagaggaggaagcatctgcagtcagcacagcggcagcccagttcaccaaacttcgccgaggcatggatgaaaaggagtttacagttcaaatcaaagatgaggaaggattgaagttaacattccagaagcacaagttgatggcgaatggagtaatgggagatggacatccactgtttcataagaagaaggggaacagaaagaagctagtagagctggaggtggagtgcatggaagagcctaatcaccttgatgtggacctggagacccggatccctgtcatcaataaggtggatggtactttgctggtgggtgaggatgcccctcgccgggctgaactggagatgtggttacagggtcatccagagtttgctgttgatccccgatttctagcggtgagtggcagtcccatccagcaagatttaaagtcattcctttggtatttaagctgcatgagaaagagaaagcatgacatactgtgtcatcgtttctgtatctgcaagataagggtaataattaataatacccagtcttccaacctcacaattgttgtgatgcccaaaataaaataatgttgaagtactttaagtgctaggcaaatatttactattgaactattatataaaccacctaatattttttggagagatcccacttaatggcagttttccactaggatgaatcctttatctatgtaataagtgtttattatcaaacaaaagacactagtactttaataattactccagagaagatttctattcctctaggataactgattttttctattgcagtatatggaggatcgcagaaaacagaagtggcaaagatgtaaaaaaaataataaggcagaattgaactgtttgggaatggaaccagtacagacagctaactctagaaatgggaaaaagggtcatcacactgaaacggtgttcaaccgggttttgccagggcctattgcaccagagagcagcaagaagcgggcccgtaggatgcgaccagacctttctaagatgatggccctcatgcagggtggaagcactgggtctctatctctgcataacacgttccaacacagcagtagtggcctacagtctgtgtcatctttgggtcacagcagtgccacttctgcatctttgccttttatgccatttgtgatgggtggtgcaccatcatcccctcatgtagactccagcaccatgcttcatcaccaccaccaccacccccacccccaccatcaccaccatcaccatccaggcttgagagcccctggctacccctcttcaccagtgactaccgcctctggtactaccttgcggttgccaccactgcaacctgaggaggatgacgatgaggatgaagaagatgatgatgacttatctcagggctatgatagctcagaaagggacttctcactcattgatgatcctatgatgccagctaactcagactccagtgaagatgctgatgactgaagccccagcatgggccccattgcttgggcggctgctgtattttcatttactctggcccttggactatggaaacgtgggaggggcaggggagatgtggggaagtccaggactccaggaggtgaaaaggaaaaaaaaaaaaaaatgtacctgattgctcccaattatgagaggattgggtgggcaggggaactcctaaaataatacatgaccacttcctcatttctggggaaggaaaggagactagagcagctggtgtgctcacccctccctagtcacctccattaaccacagactatgtagcgctggccctagcctctggcagagcctgttcctggccgaactgtggatacagctggagggtcaggaactgttaccttctttccccttggcattaataaatttaagttaatcctt

SEQ ID NO: 339933 - DNA, 4541 bp, Homo sapiens
ctgggagcgagaatttaatacatggacagaaatgaacactattgtgtaccatggcagtctggccagcaggcagatgattcaacagtatgaaatgtactgcaaagattcacggggacgcctcatcccaggcgcatacaagtttgacgctctgatcaccacttttgagatgattttgtcagattgtcctgagcttcgtgaaattgaatggcgttgtgttatcattgatgaagcccatcgactgaaaaaccgtaattgcaagctgcttgatagtctcaagcacatggacctggaacacaaggtgctactcacaggaacaccattgcaaaatactgtagaagaactgtttagcttgcttcatttcttggaaccgtcacaatttccctcagaatcagagtttctcaaggactttggggatctcaagacagaggaacaggttcaaaagctacaggccattcttaagccaatgatgctgagaagactcaaagaggatgttgaaaaaaacttggcacccaaacaggaaacaattattgaagtagagctgactaatatccagaagaaatactatcgggctattttggagaagaatttctccttcctttccaaaggggcaggtcataccaacatgcctaatctacttaacacaatgatggagttgcgcaagtgctgcaaccacccatatctcatcaatggtgctgaagaaaaaatcctaacagaattccgtgaagcttgccatattatacctcatgactttcacctgcaggccatggttcgttcagccggcaaactggttcttattgacaagttgcttccaaagcttaaagctggtggccataaagttctgatcttctctcagatggtgcgctgcctagacatcctagaggattatttaatccagaggaggtacttatatgaacgtattgatgggcgagttagaggcaaccttcgacaggctgccattgaccgcttcagcaagcctgactcagaccgctttgtcttcttactgtgtacccgggctggtggacttggtattaatcttacagctgctgatacctgcatcatctttgattcagactggaatccacaaaatgacctgcaggcccaggcacgatgtcatcgaattgggcagagcaaagctgtgaaggtgtaccgcctcatcactcgtaattcctacgagagagagatgtttgataaggccagcctcaagttggggttggataaggctgtgcttcaatccatgagtggtcgggatggcaacattactggaatccaacagttctctaagaaggagattgaagatcttttaagaaaaggagcatatgcagccatcatggaggaagatgatgaaggctccaagttttgtgaagaggacattgaccagatcttgttaagacgaactacaaccatcaccattgaatctgaaggaaaaggttccacctttgctaaggcaagctttgttgcttctgaaaacaggacagatatttctttggatgaccccaacttttggcaaaagtgggccaaaaaggctgacctagacatggatctgctcaacagcaagaataatttggtaattgacacacctagagtacgaaaacaaacgcgccactttagcactctgaaagatgatgacctggtggaattctctgatttggaaagtgaggatgatgagcggccacgctcccgcagacatgaccgtcatcatgcctatgggcgcactgactgctttcgggtggaaaagcatctcctggtatatggttggggacgatggcgagatattttatctcatggacgcttcaagcgacgtatgactgaacgagatgtggagaccatttgtcgggccattctcgtgtactgtcttctacactaccgtggggatgaaaatattaaaggcttcatctgggacttgattagcccagctgaaaatggcaagacaaaagaattgcagaatcattcaggtctatctatccctgtgcctcgtggacgcaaaggaaaaaaagtaaagtcacaaagcacttttgatatccataaggcagattggatccggaaatataaccctgacactttgttccaagatgaaagttataagaagcacttgaaacatcagtgtaacaaggtactgttgcgggtacgaatgctatactacctgaggcaggaggttattggagaccaagcagaaaaggtgttagggggtgcgattgccagtgagattgacatatggttcccagtagtggatcaactggaggttccaacaacttggtgggacagtgaggctgacaagtcgctgctcattggagtctttaaacatggctatgagaaatataataccatgagggcagacccagccttatgtttcctagaaaaggctggccgaccagatgacaaagcaattgcagcagaacatcgagtgttggataacttctctgacatagtagaaggggttgactttgataaagattgtgaagatcctgaatataaaccactccaaggtcccccaaaggaccaagatgatgagggtgatcccttgatgatgatggatgaggagatctcagtgattgatggagatgaagcccaggtgacccaacagccaggccatttattctggcctccgggctctgccctaacagctaggcttcggcgtctagtaacagcgtatcagcgcagctacaagagagaacaaatgaagatagaggctgcagaacgtggggaccggcgaaggcggcgttgtgaagcagccttcaagctgaaagaaattgcacggcgggagaaacaacaacgatggacaaggcgtgaacaaactgatttttatcgagtggtgtctacgtttggtgtggaatatgaccctgacaccatgcagttccattgggatcgcttccgcacttttgctcgactagacaaaaagacagatgaaagccttaccaagtacttccatggctttgtggccatgtgccgccaagtatgccgccttcccccagcagctggagatgaaccccccgaccctaacctgttcattgagcccatcactgaggagagagcctcacggactctctaccgtatagaattgcttcggcgcttacgggaacaagttttatgccacccccttttggaagatcggctggcattgtgtcagcctcctggtcctgaattgcccaaatggtgggagcctgttcggcatgatggggagcttctaagaggggcagcccgccatggggtgagccaaacagactgcaacatcatgcaggacccagacttctcttttctggctgcccgtatgaattatatgcagaaccatcaagcaggagcaccagctccatccttgtcacgctgctctactccactgctgcaccagcagtatacctcacgcactgcctcaccactgcccctgcgcccagatgctcctgttgaaaagtcacccgaggagacagctacccaggtccccagtctggagagtctgactttaaagctagagcacgaggtggtggccaggagccgaccaaccccacaagactatgagatgcgagtatccccctctgatactacccctctggtttcccggagtgttccaccagtcaaactggaggatgaggatgattcggactctgagctggacttgagcaagctgtcaccatcttcttcttcttcctcatcctcatccagctccagctccagcactgatgagagtgaggatgagaaggaagagaagctaactgaccagtcccgctcaaagctctatgatgaagagagtctcctgtccctcactatgtcccaagatggattcccaaatgaagatggagaacaaatgacccctgagcttctgctactgcaggaaagacaaagagcctctgagtggcccaaggatcgtgtcctgataaaccgtattgacctcgtctgccaggctgtactctcagggaagtggccttctagccgtaggagccaggaaatggtaacaggaggaattttggggccaggcaaccacttgctagacagtccctcattgactcctggagaatatggtgactctccagtccccacaccacgaagtagtagtgcagcttccatggcagaggaggaagcatctgcagtcagcacagcggcagcccagttcaccaaacttcgccgaggcatggatgaaaaggagtttacagttcaaatcaaagatgaggaaggattgaagttaacattccagaagcacaagttgatggcgaatggagtaatgggagatggacatccactgtttcataagaagaaggggaacagaaagaagctagtagagctggaggtggagtgcatggaagagcctaatcaccttgatgtggacctggagacccggatccctgtcatcaataaggtggatggtactttgctggtgggtgaggatgcccctcgccgggctgaactggagatgtggttacagggtcatccagagtttgctgttgatccccgatttctagcgtatatggaggatcgcagaaaacagaagtggcaaagatgtactctagaaatgggagggtcatcacactgcggtgttcaacccgggttttgccagg

SEQ ID NO: 339934 - DNA, 1837 bp, Homo sapiens
gacgattagattgtctttttattcccaataattgatgaaggcagtgggactgggggaatggaaaatactagagtcatttcatgactaccattggccctgctccccctccctccctcccccaaagaagagtatgtgctcatgggggtggattctgggtttgcagctggaggtggagtgcatggaagagcctaatcaccttgatgtggacctggagacccggatccctgtcatcaataaggtggatggtactttgctggtgggtgaggatgcccctcgccgggctgaactggagatgtggttacagggtcatccagagtttgctgttgatccccgatttctagcggtgagtggcagtcccatccagcaagatttaaagtcattcctttggtatttaagctgcatgagaaagagaaagcatgacatactgtgtcatcgtttctgtatctgcaagataagggtaataattaataatacccagtcttccaacctcacaattgttgtgatgcccaaaataaaataatgttgaagtactttaagtgctaggcaaatatttactattgaactattatataaaccacctaatattttttggagagatcccacttaatggcagttttccactaggatgaatcctttatctatgtaataagtgtttattatcaaacaaaagacactagtactttaataattactccagagaagatttctattcctctaggataactgattttttctattgcagtatatggaggatcgcagaaaacagaagtggcaaagatgtaaaaaaaataataaggcagaattgaactgtttgggaatggaaccagtacagacagctaactctagaaatgggaaaaagggtcatcacactgaaacggtgttcaaccgggttttgccagggcctattgcaccagagagcagcaagaagcgggcccgtaggatgcgaccagacctttctaagatgatggccctcatgcagggtggaagcactgggtctctatctctgcataacacgttccaacacagcagtagtggcctacagtctgtgtcatctttgggtcacagcagtgccacttctgcatctttgccttttatgccatttgtgatgggtggtgcaccatcatcccctcatgtagactccagcaccatgcttcatcaccaccaccaccacccccacccccaccatcaccaccatcaccatccaggcttgagagcccctggctacccctcttcaccagtgactaccgcctctggtactaccttgcggttgccaccactgcaacctgaggaggatgacgatgaggatgaagaagatgatgatgacttatctcagggctatgatagctcagaaagggacttctcactcattgatgatcctatgatgccagctaactcagactccagtgaagatgctgatgactgaagccccagcatgggccccattgcttgggcggctgctgtattttcatttactctggcccttggactatggaaacgtgggaggggcaggggagatgtggggaagtccaggactccaggaggtgaaaaggaaaaaaaaaaaaaaatgtacctgattgctcccaattatgagaggattgggtgggcaggggaactcctaaaataatacatgaccacttcctcatttctggggaaggaaaggagactagagcagctggtgtgctcacccctccctagtcacctccattaaccacagactatgtagcgctggccctagcctctggcagagcctgttcctggccgaactgtggatacagctggagggtcaggaactgttaccttctttccccttggcattaataaatttaagttaatcctt

SEQ ID NO: 339935 - DNA, 788 bp, Homo sapiens
ctgggagcgagaatttaatacatggacagaaatgaacactattgtgtaccatggcagtctggccagcaggcagatgattcaacagtatgaaatgtactgcaaagattcacggggacgcctcatcccaggcgcatacaagtttgacgctctgatcaccacttttgagatgattttgtcagattgtcctgagcttcgtgaaattgaatggcgttgtgttatcattgatgaagcccatcgactgaaaaaccgtaattgcaagctgcttgatagtctcaagcacatggacctggaacacaaggtgctactcacaggaacaccattgcaaaatactgtagaagaactgtttagcttgcttcatttcttggaaccgtcacaatttccctcagaatcagagtttctcaaggactttggggatctcaagacagaggaacaggttcaaaagctacaggccattcttaagccaatgatgctgagaagactcaaagaggatgttgaaaaaaacttggcacccaaacaggaaacaattattgaagtagagctgactaatatccagaagaaatactatcgggctattttggagaagaatttctccttcctttccaaaggggcaggtcataccaacatgcctaatctacttaacacaatgatggagttgcgcaagtgctgcaaccacccatatctcatcaatggtgagggaatgcttggtatatacctgaacttctgtagtacctgtgtttactttccggatgattctccttggggacaatggatgcattgactcaaccaac

SEQ ID NO: 339936 - DNA, 837 bp, Homo sapiens
gaacatttaaccacagggccagcaggctggatcttgatatgtgtttcttagttggaaagattttggactatagagaaatgtcttctcaattcttttaatttcattaaggtggtcatttttcttcttgtggcctctggaatgtgacacagaactcaagggacaggaaggagatgagttggaggctgggacaggggtccctgccagggatgctggtgactcacgtgacggtgttgatgtgtggagtccggtgcctggtttggggaatgttcgtgggatatgttccaaaggactgacggacctatcaggtactggaggtgaatggtcaagtctgatctcagggctgacagtgtcaggcaaggacaggaagttggcattggtctcattggctgaggttgttgggacccagggggcaatgtgtgccaggacagatgggtctggggctaggaaggcaggtttgggctggcgacccgggcatgggaggcatcccaggtagacagtggttgaggctgtggaaatgaccgcgattgcctgggatgagagtggagacagacaagatggaggttttgctttaagcctggggagcccacctcccaggttcaagcgattctcctgcctcagcttcccatagtgggctgcgatccccagctacttgggaggcttgagcgcgggagaatcgttttgcaccctgggagaccagaggttgcagtcaggccgaggatgaaccactgtgacttcagcccagcctgggtgaacggaagcgagactctgtctcaacacttattcactaaattacattaaattctgaatttaatttaactattatttcgtcaagacaag

SEQ ID NO: 339937 - DNA, 483 bp, Homo sapiens
aggatgagtatcctattccatagacacagattcttcatatcaaactgttcattgaggagtgagttggggaagcactttgcagctatggctcttcattatttctggagtctctctgcctgtctggcatatacagccaaatgtgagatgtcagcccatatgcttttcgggtacactcttcttgaacattggagagaaagctctttgcaaaattctaggaaacaatggaactctgtaagtgggggctgtgggttggatgtgactgaaatcagttagaccccaaaatctgggctcaatttgacacaggctatcggaattttcctacttaaggtggagagatctcaggtttgccaagagccatgtttgctgaggtgtaatgttgacttacagtgaagacgatgacccatctatgctcaatgcctgggatgcttcactgaatgaatcttactagttgtgaattcgaagtgggatagcttaacaggttaa

SEQ ID NO: 339938 - DNA, 227 bp, Homo sapiens
ggatcaggcaaagacctcccagggtcgggggcagctggtgggagcccagcgggcagagcagcagtcattggaggacaatttgtcaggcgtgtagggtggcagcatggaggaggaagccgggcacagagatggcatgggggctccccaggggagaggagtgtggccagagaagtgacaaccagattgaagttggtgatgagagagagggaggggcaggaggcagaagg

SEQ ID NO: 339939 - DNA, 245 bp, Homo sapiens
ggcaggagggaggcgcgtagggtggcaggagggaggtgcgtagggtggcaggagggaggtgcgtagggtggcaggagggaggtgagtagggtggcaggagggaggcgtgtagggtggcagcatggaggaggaagccgggcacagagatggcatgggggctccccaggggagaggagtgtggccagagaagtgacaaccagattgaagttggtgatgagagagagggaggggcaggaggcagaagg

SEQ ID NO: 339940 - DNA, 2789 bp, Homo sapiens
gcggccgcggcggggcggcgcgggaaccgggccccggggggagtcggccgggctgctgctgctgctgctccaggtgctgccgcccggggctacggcagggccgggacgccggggcacgcggggcgctggcggcggcggcgtctgctggcccggcgcggccccagcctttccccgggacgcgcggctgctgctgctcctgccgccgctgccgccactgtcgccgccgccgccgagctccgcgcccgcagcctccgcctcccggatggacgctctgccccgcagcgggctgaacctgaaggaggagccgctgctgcccgccggcctgggctcagtgcgctcctggatgcagggcgcgggcatcctggacgccagcaccgcggcgcagagtggcgtgggtctggcacgagcacattttgagaagcagcctccctccaacctcaggaaatccaacttcttccacttcgtgctggccatgtacgaccggcaggggcagcccgtggaggtggagcgcacagccttcatcgacttcgtggaaaaggaccgagagcccggggcggaaaagactaacaatgggatccattaccgcctccggctggtgtataacaatggactgcggacagagcaagacctctacgtgcgtctcatcgactccatgtccaaacaggccatcatctatgaggggcaggacaagaaccccgaaatgtgccgagtgctgctcacccatgagatcatgtgcagccggtgctgtgaccggaagagctgtggcaaccggaatgagacgccctcagaccccgtcatcattgacaggttcttcctcaagttcttcctcaaatgcaaccagaactgcctgaagaatgcggggaatcccagagacatgcgccgcttccaggtggtggtgtccacgacggtgagcgtggacggacacgtgctggccgtgtccgacaacatgtttgtgcacaacaactccaagcatggccgcagggcgcgccgcctggacccctccgaagctgccaccccctgcatcaaggccatcagccccggggagggctggaccacgggcggcgccaccgtcattgtcatcggcgacaacttcttcgacgggttgcaggtcgtgttcggaaacgtgctcgtgtggagcgagctcatcacgccccacgccatccgggtgcagacgcccccgcggcacatccccggggtggtggaggtgaccctctcctacaagtccaagcagttttgcaagggatgccccggccgctttgtctacacagctctgaacgagcccaccattgactacggattccagaggctacagaaagtcattcccagacaccccggagaccccgagaggctgcccaaggaagtgctgctgaagcgggcggccgacttggcagaagccctgtacggagtgcccggcagtaaccaggagctgctcctgaagcgcgcggcggacgtggccgaggctctgtacagcaccccccgcgcacccgggccgctcgcacccctggccccgagccacccacaccccgccgtcgtgggcatcaacgccttcagcagcccgctggccatcgccgtcggggacgccaccccggggcccgagccgggctacgcgcgcagctgcagcagcgcgtccccccgcgggttcgcgcccagccccggctcgcagcagagcggctacggcggcggcctcggagctggcctgggcggctacggcgcgccgggcgtggccggcctcggcgtgcctgggtcccccagcttcctcaatggctccaccgccacctcgcccttcgccaaggagcgccttcgcccccgtgctgcgccccccaagctccccaccccaggcctgccccagagcccacggagaggggcttccagaccagtcttttgaggattctgacaagttccactctccagcccgggggcttcagggcctggcatactcctaattacggtctgcagctgttcccatggagcccggactggaggtccctctgggattcacagccacaccccggatggtggcacagacagatgcagggccagggccatgggcggacctcaacccgtgagctgaacggggagaggccttcaccccatgctcaagcctccccgctagcagccccacaggcttctctcgcctccctgtcttggggtagtcagaagccccagcactgtgcagatgctcttggcaggacagcatcgcagggaggtgctgggattctgggcctcactgtctgggtcttggttcctctgaaagagatggatcttgtgcagaccagggttgttgagtgaggggagcgtgggatggggaccgtgggaaagaggacagctcagggagaagtgacctggaaaggtcctgtttgcatctgacccatctcaactggcccagcatcccaacttctctgcagcgaaagggtggcgccccgcagcctcgggaggcctgcccaggctcccgtggagcttccaacagctgcttggccccgcagctgcccccacttcctttgagacctgcactctcatgcttgccgcatcatgcctccctgtgggggctttgggcatggaggaggcagaagagggggtgccaggcctcctgtatttggggtcttcccccagtggatgtctcatggactctggccccacacactcacaatgactctggctggccccacgcagcgggcccagccgccccccaggtggcctcacattctgctctgctaagtttggagaaaacagaacaataaaccagatgcaggtggtgcccgcccggcctctcacctgcctccttggtgtga

SEQ ID NO: 339941 - DNA, 1661 bp, Homo sapiens
ggaacattggcaaggagagcatatttgaggaggaagttggagtgctgtttgtgatgctgggcagagaggcttataacaggagcctgtgcgttcccccaaacttcatccctaactacttgttccagctcttctgtgactcctgaactatgactctagccttggcaccccaagcaaggctcataaatgtttcctagcatctcagaatcccaggggttttcagcagaaatcctgaagtagtccagctgttgctcatctcatttttggggggtacctcccactgtttgttttttttgaatgttctggttttgcttttgtctttacctggtctggccctgtcatccccagccccgagaaaaggtctccagaaccgctgagaggtcagggctggcccaggaccctcacagctcccagtgagatctgagcctggtacctgtgtcagcagcccatgtggggccccagccaagctgctcactctggtgctgtctccctgttgtgtctcccaccaccttccctgctgcgcctgcccctccccgccccgccccggagtcatgccctctagccccccgctggcggctgcctcctccatgtccctcccggccgctgcccccaccaccagcgtgttctccttctcgcctgtcaacatgatctccgccgtcaaacagaggagcgccttcgcccccgtgctgcgccccccaagctccccaccccaggcctgccccagagcccacggagaggggcttccagaccagtcttttgaggattctgacaagttccactctccagcccgggggcttcagggcctggcatactcctaattacggtctgcagctgttcccatggagcccggactggaggtccctctgggattcacagccacaccccggatggtggcacagacagatgcagggccagggccatgggcggacctcaacccgtgagctgaacggggagaggccttcaccccatgctcaagcctccccgctagcagccccacaggcttctctcgcctccctgtcttggggtagtcagaagccccagcactgtgcagatgctcttggcaggacagcatcgcagggaggtgctgggattctgggcctcactgtctgggtcttggttcctctgaaagagatggatcttgtgcagaccagggttgttgagtgaggggagcgtgggatggggaccgtgggaaagaggacagctcagggagaagtgacctggaaaggtcctgtttgcatctgacccatctcaactggcccagcatcccaacttctctgcagcgaaagggtggcgccccgcagcctcgggaggcctgcccaggctcccgtggagcttccaacagctgcttggccccgcagctgcccccacttcctttgagacctgcactctcatgcttgccgcatcatgcctccctgtgggggctttgggcatggaggaggcagaagagggggtgccaggcctcctgtatttggggtcttcccccagtggatgtctcatggactctggccccacacactcacaatgactctggctggccccacgcagcgggcccagccgccccccaggtggcctcacattctgctctgctaagtttggagaaaacagaacaataaaccagatgcaggtggtgcccgcccggcctctcacctgcctccttggtgtga

SEQ ID NO: 339942 - DNA, 1024 bp, Homo sapiens
ggaacattggcaaggagagcatatttgaggaggaagttggagtgctgtttgtgatgctgggcagagaggcttataacaggagcctgtgcgttcccccaaacttcatccctaactacttgttccagctcttctgtgactcctgaactatgactctagccttggcaccccaagcaaggctcataaatgtttcctagcatctcagaatcccaggggttttcagcagaaatcctgaagtagtccagctgttgctcatctcatttttggggggtacctcccactgtttgttttttttgaatgttctggttttgcttttgtctttacctggtctggccctgtcatccccagccccgagaaaaggtctccagaaccgctgagaggtcagggctggcccaggaccctcacagctcccagtgagatctgagcctggtacctgtgtcagcagcccatgtggggccccagccaagctgctcactctggtgctgtctccctgttgtgtctcccaccaccttccctgctgcgcctgccccatgcgcgaggcagagtccaataaactcgtgctcatctgcagactcctctgtgatcccctttctcttgctcgtccctcctccccggagaacggcactgatgttgctggacacaaccagaggacctctggttgtgggcttggacacgagccttacgcaggaaggctgggctccaccagctaaacacagacctcaatgttatgcaccccctggttacaaatggccgaaggttgtgcagcagaattactgaccagttcggtgatccagaccagtgaaaataagatcacggaaggaggtgcaagccaaaacaacacccaagaacaaacaaccaaaaacacacaaaaaaagacaaacagcaacacaacacaggaacagcaaaacacagaaaaaccagacgacaagaagacgacacgagaacgacgacagaggacaaagcacaaggccgaaaaaccacaagccacagaccaccaaaggcacgagcacagaagcgcacaaacgga

SEQ ID NO: 339943 - DNA, 2713 bp, Homo sapiens
gcggccgcggcggggcggcgcgggaaccgggccccggggggagtcggccgggctgctgctgctgctgctccaggacgctctgccccgcagcgggctgaacctgaaggaggagccgctgctgcccgccggcctgggctcagtgcgctcctggatgcagggcgcgggcatcctggacgccagcaccgcggcgcagagtggcgtgggtctggcacgagcacattttgagaagcagcctccctccaacctcaggaaatccaacttcttccacttcgtgctggccatgtacgaccggcaggggcagcccgtggaggtggagcgcacagccttcatcgacttcgtggaaaaggaccgagagcccggggcggaaaagactaacaatgggatccattaccgcctccggctggtgtataacaatggactgcggacagagcaagacctctacgtgcgtctcatcgactccatgtccaaacaggccatcatctatgaggggcaggacaagaaccccgaaatgtgccgagtgctgctcacccatgagatcatgtgcagccggtgctgtgaccggaagagctgtggcaaccggaatgagacgccctcagaccccgtcatcattgacaggttcttcctcaagttcttcctcaaatgcaaccagaactgcctgaagaatgcggggaatcccagagacatgcgccgcttccaggtggtggtgtccacgacggtgagcgtggacggacacgtgctggccgtgtccgacaacatgtttgtgcacaacaactccaagcatggccgcagggcgcgccgcctggacccctccgaagctgccaccccctgcatcaaggccatcagccccggggagggctggaccacgggcggcgccaccgtcattgtcatcggcgacaacttcttcgacgggttgcaggtcgtgttcggaaacgtgctcgtgtggagcgagctcatcacgccccacgccatccgggtgcagacgcccccgcggcacatccccggggtggtggaggtgaccctctcctacaagtccaagcagttttgcaagggatgccccggccgctttgtctacacagctctgaacgagcccaccattgactacggattccagaggctacagaaagtcattcccagacaccccggagaccccgagaggctgcccaaggaagtgctgctgaagcgggcggccgacttggcagaagccctgtacggagtgcccggcagtaaccaggagctgctcctgaagcgcgcggcggacgtggccgaggctctgtacagcaccccccgcgcacccgggccgctcgcacccctggccccgagccacccacaccccgccgtcgtgggcatcaacgccttcagcagcccgctggccatcgccgtcggggacgccaccccggggcccgagccgggctacgcgcgcagctgcagcagcgcgtccccccgcgggttcgcgcccagccccggctcgcagcagagcggctacggcggcggcctcggagctggcctgggcggctacggcgcgccgggcgtggccggcctcggcgtgcctgggtcccccagcttcctcaatggctccaccgccacctcgcccttcgccatcatgccctctagccccccgctggcggctgcctcctccatgtccctcccggccgctgcccccaccaccagcgtgttctccttctcgcctgtcaacatgatctccgccgtcaaacagaggagcgccttcgcccccgtgctgcgccccccaagctccccaccccaggcctgccccagagcccacggagaggggcttccagaccagtcttttgaggattctgacaagttccactctccagcccgggggcttcagggcctggcatactcctaattacggtctgcagctgttcccatggagcccggactggaggtccctctgggattcacagccacaccccggatggtggcacagacagatgcagggccagggccatgggcggacctcaacccgtgagctgaacggggagaggccttcaccccatgctcaagcctccccgctagcagccccacaggcttctctcgcctccctgtcttggggtagtcagaagccccagcactgtgcagatgctcttggcaggacagcatcgcagggaggtgctgggattctgggcctcactgtctgggtcttggttcctctgaaagagatggatcttgtgcagaccagggttgttgagtgaggggagcgtgggatggggaccgtgggaaagaggacagctcagggagaagtgacctggaaaggtcctgtttgcatctgacccatctcaactggcccagcatcccaacttctctgcagcgaaagggtggcgccccgcagcctcgggaggcctgcccaggctcccgtggagcttccaacagctgcttggccccgcagctgcccccacttcctttgagacctgcactctcatgcttgccgcatcatgcctccctgtgggggctttgggcatggaggaggcagaagagggggtgccaggcctcctgtatttggggtcttcccccagtggatgtctcatggactctggccccacacactcacaatgactctggctggccccacgcagcgggcccagccgccccccaggtggcctcacattctgctctgctaagtttggagaaaacagaacaataaaccagatgcaggtggtgcccgcccggcctctcacctgcctccttggtgtga

SEQ ID NO: 339944 - DNA, 1664 bp, Homo sapiens
  misc_feature (39)..(39): n is a, c, g, or t
  misc_feature (45)..(45): n is a, c, g, or t
  misc_feature (47)..(47): n is a, c, g, or t
  misc_feature (53)..(53): n is a, c, g, or t
  misc_feature (60)..(60): n is a, c, g, or t
  misc_feature (63)..(63): n is a, c, g, or t
  misc_feature (87)..(87): n is a, c, g, or t
  misc_feature (90)..(90): n is a, c, g, or t
tcggggctggggatgacagggccagaccaggtaaagacnaaagcnanaccagnacattcnaanaaaacaaacagtgggaggtacccnccnaaaaatgagatgagcaacagctggactacttgttccagctcttctgtgactcctgaactatgactctagccttggcaccccaagcaaggctcataaatgtttcctagcatctcagaatcccaggggttttcagcagaaatcctgaagtagtccagctgttgctcatctcatttttggggggtacctcccactgtttgttttttttgaatgttctggttttgcttttgtctttacctggtctggccctgtcatccccagccccgagaaaaggtctccagaaccgctgagaggtcagggctggcccaggaccctcacagctcccagtgagatctgagcctggtacctgtgtcagcagcccatgtggggccccagccaagctgctcactctggtgctgtctccctgttgtgtctcccaccaccttccctgctgcgcctgcccctccccgccccgccccggagtcatgccctctagccccccgctggcggctgcctcctccatgtccctcccggccgctgcccccaccaccagcgtgttctccttctcgcctgtcaacatgatctccgccgtcaaacagaggagcgccttcgcccccgtgctgcgccccccaagctccccaccccaggcctgccccagagcccacggagaggggcttccagaccagtcttttgaggattctgacaagttccactctccagcccgggggcttcagggcctggcatactcctaattacggtctgcagctgttcccatggagcccggactggaggtccctctgggattcacagccacaccccggatggtggcacagacagatgcagggccagggccatgggcggacctcaacccgtgagctgaacggggagaggccttcaccccatgctcaagcctccccgctagcagccccacaggcttctctcgcctccctgtcttggggtagtcagaagccccagcactgtgcagatgctcttggcaggacagcatcgcagggaggtgctgggattctgggcctcactgtctgggtcttggttcctctgaaagagatggatcttgtgcagaccagggttgttgagtgaggggagcgtgggatggggaccgtgggaaagaggacagctcagggagaagtgacctggaaaggtcctgtttgcatctgacccatctcaactggcccagcatcccaacttctctgcagcgaaagggtggcgccccgcagcctcgggaggcctgcccaggctcccgtggagcttccaacagctgcttggccccgcagctgcccccacttcctttgagacctgcactctcatgcttgccgcatcatgcctccctgtgggggctttgggcatggaggaggcagaagagggggtgccaggcctcctgtatttggggtcttcccccagtggatgtctcatggactctggccccacacactcacaatgactctggctggccccacgcagcgggcccagccgccccccaggtggcctcacattctgctctgctaagtttggagaaaacagaacaataaaccagatgcaggtggtgcccgcccggcctctcacctgcctccttggtgtga

SEQ ID NO: 339945 - DNA, 1847 bp, Homo sapiens
gcggccgcggcggggcggcgcgggaaccgggccccggggggagtcggccgggctgctgctgctgctgctccaggacgctctgccccgcagcgggctgaacctgaaggaggagccgctgctgcccgccggcctgggctcagtgcgctcctggatgcagggcgcgggcatcctggacgccagcaccgcggcgcagagtggcgtgggtctggcacgagcacattttgagaagcagcctccctccaacctcaggaaatccaacttcttccacttcgtgctggccatgtacgaccggcaggggcagcccgtggaggtggagcgcacagccttcatcgacttcgtggaaaaggaccgagagcccggggcggaaaagactaacaatgggatccattaccgcctccggctggtgtataacaatggactgcggacagagcaagacctctacgtgcgtctcatcgactccatgtccaaacaggccatcatctatgaggggcaggacaagaaccccgaaatgtgccgagtgctgctcacccatgagatcatgtgcagccggtgctgtgaccggaagagctgtggcaaccggaatgagacgccctcagaccccgtcatcattgacaggttcttcctcaagttcttcctcaaatgcaaccagaactgcctgaagaatgcggggaatcccagagacatgcgccgcttccaggtggtggtgtccacgacggtgagcgtggacggacacgtgctggccgtgtccgacaacatgtttgtgcacaacaactccaagcatggccgcagggcgcgccgcctggacccctccgaagctgccaccccctgcatcaaggccatcagccccggggagggctggaccacgggcggcgccaccgtcattgtcatcggcgacaacttcttcgacgggttgcaggtcgtgttcggaaacgtgctcgtgtggagcgagctcatcacgccccacgccatccgggtgcagacgcccccgcggcacatccccggggtggtggaggtgaccctctcctacaagtccaagcagttttgcaagggatgccccggccgctttgtctacacagctctgaacgagcccaccattgactacggattccagaggctacagaaagtcattcccagacaccccggagaccccgagaggctgcccaaggaagtgctgctgaagcgggcggccgacttggcagaagccctgtacggagtgcccggcagtaaccaggagctgctcctgaagcgcgcggcggacgtggccgaggctctgtacagcaccccccgcgcacccgggccgctcgcacccctggccccgagccacccacaccccgccgtcgtgggcatcaacgccttcagcagcccgctggccatcgccgtcggggacgccaccccggggcccgagccgggctacgcgcgcagctgcagcagcgcgtccccccgcgggttcgcgcccagccccggctcgcagcagagcggctacggcggcggcctcggagctggcctgggcggctacggcgcgccgggcgtggccggcctcggcgtgcctgggtcccccagcttcctcaatggctccaccgccacctcgcccttcgccatcatgccctctagccccccgctggcagaagagggggtgccaggcctcctgtatttggggtcttcccccagtggatgtctcatggactctggccccacacactcacaatgactctggctggccccacgcagcgggcccagccgccccccaggtggcctcacattctgctctgctaagtttggagaaaacagaacaataaaccagatgcaggtggtgcccgcccggcctctcacctgcctccttggtgtga

SEQ ID NO: 339946 - DNA, 1107 bp, Homo sapiens
ctgactgggctggcagggatagctgagaaggacaacactcatcaacagaagcagaggtccgtcaggacatggaggatgcacacaggaggatgctgggggaggggaggggcctggtgctgggtgggcacaggagtatgtctaccccaccagccacctgacctttgtcctggcaccctgaggaaccccctgccccaagcagagccagctctggaaagagccacctacagacagacagaatctgcagacttcataccattcttgccagccggtggtggtccggtttgggaggaggggttatcccccgcctgggcagcccagagcaaggcagagggcgtgctcttccctggggcagggtctccctgggcctaggcttgggagatgccaggtccgtctgtgctgccacctgcacctcagaggagcctccttcccctccagcctgtgcacctccctctccccaggccatcatctatgaggggcaggacaagaaccccgaaatgtgccgagtgctgctcacccatgagatcatgtgcagccggtgctgtgaccggaagagctgtggcaaccggaatgagacgccctcagaccccgtcatcattgacaggttcttcctcaagttcttcctcaaatgcaaccagaactgcctgaagaatgcggggaatcccagagacatgcgccgcttccaggtggtggtgtccacgacggtgagcgtggacggacacgtgctggccgtgtccgacaacatgtttgtgcacaacaactccaagcatggccgcagggcgcgccgcctggacccctccgaagctgcccccacttcctttgagacctgcactctcatgcttgccgcatcatgcctccctgtgggggctttgggcatggaggaggcagaagagggggtgccaggcctcctgtatttggggtcttcccccagtggatgtctcatggactctggccccacacactcacaatgactctggctggccccacgcagcgggcccagccgccccccaggtggcctcacattctgctctgctaagtttggagaaaacagaacaataaaccagatgcaggtggtgcccgcccggcctctcacctgcctccttggtgtga

SEQ ID NO: 339947 - DNA, 2644 bp, Homo sapiens
gcggccgcggcggggcggcgcgggaaccgggccccggggggagtcggccgggctgctgctgctgctgctccaggacgctctgccccgcagcgggctgaacctgaaggaggagccgctgctgcccgccggcctgggctcagtgcgctcctggatgcagggcgcgggcatcctggacgccagcaccgcggcgcagagtggcgtgggtctggcacgagcacattttgagaagcagcctccctccaacctcaggaaatccaacttcttccacttcgtgctggccatgtacgaccggcaggggcagcccgtggaggtggagcgcacagccttcatcgacttcgtggaaaaggaccgagagcccggggcggaaaagactaacaatgggatccattaccgcctccggctggtgtataacaatggactgcggacagagcaagacctctacgtgcgtctcatcgactccatgtccaaacaggccatcatctatgaggggcaggacaagaaccccgaaatgtgccgagtgctgctcacccatgagatcatgtgcaggttcttcctcaagttcttcctcaaatgcaaccagaactgcctgaagaatgcggggaatcccagagacatgcgccgcttccaggtggtggtgtccacgacggtgagcgtggacggacacgtgctggccgtgtccgacaacatgtttgtgcacaacaactccaagcatggccgcagggcgcgccgcctggacccctccgaagctgccaccccctgcatcaaggccatcagccccggggagggctggaccacgggcggcgccaccgtcattgtcatcggcgacaacttcttcgacgggttgcaggtcgtgttcggaaacgtgctcgtgtggagcgagctcatcacgccccacgccatccgggtgcagacgcccccgcggcacatccccggggtggtggaggtgaccctctcctacaagtccaagcagttttgcaagggatgccccggccgctttgtctacacagctctgaacgagcccaccattgactacggattccagaggctacagaaagtcattcccagacaccccggagaccccgagaggctgcccaaggaagtgctgctgaagcgggcggccgacttggcagaagccctgtacggagtgcccggcagtaaccaggagctgctcctgaagcgcgcggcggacgtggccgaggctctgtacagcaccccccgcgcacccgggccgctcgcacccctggccccgagccacccacaccccgccgtcgtgggcatcaacgccttcagcagcccgctggccatcgccgtcggggacgccaccccggggcccgagccgggctacgcgcgcagctgcagcagcgcgtccccccgcgggttcgcgcccagccccggctcgcagcagagcggctacggcggcggcctcggagctggcctgggcggctacggcgcgccgggcgtggccggcctcggcgtgcctgggtcccccagcttcctcaatggctccaccgccacctcgcccttcgccatcatgccctctagccccccgctggcggctgcctcctccatgtccctcccggccgctgcccccaccaccagcgtgttctccttctcgcctgtcaacatgatctccgccgtcaaacagaggagcgccttcgcccccgtgctgcgccccccaagctccccaccccaggcctgccccagagcccacggagaggggcttccagaccagtcttttgaggattctgacaagttccactctccagcccgggggcttcagggcctggcatactcctaattacggtctgcagctgttcccatggagcccggactggaggtccctctgggattcacagccacaccccggatggtggcacagacagatgcagggccagggccatgggcggacctcaacccgtgagctgaacggggagaggccttcaccccatgctcaagcctccccgctagcagccccacaggcttctctcgcctccctgtcttggggtagtcagaagccccagcactgtgcagatgctcttggcaggacagcatcgcagggaggtgctgggattctgggcctcactgtctgggtcttggttcctctgaaagagatggatcttgtgcagaccagggttgttgagtgaggggagcgtgggatggggaccgtgggaaagaggacagctcagggagaagtgacctggaaaggtcctgtttgcatctgacccatctcaactggcccagcatcccaacttctctgcagcgaaagggtggcgccccgcagcctcgggaggcctgcccaggctcccgtggagcttccaacagctgcttggccccgcagctgcccccacttcctttgagacctgcactctcatgcttgccgcatcatgcctccctgtgggggctttgggcatggaggaggcagaagagggggtgccaggcctcctgtatttggggtcttcccccagtggatgtctcatggactctggccccacacactcacaatgactctggctggccccacgcagcgggcccagccgccccccaggtggcctcacattctgctctgctaagtttggagaaaacagaacaataaaccagatgcaggtggtgcccgcccggcctctcacctgcctccttggtgtga

SEQ ID NO: 339948 - DNA, 2699 bp, Homo sapiens
ctgactgggctggcagggatagctgagaaggacaacactcatcaacagaagcagaggtccgtcaggacatggaggatgcacacaggaggatgctgggggaggggaggggcctggtgctgggtgggcacaggagtatgtctaccccaccagccacctgacctttgtcctggcaccctgaggaaccccctgccccaagcagagccagctctggaaagagccacctacagacagacagaatctgcagacttcataccattcttgccagccggtggtggtccggtttgggaggaggggttatcccccgcctgggcagcccagagcaaggcagagggcgtgctcttccctggggcagggtctccctgggcctaggcttgggagatgccaggtccgtctgtgctgccacctgcacctcagaggagcctccttcccctccagcctgtgcacctccctctccccaggccatcatctatgaggggcaggacaagaaccccgaaatgtgccgagtgctgctcacccatgagatcatgtgcagccggtgctgtgaccggaagagctgtggcaaccggaatgagacgccctcagaccccgtcatcattgacaggttcttcctcaagttcttcctcaaatgcaaccagaactgcctgaagaatgcggggaatcccagagacatgcgccgcttccaggtggtggtgtccacgacggtgagcgtggacggacacgtgctggccgtgtccgacaacatgtttgtgcacaacaactccaagcatggccgcagggcgcgccgcctggacccctccgaagctgccaccccctgcatcaaggccatcagccccggggagggctggaccacgggcggcgccaccgtcattgtcatcggcgacaacttcttcgacgggttgcaggtcgtgttcggaaacgtgctcgtgtggagcgagctcatcacgccccacgccatccgggtgcagacgcccccgcggcacatccccggggtggtggaggtgaccctctcctacaagtccaagcagttttgcaagggatgccccggccgctttgtctacacagctctgaacgagcccaccattgactacggattccagaggctacagaaagtcattcccagacaccccggagaccccgagaggctgcccaaggaagtgctgctgaagcgggcggccgacttggcagaagccctgtacggagtgcccggcagtaaccaggagctgctcctgaagcgcgcggcggacgtggccgaggctctgtacagcaccccccgcgcacccgggccgctcgcacccctggccccgagccacccacaccccgccgtcgtgggcatcaacgccttcagcagcccgctggccatcgccgtcggggacgccaccccggggcccgagccgggctacgcgcgcagctgcagcagcgcgtccccccgcgggttcgcgcccagccccggctcgcagcagagcggctacggcggcggcctcggagctggcctgggcggctacggcgcgccgggcgtggccggcctcggcgtgcctgggtcccccagcttcctcaatggctccaccgccacctcgcccttcgccatcatgccctctagccccccgctggcggctgcctcctccatgtccctcccggccgctgcccccaccaccagcgtgttctccttctcgcctgtcaacatgatctccgccgtcaaacagaggagcgccttcgcccccgtgctgcgccccccaagctccccaccccaggcctgccccagagcccacggagaggggcttccagaccagtcttttgaggattctgacaagttccactctccagcccgggggcttcagggcctggcatactcctaattacggtctgcagctgttcccatggagcccggactggaggtccctctgggattcacagccacaccccggatggtggcacagacagatgcagggccagggccatgggcggacctcaacccgtgagctgaacggggagaggccttcaccccatgctcaagcctccccgctagcagccccacaggcttctctcgcctccctgtcttggggtagtcagaagccccagcactgtgcagatgctcttggcaggacagcatcgcagggaggtgctgggattctgggcctcactgtctgggtcttggttcctctgaaagagatggatcttgtgcagaccagggttgttgagtgaggggagcgtgggatggggaccgtgggaaagaggacagctcagggagaagtgacctggaaaggtcctgtttgcatctgacccatctcaactggcccagcatcccaacttctctgcagcgaaagggtggcgccccgcagcctcgggaggcctgcccaggctcccgtggagcttccaacagctgcttggccccgcagctgcccccacttcctttgagacctgcactctcatgcttgccgcatcatgcctccctgtgggggctttgggcatggaggaggcagaagagggggtgccaggcctcctgtatttggggtcttcccccagtggatgtctcatggactctggccccacacactcacaatgactctggctggccccacgcagcgggcccagccgccccccaggtggcctcacattctgctctgctaagtttggagaaaacagaacaataaaccagatgcaggtggtgcccgcccggcctctcacctgcctccttggtgtga

SEQ ID NO: 339949 - DNA, 582 bp, Homo sapiens
aagtttctgaattaaccttctttttacataagagatgggttaatttttgcaatggagtggccttataagcttgtttcctgcctatagatgattggaaatctaaaggcctattttcactttctactgtctctgttcctcttttattattatgatttctttaaaatcttgtggatttcctatgaatcttattgggattcactccagcagacaaaagccacatccaccttttctatcgcaagtcttatgtgaggctactgtgagaaaacacacttaagatccctagaagccctattgtttaacatagtaagcctaagaagtattcccttaagacctctagatatccctttatctaattgaaaggttttgtgaggcattgtcttaaatctttctgaagtcggccaggcgcagtggctcatgcctataatcccagcactttgggaggccgaggtgggcggatcacctgaggtcgggagttcgagacgagcctgaccatcatggagaaacctcgtctctactaaaaatacaaaattagccaggcgtggtgatgcatgcctgtaatcccagatactagggaggttgagg

SEQ ID NO: 339950 - DNA, 548 bp, Homo sapiens
ggtaccacactcctatagatagtagtttttgttttgttttgagagctgttgcccaggctagagcgcagtggcgtgatcttggctcattgcaacctccacctcccgggttcactccattcttctgcctcagcctcctgagtagctgggactaaaggcgcctgccaccacgcccagctaattttttgtatttttagtacagatggggtttcactgtgttagtcaggatggtcttgatcttctgacctcgtgatccacccacctcggcctcccaaagtgctgggattacaggcatgatcctggccatttacttctatatttctaactaatatatgggaattcataattttttcagtttcaggcatcatgtatctacctctcaccatgtgtggaagaggatcttgttctctttcataacactgccatcattcccccaagtacatttttattttcacatctccgtaatatatttatatctcagttttggttagatcaatattcagtgtttatattagtgtaactctgtgattattatttacagctgatctata

SEQ ID NO: 339951 - DNA, 371 bp, Homo sapiens
ctcaaataatcaaaaataaaattaccataaaatacagcaatctcatttatgaatctatatctataatatgcaacacaggacctggaagacgtatttgaacagtcatgtttattgtattagtattcacaaaagtcaaaaggctgaagcaacccaaatgtcttaatttggaaacacattgaaaaatgtaatacctaaatacaatgaaatattattcagcctcataaaatcttgtcacatttgaagataaactgagaatattatgtcacctgaaataagccagtaacaaaataatgaatactatataattccactaatatgagatattttaagtcatcacactcataaaaacacaaagagaaacggtgttgttg

SEQ ID NO: 339952 - DNA, 115 bp, Homo sapiens
tagttttttctttggttggctgtagtcacactgggaattactttattctctaatattgctaaagaaaataaatgtaaagcaagaagagagttactacattagaaggactggctac

SEQ ID NO: 339953 - DNA, 532 bp, Homo sapiens
gatgtgaaattacttttgaacattgttcatgggctgaggttacttttaaaaactaagctaataaccactttctcaaagaatgtggtatggcttacaataaaaggtagatttacaatagggctgataaaataaaaacaaaataaaggtcatgaaaggagaatgtggcaagttatcaccttcacatagcccaacaagttttctgagtatgagcatgtaatttagctctaagattcctggcagacaagatcaaaagaaaaaaagaaacaagtaatatgtaattattatctcatggccaaaggctactactccttaaagagaggaatattatctctgttaataaattcataatagaatgtatcacatagaacactttatagaagacactgaaggatacagtagacgtggcccaaaatggtgcaaattaggattaattcttgcaagggctgctgctttcactatgtcacttatatctggaaagttgagcagtttttcaatttcctaatatatggaataagaatgctgggtcatgtct

SEQ ID NO: 339954 - DNA, 697 bp, Homo sapiens
agttttcaaaataaatttggagggaaaaaaactaacaaatacaagtgttttcaaaaggttgaaaaaaaatgggacaacttttccaaagtcattattttgaaatccagaaccttccaaaccattaacgttccatcccactcaaatttctttggggtgcctttggtgctgtttcttaggaaggtgcagattagagttaagagtggactctatgagctgtggacctacctgttaatattctaaaggagtgcgtgacctaaaaaaatcttttaagcggctagaaatagcatctcaaggaaagtagccctgacagcaaaggaattactaactaagctactttgtgggatgtgagaaaattcacagcaaaaagaaatttgccaattcaaggatttatggggcaaggggcccaatactatgagtccaacagaaaaagggacaaaaaggtgtatgttttatttatttacttgagacggggtttcactctgtcacccaggctggaagtgagactccatctcaaaaaaaaaaagtacagatctgtgtctatttactagtgacgaaaagtgtggtcatggaatatggcaatgtacagttccatgaccttgagctaacaacttaggattgcagcctcaggttttacatttgtaaagcgaagagcctataaatggaagccctgacctttcttctttttcatagattacac

SEQ ID NO: 339955 - DNA, 514 bp, Homo sapiens
ccatcaattgtccgcaccttgaagaggaagctgccactaaactcataaagaggaaagtgtctcatcataaacagaccaacctcaggcccagatgagacaagcatgcaggccccagtcacaggggccctggtcacatgggcagcaaatggaagaggcaggccttgaactccagcaagcagagcccagggctcctattcccaacaaccatgctacactatcagcttcaggtcctccaccaggatggatcaggaaaaaaagagttagaaaaaagaatgaaggccaagccaggcggatcgtttcagcctaggagtttgagaccagtctgggcaacatggcaaaaccacatctctacagaaaatacaaaaatcagtgggcatggtggtgttcgcctataggcccagctacttgggaggctgaggcaggaggatcacttgagcctgggaggtcaaggctgcagtgagccgtggttgtgccactgcactccagcctgggtgacagagcgtgaccttgtctc

SEQ ID NO: 339956 - DNA, 308 bp, Homo sapiens
acaccttggcctcccaaagtgctaagattacaggtgtgagtcactgaacccaggcctacatatcatttttcttatgcttaatgcgtccaccaacaaataactggataaacaaaagtggtctacacatataatggaacagtattcagccataaaaaggaatgaagttgagatacatgttacaacatggatgaaccctgaaaacattatactaagtgagagaagccactgacaagagatcacacattgtgtaattcaattctcaagaaatttcagaataggccaatcctggccgggcgtggtggctcatg

SEQ ID NO: 339957 - DNA, 1221 bp, Homo sapiens
aggctgaacagttctgagagggaggcatggaaatgcagcatgaggcaaattcgcatgtaggacagcaaattagatgaaaattaggttgaagggagaagtcacaagatccaattattttgttcaatgtagtgctttcaaatcactcaaaagaccaaaaaaagttttattttgtcatgtgagcatgtgatcctggatagttaattgctttgcaaattgtcattggtaaaatgctttggaggtttttatgtaagagttacaagtaaattaaaatagtttgtgccacaaagaaactttggtgcgaaacagaacaattataatttaaaagaggtggggcagtatgagaaagcaactaatttggtattaaaggtttgaagactggaattctgtacagtatgctgggagactcatcagaacctcttccctgttgtaaataatgttcttgtcagttaatgcctaattgctgctcttgcctagaaatccagaagctttggagataaggaggtctctctgaatccagttccacagtatatcagcccctttgttcaccccatagactgtacccttcccaagggcggtttgttggcaagtctgtctggtagggcggtgttttctgcatagtaatcaggcctctgcaattgtgatattcctccccttccccctaaactctttgggttcttgacacacatggcaatgccactggtataacagaaagtcagaaggagaaaaagagaaaatgtcttctcgagttccaagtgtctgcacagccttgccagactatgattaaggcttatctacaggagactgcatgaaaaactttcttcttctcttcccaggaagcaagcagccttgtgaacaagcaggttcagaaagccaggaactgacaaacttttctagtccttttgccagcctgttctgcttttaccaagagtttagtgacaggactacctgttttcaatagttaaaatgtatattttgatcacctttagcacatgctaccttgcacagctctttttaaagccttatgtattctagctatttgaccactgttgtgtgtgattttcatttttgatgcctgatgtgacaggagggggtgaggatgggggtcccataaagatgcagagtaagttgaagaagacaatgcttgtcctgccaccagatgtctcttgtttttatttttgtttttgttttgttatgtgtaaaaacaaatgaacccttgggata

SEQ ID NO: 339958 - DNA, 266 bp, Homo sapiens
atctcccataaactcagagcaagaattcagtcattgccatcgggacggcaccaagccattgtcaaagggatctgcccacatcaccaaaacacctcccaccaggccccacctccaacatcagggatcacatttcaacatgagatttggaggggaccaacatccaaaccataacaagacagaagttatagaaaggggtctccaaaaataccacccaacacttttattgcctcccattggccagaacctggtcacatggccacaactca

SEQ ID NO: 339959 - DNA, 562 bp, Homo sapiens
ccaaataaggaagggggtggggtggataaaggactaaacaaaattaattaaaatttagaaatttttctctcagaaggaattcatgcccataaaacaaagaccaggatacattcgtattttatcggtaaataccaatagattataaatcacttttctcgtatacataattgtgaaaaaaaaaaccatccaggtatgcatgttatttattcattgagaggatatacatctctcaggtgttttttgtcgtatgtgtacttttgtgtagtctgcctgtttattctttttgaataggatgatatgtacaattaaaaaaaatcttttgtgaaatgtggttttcttaaatacattattgcatttcatacacagtgatgaagggaaaaactacaaagctagacagattgcaaattagtattgcagtagtgaggtaatagagcaatacccaaatgttttcttaaaatatatgtaggtgatgcctgtgttctttacttttgtgtgtgtgtatgtgtttttaaacaagattcattgtagtcttttagatataatttaataaatttaggctgtt

SEQ ID NO: 339960 - DNA, 366 bp, Homo sapiens
ttgctcccatcagccttgtacaccctgctcagattccctccgtgcctttctgctttctctgtcttcattcacagactagtatgaatgacctggcgctgctctccactaaatgtgatctggtgtcagggaaacaaaacagacaatttgatgacagtgtttttagaagcaaaagccctgggaattttggggtcataggtgagggccagaaaaaggttcctagactattgtggtttagctttgcaaaaggagtgaccactgggactgggccagttgtatctggaagcccatgggagggggaggtagggttttaagccagttgatcggatttatattcagaaagttaatgtggctactgggtagaggatg

SEQ ID NO: 339961 - DNA, 208 bp, Homo sapiens
gaagaaatagaaacattgaacaaagcagtaacaagcagtgagattgaaacagtaatttaaaaattgccaagaaaaaaaagtccagggccagatgtattcacaactgaattctatcagacattcaaagaggaatttgtaccaatcctacttaaactattccaaaagataaggagggaaccctccctaaatcattccatgaaatcagtat

SEQ ID NO: 339962 - DNA, 615 bp, Homo sapiens
ctgatgctggtgtgagcatgtttgctttagaacacatggactcttaagctcatgatagataatttcctaggtgagctagtatactgtttcttgaaattagtggccttgatcagcccttctctctccaagcctgtccaataaagataagtttacagccttctttttgaatagacacatgtcctctgctgaactgaattatctaaatcagtcctatttagtctcctccccttacaagaaagatccttatttcagactgaaagactaggtgatttgggccatattttaggttttatcatacttacccttcatgtcatttgttaaggtcaagttcagcatttgactgtggacataatttttagtaggtgttccttgggaagaggcttattgggaagagaagtttattccaatagtctcataaaatcagtgaatgctttgagttaatttatcagcaacctgtgctgaataagcaaggtgccatgtgttaaattaggaaaggtaacgtgctgctagtgaaaactgtgtcttctaagttggctttaaaataaattgtttaccagattaatgtttcaatcaaaaattacaattctcatttttaagatgcagctttatccacat

SEQ ID NO: 339963 - DNA, 161 bp, Homo sapiens
atcgggggactgagacatgagcatgacagaggacttcccagaggcctgagaaagaggtccttctctcggggaagttccatctgccctgagatctcgtttcaagctcctgtgggtcgggtggctgctcacttacgatgtccatagataacatcgccatctct

SEQ ID NO: 339964 - DNA, 108 bp, Homo sapiens
aaattcaacatgaaaggtaactttataaatgatttgtgatgaatcattgtattttacataactgtttctaaattaactgaagagccttaatgtcatttgttaggtggg

SEQ ID NO: 339965 - DNA, 2876 bp, Homo sapiens
ccaccacagcggtcgagcactatgctagtaggatgcctgggttaaatctggccgaggcaagtagagctccgtcctgacgcgccgcctcccgtgggctccggccggctaagccgcggcggacaactatgctgaaagccaagatcctcttcgtggggccttgcgagagtggaaaaactgttttggccaactttctgacagaatcttctgacatcactgaatacagcccaacccaaggagtgaggtttgagtcctgctggccggccctgatgaaggatgctcatggagtggtgatcgtcttcaatgctgacatcccaagccaccggaaggaaatggagatgtggtattcctgctttgtccaacagccgtccttacaggacacacagtgtatgctaattgcacaccacaaaccaggctctggagatgataaaggaagcctgtctttgtcgccacccttgaacaagctgaagctggtgcactcaaacctggaagatgaccctgaggagatccggatggaattcataaagtatttaaaaagcataatcaactccatgtctgagagcagagacagggaggagatgtcaattatgacctagccagccttcacctgggactgccacatccccagtgaaatcagcatgtttctcggtgcagatctgaaatcacatccagctcctgatgttttcttctccctctgactgcagaggaagtgttcctacctgcaggaaggcacctgtcacacagggcgttcactcagaccatctgtgctctgccctgagttcagttgagaaaatcctattatcaaatttggatttcctggccccagaacttcccaaagacctgtaaaatggagggatttaccacctcacatatgtccagttaaacagtttgtggacttgtaaccgtcgcagcccaatgatacaacagtagtttaatcacgtgtattggcttgaatgtgattttcattccttgattcacccaacaaataccgactggctgagcacctgctgtgtgtgcactgctgttctagctgctgaccatagacagcataaatgaaaaagacagaaattcccaccttcgtggaactctccattttcctaaatgttaggttggtgcaaaactaatcgtggtttttgccatttttaatttttaatggcaagggccactattacttttgcaccaacctaataggccgattcagaaacttgagtgcaatgtcttggatatgcaaaaaagaaaatcaaaacgcattcttcattctctataagagttctaggcggggcgtggtggctcacacttgtaatcccagcactttgggaggccaaggtgggcggatcatgaggtcaggagatcgagaccatcctgaccaacgtggtgaaaccccatctctactaaaaatagaaaaatcagctgggtgtggtgccgcgtgcctgtaatcccagctacttgggaggctgaggcataagaattgtttgagcctgggaggcagaggttgcagtgagccaagattgcgccactgtactccagcttgggcaacagagcaagactccatctcaaaaaaaaaagagttctagcccaggagcggtggctcacacttgtaatcccagcactttgggatgctgaggcaggcggatcacttgaggccaggagttcaagaccagcctggccaacatggcaaaatcccatctctactaaaaatacaaaaattcacagggtgtgttggcacacgcctgtaataccagctactcaggtggctgaggcataagaattgcttgagcctgggaggcagagattgcactgagccgagatcgcgccactatactccagcctgggcaacagacatcctgtctcaaataaattaaattacattaaatgtttaagaagaagtctaaataagtttcatatgctgccctccctcagataatgagggaacctggggtacttaaaatgccaaatgaacgtatacttgatccttattcatagattttgtatttgagaatttgcctactcactaaaatatgtttgtaacccccaaatcaatactgtggcactttctcagttattcgcagacacacagagacaaaaaatttgaagtgcctggctgggcgtggtggctcacgcctgtaatcccagcactttgggaggccgaggcaggcggatcacaaggtccagagatcgagaccatcctggccaacatggtgaaaccccgtctctactaaaaatacaaaaattagctgggcatggtggggcatgcctgtagtcccagctactcagaagggtgaggcagaattgcctgaacccgcgaggcggagactgcagtgagccgagatcgcaccactgcactccagcctggtgacagagcaaaaaaaaaaaaattgaagtgcctggccagttgcagtgggtcacacctgtaatcccaacactttgggaggctaagatgggagaactgatggaagccaggagttcaagaacagcctggccaacatggcgaaaccccatctctactaaaaatacaaaaattcgccaggcatgttggcacacacctgtaataccagctactcatgtggctgaggcataagaattgcttgagcctggaggccgggtgcagtggcttacgcctgtaatcccaacactttgggagtctgagacgggtggaaatcctgaggtcaggagttcaagaccagcctgtccaacatggtgaaaccccgtctctactaaaaatacaaaaattagctgggcgtggtagcacgtgcctgtaatcccagctacctgggaagctgaggcaggagaatcgcttgaacctgggaggcggaggttgcagtaagccgagattgtgccattgcactccagcctgggcaacaagagcaaaactccatctc

SEQ ID NO: 339966 - DNA, 2889 bp, Homo sapiens
ccaccacagcggtcgagcactatgctagtaggatgcctgggttaaatctggccgaggcaagtagagctccgtcctgacgcgccgcctcccgtgggctccggccggctaagccgcggcggacaactatgctgaaagccaagatcctcttcgtggggccttgcgaggatcctagaatttgagaacccgcatgttaccagcaacaacaaaggcacgggctgtgaattcgagctatgggactgtggtggcgatgctaagtttgagtcctgctggccggccctgatgaaggatgctcatggagtggtgatcgtcttcaatgctgacatcccaagccaccggaaggaaatggagatgtggtattcctgctttgtccaacagccgtccttacaggacacacagtgtatgctaattgcacaccacaaaccaggctctggagatgataaaggaagcctgtctttgtcgccacccttgaacaagctgaagctggtgcactcaaacctggaagatgaccctgaggagatccggatggaattcataaagtatttaaaaagcataatcaactccatgtctgagagcagagacagggaggagatgtcaattatgacctagccagccttcacctgggactgccacatccccagtgaaatcagcatgtttctcggtgcagatctgaaatcacatccagctcctgatgttttcttctccctctgactgcagaggaagtgttcctacctgcaggaaggcacctgtcacacagggcgttcactcagaccatctgtgctctgccctgagttcagttgagaaaatcctattatcaaatttggatttcctggccccagaacttcccaaagacctgtaaaatggagggatttaccacctcacatatgtccagttaaacagtttgtggacttgtaaccgtcgcagcccaatgatacaacagtagtttaatcacgtgtattggcttgaatgtgattttcattccttgattcacccaacaaataccgactggctgagcacctgctgtgtgtgcactgctgttctagctgctgaccatagacagcataaatgaaaaagacagaaattcccaccttcgtggaactctccattttcctaaatgttaggttggtgcaaaactaatcgtggtttttgccatttttaatttttaatggcaagggccactattacttttgcaccaacctaataggccgattcagaaacttgagtgcaatgtcttggatatgcaaaaaagaaaatcaaaacgcattcttcattctctataagagttctaggcggggcgtggtggctcacacttgtaatcccagcactttgggaggccaaggtgggcggatcatgaggtcaggagatcgagaccatcctgaccaacgtggtgaaaccccatctctactaaaaatagaaaaatcagctgggtgtggtgccgcgtgcctgtaatcccagctacttgggaggctgaggcataagaattgtttgagcctgggaggcagaggttgcagtgagccaagattgcgccactgtactccagcttgggcaacagagcaagactccatctcaaaaaaaaaagagttctagcccaggagcggtggctcacacttgtaatcccagcactttgggatgctgaggcaggcggatcacttgaggccaggagttcaagaccagcctggccaacatggcaaaatcccatctctactaaaaatacaaaaattcacagggtgtgttggcacacgcctgtaataccagctactcaggtggctgaggcataagaattgcttgagcctgggaggcagagattgcactgagccgagatcgcgccactatactccagcctgggcaacagacatcctgtctcaaataaattaaattacattaaatgtttaagaagaagtctaaataagtttcatatgctgccctccctcagataatgagggaacctggggtacttaaaatgccaaatgaacgtatacttgatccttattcatagattttgtatttgagaatttgcctactcactaaaatatgtttgtaacccccaaatcaatactgtggcactttctcagttattcgcagacacacagagacaaaaaatttgaagtgcctggctgggcgtggtggctcacgcctgtaatcccagcactttgggaggccgaggcaggcggatcacaaggtccagagatcgagaccatcctggccaacatggtgaaaccccgtctctactaaaaatacaaaaattagctgggcatggtggggcatgcctgtagtcccagctactcagaagggtgaggcagaattgcctgaacccgcgaggcggagactgcagtgagccgagatcgcaccactgcactccagcctggtgacagagcaaaaaaaaaaaaattgaagtgcctggccagttgcagtgggtcacacctgtaatcccaacactttgggaggctaagatgggagaactgatggaagccaggagttcaagaacagcctggccaacatggcgaaaccccatctctactaaaaatacaaaaattcgccaggcatgttggcacacacctgtaataccagctactcatgtggctgaggcataagaattgcttgagcctggaggccgggtgcagtggcttacgcctgtaatcccaacactttgggagtctgagacgggtggaaatcctgaggtcaggagttcaagaccagcctgtccaacatggtgaaaccccgtctctactaaaaatacaaaaattagctgggcgtggtagcacgtgcctgtaatcccagctacctgggaagctgaggcaggagaatcgcttgaacctgggaggcggaggttgcagtaagccgagattgtgccattgcactccagcctgggcaacaagagcaaaactccatctc

SEQ ID NO: 339967 - DNA, 2525 bp, Homo sapiens
gcggccgctactactactactactactaaattcgcggccgcgtcgaccaccacaaaccaggctctggagatgataaaggaagcctgtctttgtcgccacccttgaacaagctgaagctggtgcactcaaacctggaagatgaccctgaggagatccggatggaattcataaagtatttaaaaagcataatcaactccatgtctgagagcagagacagggaggagatgtcaattatgacctagccagccttcacctgggactgccacatccccagtgaaatcagcatgtttctcggtgcagatctgaaatcacatccagctcctgatgttttcttctccctctgactgcagaggaagtgttcctacctgcaggaaggcacctgtcacacagggcgttcactcagaccatctgtgctctgccctgagttcagttgagaaaatcctattatcaaatttggatttcctggccccagaacttcccaaagacctgtaaaatggagggatttaccacctcacatatgtccagttaaacagtttgtggacttgtaaccgtcgcagcccaatgatacaacagtagtttaatcacgtgtattggcttgaatgtgattttcattccttgattcacccaacaaataccgactggctgagcacctgctgtgtgtgcactgctgttctagctgctgaccatagacagcataaatgaaaaagacagaaattcccaccttcgtggaactctccattttcctaaatgttaggttggtgcaaaactaatcgtggtttttgccatttttaatttttaatggcaagggccactattacttttgcaccaacctaataggccgattcagaaacttgagtgcaatgtcttggatatgcaaaaaagaaaatcaaaacgcattcttcattctctataagagttctaggcggggcgtggtggctcacacttgtaatcccagcactttgggaggccaaggtgggcggatcatgaggtcaggagatcgagaccatcctgaccaacgtggtgaaaccccatctctactaaaaatagaaaaatcagctgggtgtggtgccgcgtgcctgtaatcccagctacttgggaggctgaggcataagaattgtttgagcctgggaggcagaggttgcagtgagccaagattgcgccactgtactccagcttgggcaacagagcaagactccatctcaaaaaaaaaagagttctagcccaggagcggtggctcacacttgtaatcccagcactttgggatgctgaggcaggcggatcacttgaggccaggagttcaagaccagcctggccaacatggcaaaatcccatctctactaaaaatacaaaaattcacagggtgtgttggcacacgcctgtaataccagctactcaggtggctgaggcataagaattgcttgagcctgggaggcagagattgcactgagccgagatcgcgccactatactccagcctgggcaacagacatcctgtctcaaataaattaaattacattaaatgtttaagaagaagtctaaataagtttcatatgctgccctccctcagataatgagggaacctggggtacttaaaatgccaaatgaacgtatacttgatccttattcatagattttgtatttgagaatttgcctactcactaaaatatgtttgtaacccccaaatcaatactgtggcactttctcagttattcgcagacacacagagacaaaaaatttgaagtgcctggctgggcgtggtggctcacgcctgtaatcccagcactttgggaggccgaggcaggcggatcacaaggtccagagatcgagaccatcctggccaacatggtgaaaccccgtctctactaaaaatacaaaaattagctgggcatggtggggcatgcctgtagtcccagctactcagaagggtgaggcagaattgcctgaacccgcgaggcggagactgcagtgagccgagatcgcaccactgcactccagcctggtgacagagcaaaaaaaaaaaaattgaagtgcctggccagttgcagtgggtcacacctgtaatcccaacactttgggaggctaagatgggagaactgatggaagccaggagttcaagaacagcctggccaacatggcgaaaccccatctctactaaaaatacaaaaattcgccaggcatgttggcacacacctgtaataccagctactcatgtggctgaggcataagaattgcttgagcctggaggccgggtgcagtggcttacgcctgtaatcccaacactttgggagtctgagacgggtggaaatcctgaggtcaggagttcaagaccagcctgtccaacatggtgaaaccccgtctctactaaaaatacaaaaattagctgggcgtggtagcacgtgcctgtaatcccagctacctgggaagctgaggcaggagaatcgcttgaacctgggaggcggaggttgcagtaagccgagattgtgccattgcactccagcctgggcaacaagagcaaaactccatctc

SEQ ID NO: 339968 - DNA, 895 bp, Homo sapiens
gcggccgctactactactactactactaaattcgcggccgcgtcgaccggctgcgagaagacgacagaggggggccatggaaacgaaagcggccaagtagagctccgtcctgacgcgccgcctcccgtgggctccggccggctaagccgcggcggacaactatgctgaaagccaagatcctcttcgtggggccttgcgagagtggaaaaactgttttggccaactttctgacagaatcttctgacatcactgaatacagcccaacccaaggagtgaggatcctagaatttgagaacccgcatgttaccagcaacaacaaaggcacgggctgtgaattcgagctatgggactgtggtggcgatgctaagtttgagtcctgctggccggccctgatgaaggatgctcatggagtggtgatcgtcttcaatgctgacatcccaagccaccggaaggaaatggagatgtggtattcctgctttgtccaacagccgtccttacaggacacacagtgtatgctaattgcacaccacaaaccaggctctggagatgataaaggaagcctgtctttgtgtaaggaaactggaatttctcttcctcttttgtcttgaatgttttggacacctacatattgtcccatgtcctagaaaccagcagctctgtccagttactgagcacctactgtaccctaggcaattgttaccctctccatgtgagtccactacgtctctactaaaaatacaaaaattagccaggcatgatggcaggcgcctgtactcccagctactcagggggctaaggcaggagaattgcttgagcccaggaggcggagattgcagtgagttgagatctcaccactacactccagtttgtgtgacagggcgagacaccatctcaa

SEQ ID NO: 339969 - DNA, 583 bp, Homo sapiens
ccaccacagcggtcgagcactatgctagtaggatgcctgggttaaatctggccgaggcaagtagagctccgtcctgacgcgccgcctcccgtgggctccggccggctaagccgcggcggacaactatgctgaaagccaagatcctcttcgtggggccttgcgagagtggaaaaactgttttggccaactttctgacagaatcttctgacatcactgaatacagcccaacccaaggagtgaggtgagccctgacaaatctgtgtcccagagtgtccaactggctcggcagggaggctcattcctctagtcccggtgctctgggaggtcaaggcgggaggatcgcctgaggcctgggcaatatggggagaccccgtctcaactagaaatagaacattagccgggtgtgttggcgtgtgtctgtggtctcagctacatgttaggttgaagcagaaggattgtttgaggccgggagttggaggctgcagtgagctgtgatcgtgccactgcactccagcctgggtgacagagtgagaccctgtctcaaaacaaaattaataataaaacaattttaaaagactgccca

SEQ ID NO: 339970 - DNA, 3002 bp, Homo sapiens
gcggccgctactactactactactactaaattcgcggccgcgtcgaccggctgcgagaagacgacagaggggggccatggaaacgaaagcggccaagtagagctccgtcctgacgcgccgcctcccgtgggctccggccggctaagccgcggcggacaactatgctgaaagccaagatcctcttcgtggggccttgcgagagtggaaaaactgttttggccaactttctgacagaatcttctgacatcactgaatacagcccaacccaaggagtgaggatcctagaatttgagaacccgcatgttaccagcaacaacaaaggcacgggctgtgaattcgagctatgggactgtggtggcgatgctaagtttgagtcctgctggccggccctgatgaaggatgctcatggagtggtgatcgtcttcaatgctgacatcccaagccaccggaaggaaatggagatgtggtattcctgctttgtccaacagccgtccttacaggacacacagtgtatgctaattgcacaccacaaaccaggctctggagatgataaaggaagcctgtctttgtcgccacccttgaacaagctgaagctggtgcactcaaacctggaagatgaccctgaggagatccggatggaattcataaagtatttaaaaagcataatcaactccatgtctgagagcagagacagggaggagatgtcaattatgacctagccagccttcacctgggactgccacatccccagtgaaatcagcatgtttctcggtgcagatctgaaatcacatccagctcctgatgttttcttctccctctgactgcagaggaagtgttcctacctgcaggaaggcacctgtcacacagggcgttcactcagaccatctgtgctctgccctgagttcagttgagaaaatcctattatcaaatttggatttcctggccccagaacttcccaaagacctgtaaaatggagggatttaccacctcacatatgtccagttaaacagtttgtggacttgtaaccgtcgcagcccaatgatacaacagtagtttaatcacgtgtattggcttgaatgtgattttcattccttgattcacccaacaaataccgactggctgagcacctgctgtgtgtgcactgctgttctagctgctgaccatagacagcataaatgaaaaagacagaaattcccaccttcgtggaactctccattttcctaaatgttaggttggtgcaaaactaatcgtggtttttgccatttttaatttttaatggcaagggccactattacttttgcaccaacctaataggccgattcagaaacttgagtgcaatgtcttggatatgcaaaaaagaaaatcaaaacgcattcttcattctctataagagttctaggcggggcgtggtggctcacacttgtaatcccagcactttgggaggccaaggtgggcggatcatgaggtcaggagatcgagaccatcctgaccaacgtggtgaaaccccatctctactaaaaatagaaaaatcagctgggtgtggtgccgcgtgcctgtaatcccagctacttgggaggctgaggcataagaattgtttgagcctgggaggcagaggttgcagtgagccaagattgcgccactgtactccagcttgggcaacagagcaagactccatctcaaaaaaaaaagagttctagcccaggagcggtggctcacacttgtaatcccagcactttgggatgctgaggcaggcggatcacttgaggccaggagttcaagaccagcctggccaacatggcaaaatcccatctctactaaaaatacaaaaattcacagggtgtgttggcacacgcctgtaataccagctactcaggtggctgaggcataagaattgcttgagcctgggaggcagagattgcactgagccgagatcgcgccactatactccagcctgggcaacagacatcctgtctcaaataaattaaattacattaaatgtttaagaagaagtctaaataagtttcatatgctgccctccctcagataatgagggaacctggggtacttaaaatgccaaatgaacgtatacttgatccttattcatagattttgtatttgagaatttgcctactcactaaaatatgtttgtaacccccaaatcaatactgtggcactttctcagttattcgcagacacacagagacaaaaaatttgaagtgcctggctgggcgtggtggctcacgcctgtaatcccagcactttgggaggccgaggcaggcggatcacaaggtccagagatcgagaccatcctggccaacatggtgaaaccccgtctctactaaaaatacaaaaattagctgggcatggtggggcatgcctgtagtcccagctactcagaagggtgaggcagaattgcctgaacccgcgaggcggagactgcagtgagccgagatcgcaccactgcactccagcctggtgacagagcaaaaaaaaaaaaattgaagtgcctggccagttgcagtgggtcacacctgtaatcccaacactttgggaggctaagatgggagaactgatggaagccaggagttcaagaacagcctggccaacatggcgaaaccccatctctactaaaaatacaaaaattcgccaggcatgttggcacacacctgtaataccagctactcatgtggctgaggcataagaattgcttgagcctggaggccgggtgcagtggcttacgcctgtaatcccaacactttgggagtctgagacgggtggaaatcctgaggtcaggagttcaagaccagcctgtccaacatggtgaaaccccgtctctactaaaaatacaaaaattagctgggcgtggtagcacgtgcctgtaatcccagctacctgggaagctgaggcaggagaatcgcttgaacctgggaggcggaggttgcagtaagccgagattgtgccattgcactccagcctgggcaacaagagcaaaactccatctc

SEQ ID NO: 339971 - DNA, 3039 bp, Homo sapiens
ccaccacagcggtcgagcactatgctagtaggatgcctgggttaaatctggccgaggcaagtagagctccgtcctgacgcgccgcctcccgtgggctccggccggctaagccgcggcggacaactatgctgaaagccaagatcctcttcgtggggccttgcgagaccttgattccaaccactgcccggaggaggtagtggaggcgagcccggtgttaatgagccccgaaggcccaagagtggaaaaactgttttggccaactttctgacagaatcttctgacatcactgaatacagcccaacccaaggagtgaggatcctagaatttgagaacccgcatgttaccagcaacaacaaaggcacgggctgtgaattcgagctatgggactgtggtggcgatgctaagtttgagtcctgctggccggccctgatgaaggatgctcatggagtggtgatcgtcttcaatgctgacatcccaagccaccggaaggaaatggagatgtggtattcctgctttgtccaacagccgtccttacaggacacacagtgtatgctaattgcacaccacaaaccaggctctggagatgataaaggaagcctgtctttgtcgccacccttgaacaagctgaagctggtgcactcaaacctggaagatgaccctgaggagatccggatggaattcataaagtatttaaaaagcataatcaactccatgtctgagagcagagacagggaggagatgtcaattatgacctagccagccttcacctgggactgccacatccccagtgaaatcagcatgtttctcggtgcagatctgaaatcacatccagctcctgatgttttcttctccctctgactgcagaggaagtgttcctacctgcaggaaggcacctgtcacacagggcgttcactcagaccatctgtgctctgccctgagttcagttgagaaaatcctattatcaaatttggatttcctggccccagaacttcccaaagacctgtaaaatggagggatttaccacctcacatatgtccagttaaacagtttgtggacttgtaaccgtcgcagcccaatgatacaacagtagtttaatcacgtgtattggcttgaatgtgattttcattccttgattcacccaacaaataccgactggctgagcacctgctgtgtgtgcactgctgttctagctgctgaccatagacagcataaatgaaaaagacagaaattcccaccttcgtggaactctccattttcctaaatgttaggttggtgcaaaactaatcgtggtttttgccatttttaatttttaatggcaagggccactattacttttgcaccaacctaataggccgattcagaaacttgagtgcaatgtcttggatatgcaaaaaagaaaatcaaaacgcattcttcattctctataagagttctaggcggggcgtggtggctcacacttgtaatcccagcactttgggaggccaaggtgggcggatcatgaggtcaggagatcgagaccatcctgaccaacgtggtgaaaccccatctctactaaaaatagaaaaatcagctgggtgtggtgccgcgtgcctgtaatcccagctacttgggaggctgaggcataagaattgtttgagcctgggaggcagaggttgcagtgagccaagattgcgccactgtactccagcttgggcaacagagcaagactccatctcaaaaaaaaaagagttctagcccaggagcggtggctcacacttgtaatcccagcactttgggatgctgaggcaggcggatcacttgaggccaggagttcaagaccagcctggccaacatggcaaaatcccatctctactaaaaatacaaaaattcacagggtgtgttggcacacgcctgtaataccagctactcaggtggctgaggcataagaattgcttgagcctgggaggcagagattgcactgagccgagatcgcgccactatactccagcctgggcaacagacatcctgtctcaaataaattaaattacattaaatgtttaagaagaagtctaaataagtttcatatgctgccctccctcagataatgagggaacctggggtacttaaaatgccaaatgaacgtatacttgatccttattcatagattttgtatttgagaatttgcctactcactaaaatatgtttgtaacccccaaatcaatactgtggcactttctcagttattcgcagacacacagagacaaaaaatttgaagtgcctggctgggcgtggtggctcacgcctgtaatcccagcactttgggaggccgaggcaggcggatcacaaggtccagagatcgagaccatcctggccaacatggtgaaaccccgtctctactaaaaatacaaaaattagctgggcatggtggggcatgcctgtagtcccagctactcagaagggtgaggcagaattgcctgaacccgcgaggcggagactgcagtgagccgagatcgcaccactgcactccagcctggtgacagagcaaaaaaaaaaaaattgaagtgcctggccagttgcagtgggtcacacctgtaatcccaacactttgggaggctaagatgggagaactgatggaagccaggagttcaagaacagcctggccaacatggcgaaaccccatctctactaaaaatacaaaaattcgccaggcatgttggcacacacctgtaataccagctactcatgtggctgaggcataagaattgcttgagcctggaggccgggtgcagtggcttacgcctgtaatcccaacactttgggagtctgagacgggtggaaatcctgaggtcaggagttcaagaccagcctgtccaacatggtgaaaccccgtctctactaaaaatacaaaaattagctgggcgtggtagcacgtgcctgtaatcccagctacctgggaagctgaggcaggagaatcgcttgaacctgggaggcggaggttgcagtaagccgagattgtgccattgcactccagcctgggcaacaagagcaaaactccatctc

SEQ ID NO: 339972 - DNA, 2799 bp, Homo sapiens
ccaccacagcggtcgagcactatgctagtaggatgcctgggttaaatctggccgaggcaagtagagctccgtcctgacgcgccgcctcccgtgggctccggccggctaagccgcggcggacaactatgctgaaagccaagatcctcttcgtggggccttgcgaggtttgagtcctgctggccggccctgatgaaggatgctcatggagtggtgatcgtcttcaatgctgacatcccaagccaccggaaggaaatggagatgtggtattcctgctttgtccaacagccgtccttacaggacacacagtgtatgctaattgcacaccacaaaccaggctctggagatgataaaggaagcctgtctttgtcgccacccttgaacaagctgaagctggtgcactcaaacctggaagatgaccctgaggagatccggatggaattcataaagtatttaaaaagcataatcaactccatgtctgagagcagagacagggaggagatgtcaattatgacctagccagccttcacctgggactgccacatccccagtgaaatcagcatgtttctcggtgcagatctgaaatcacatccagctcctgatgttttcttctccctctgactgcagaggaagtgttcctacctgcaggaaggcacctgtcacacagggcgttcactcagaccatctgtgctctgccctgagttcagttgagaaaatcctattatcaaatttggatttcctggccccagaacttcccaaagacctgtaaaatggagggatttaccacctcacatatgtccagttaaacagtttgtggacttgtaaccgtcgcagcccaatgatacaacagtagtttaatcacgtgtattggcttgaatgtgattttcattccttgattcacccaacaaataccgactggctgagcacctgctgtgtgtgcactgctgttctagctgctgaccatagacagcataaatgaaaaagacagaaattcccaccttcgtggaactctccattttcctaaatgttaggttggtgcaaaactaatcgtggtttttgccatttttaatttttaatggcaagggccactattacttttgcaccaacctaataggccgattcagaaacttgagtgcaatgtcttggatatgcaaaaaagaaaatcaaaacgcattcttcattctctataagagttctaggcggggcgtggtggctcacacttgtaatcccagcactttgggaggccaaggtgggcggatcatgaggtcaggagatcgagaccatcctgaccaacgtggtgaaaccccatctctactaaaaatagaaaaatcagctgggtgtggtgccgcgtgcctgtaatcccagctacttgggaggctgaggcataagaattgtttgagcctgggaggcagaggttgcagtgagccaagattgcgccactgtactccagcttgggcaacagagcaagactccatctcaaaaaaaaaagagttctagcccaggagcggtggctcacacttgtaatcccagcactttgggatgctgaggcaggcggatcacttgaggccaggagttcaagaccagcctggccaacatggcaaaatcccatctctactaaaaatacaaaaattcacagggtgtgttggcacacgcctgtaataccagctactcaggtggctgaggcataagaattgcttgagcctgggaggcagagattgcactgagccgagatcgcgccactatactccagcctgggcaacagacatcctgtctcaaataaattaaattacattaaatgtttaagaagaagtctaaataagtttcatatgctgccctccctcagataatgagggaacctggggtacttaaaatgccaaatgaacgtatacttgatccttattcatagattttgtatttgagaatttgcctactcactaaaatatgtttgtaacccccaaatcaatactgtggcactttctcagttattcgcagacacacagagacaaaaaatttgaagtgcctggctgggcgtggtggctcacgcctgtaatcccagcactttgggaggccgaggcaggcggatcacaaggtccagagatcgagaccatcctggccaacatggtgaaaccccgtctctactaaaaatacaaaaattagctgggcatggtggggcatgcctgtagtcccagctactcagaagggtgaggcagaattgcctgaacccgcgaggcggagactgcagtgagccgagatcgcaccactgcactccagcctggtgacagagcaaaaaaaaaaaaattgaagtgcctggccagttgcagtgggtcacacctgtaatcccaacactttgggaggctaagatgggagaactgatggaagccaggagttcaagaacagcctggccaacatggcgaaaccccatctctactaaaaatacaaaaattcgccaggcatgttggcacacacctgtaataccagctactcatgtggctgaggcataagaattgcttgagcctggaggccgggtgcagtggcttacgcctgtaatcccaacactttgggagtctgagacgggtggaaatcctgaggtcaggagttcaagaccagcctgtccaacatggtgaaaccccgtctctactaaaaatacaaaaattagctgggcgtggtagcacgtgcctgtaatcccagctacctgggaagctgaggcaggagaatcgcttgaacctgggaggcggaggttgcagtaagccgagattgtgccattgcactccagcctgggcaacaagagcaaaactccatctc

SEQ ID NO: 339973 - DNA, 967 bp, Homo sapiens
ccaccacagcggtcgagcactatgctagtaggatgcctgggttaaatctggccgaggcaagtagagctccgtcctgacgcgccgcctcccgtgggctccggccggctaagccgcggcggacaactatgctgaaagccaagatcctcttcgtggggccttgcgaggatcctagaatttgagaacccgcatgttaccagcaacaacaaaggcacgggctgtgaattcgagctatgggactgtggtggcgatgctaagtttgagtcctgctggccggccctgatgaaggatgctcatggagtggtgatcgtcttcaatgctgacatcccaagccaccggaaggaaatggagatgtggtattcctgctttgtccaacagccgtccttacaggacacacagtgtatgctaattgcacaccacaaaccaggctctggagatgataaaggaagcctgtctttgtcgccacccttgaacaagctgaagctggtgcactcaaacctggaagatgaccctgaggagatccggatggaattcataaagtatttaaaaagcataatcaactccatgtctgagagcagagacagggaggagatgtcaattatgacctagccagccttcacctgggactgccacatccccagtgaaatcagcatgtttctcggtgcagatctgaaatcacatccagctcctgatgttttcttctccctctgactgcagaggaagtgttcctacctgcaggaaggcacctgtcacacagggcgttcactcagaccatctgtgctctgccctgagttcagttgagaaaatcctattatcaaatttggatttcctggccccagaacttcccaaagacctgtaaaatggagggatttaccacctcacatatgtccagttaaacagtttgtggacttgtaaccgtctgaggccagatacaacggcgttacccgctgaaaaacaaaaaaggggggcc

SEQ ID NO: 339974 - DNA, 782 bp, Homo sapiens
ccaccacagcggtcgagcactatgctagtaggatgcctgggttaaatctggccgaggcaagtagagctccgtcctgacgcgccgcctcccgtgggctccggccggctaagccgcggcggacaactatgctgaaagccaagatcctcttcgtggggccttgcgaggatcctagaatttgagaacccgcatgttaccagcaacaacaaaggcacgggctgtgaattcgagctatgggactgtggtggcgatgctaagtttgagtcctgctggccggccctgatgaaggatgctcatggagtggtgatcgtcttcaatgctgacatcccaagccaccggaaggaaatggagatgtggtattcctgctttgtccaacagccgtccttacaggacacacagtgtatgctaattgcacaccacaaaccaggctctggagatgataaaggaagcctgtctttgtgtaaggaaactggaatttctcttcctcttttgtcttgaatgttttggacacctacatattgtcccatgtcctagaaaccagcagctctgtccagttactgagcacctactgtaccctaggcaattgttaccctctccatgtgagtccactacgtctctactaaaaatacaaaaattagccaggcatgatggcaggcgcctgtactcccagctactcagggggctaaggcaggagaattgcttgagcccaggaggcggagattgcagtgagttgagatctcaccactacactccagtttgtgtgacagggcgagacaccatctcaa

SEQ ID NO: 339975 - DNA, 334 bp, Homo sapiens
ctcagcctcccaaagtgctgagattacaggcgcgagccaccgcacccagcccattttacctattctgcagttgacagttcagtggcattcagtcagttcacgaggtaaccatcactgccattcatctccagactacttcaccttctcggcagatgtccgaaactgtccgcattgaacacactcctcatctccctctgacagccaccattctactttgtatctctctctgccttctctaggtacctcatgtaagtggaattataccaatatttgcccttgtgtgactggcttctttcatgtgacatggtgtcctcaaggttcatctgtgttatag

SEQ ID NO: 339976 - DNA, 367 bp, Homo sapiens
ggggtttagcctagattatcattcctaattcttcactaattcttcaatccctccttaacaggattttaattcatgccatttgctacataaccttgtaattcctcctactcgaaggggaggagtatatttcaccatgccatcatgtttggttcggctcatgatctgttttggaaatgacacgtgagaatgagacaggggacccacacatactcaacactctatgagacaatgtattagtccattttcatgcttctataaagaaatacccaagactgggcaatttataaaggaaagaggtttaattgactcacagtttcacatggctagggaggcctcaggaaacttacaatcatggcagaagacgaag

SEQ ID NO: 339977 - DNA, 391 bp, Homo sapiens
gagatggagtctcgctctgtcgcccaggctggagtgcagtgctgcgattttggctcactgcaagctccgcctcctggattaacgccattctcctgcctcagcctcccgagtagctgggactacaggtgcccaccatcacgcccggctgattttttgtatttttagtagagacaggttttcaccgtgttagccgggatggtctcgatctcctgacctcatgatccacccgcctcggcctcccaaagtgctgggattacaggagtgagccaccgcgcctggctgtaaaggttttaacaaatgggtgaatgccttaagacttttagcaacaaaagattggaataaagtaatgctgcaaatctaagcattttcatttacaagtcagtaattttgg

SEQ ID NO: 339978 - DNA, 332 bp, Homo sapiens
atgtgaatttttattcataagaactagaaaaatacgtcatccagatcatctgaaagatcacctcagaataaaggcatcagcaactcttgaatgttttttgatgaggatttagtgattgaaataatgaaagttttattgtaaatggtttcccattattagtctgttggataggatacagaagactatattatagaaatggtctgatattatcattgttttctaaaatctattaatagtttgttgaataaatgtgtgagtgtctgaggcaatgataggaaaacagtctagctgcatcactggaggtcaaatcctgtctcccctacttccttgct

SEQ ID NO: 339979 - DNA, 952 bp, Homo sapiens
gtgaatactgctatgcatgaggcaaaacttatggaagaatgtgacgagttggtagagatcatccagcagaggaagcaaatgatcgctgtcaaaatcaaagagacaaaggttatgaaactgagaaagttggcacagcaggttgctaattgccgccagtgtcttgaacggtcaacagtcctcatcaaccaagctgagcatatcctgaaagaaaatgaccaggcacggtttctacagtctgcaaaaaatattgctgagagggtcgctatggcaactgcatcttctcaagttctgattccagacatcaattttaatgatgcctttgaaaactttgctttagatttttccagagaaaagaaactgctagaggggttagattatttaacagccccaaacccaccatctatccgagaagaactctgtactgcctcccatgacaccattacagtccactggatctcggatgatgagttcagcatcagctcctatgagcttcagtacaccatattcactggccaggctaacttcatcagcctgtataattcagtagacagctggatgattgttcccaacattaaacagaaccattacacagtgcatggactccagagcgggactcgctacatcttcatcgttaaagccataaaccaagccggcagcgaacagtgaacctacccgactaaaaaacaaacagcaacctttaattggatcccaaatgactcacagaaagttgaagatctccatgatggatcgcgatggcgaaagatgaaggtctctaagaagagccaaccagagaagttagtggcccgggctatgggcgccggaaattctgacggctggccctggggggccgggctcacatggtcatggtgcgcaacatccaagagtggaagccgggtccgaaaacgcgacacagagggggccccacggcccgaaaagtcaccagaggcgacaa

SEQ ID NO: 339980 - DNA, 660 bp, Homo sapiens
ggtcatcagactggggtttctgagcatggattcaaccatcccagtcttgggtacagaactgacaccaatcaacggacgtgaggagactccttgctacaagcagaccctgagcttcacggggctgacgtgcatcgtttcccttgtcgcgctgacaggaaacgcggttgtgctctggctcctgggctgccgcatgcgcaggaacgctgtctccatctacatcctcaacctggtcgcggccgacttcctcttccttagcggccacattatatgttcgccgttacgcctcatcaatatccgccatcccatctccaaaatcctcagtcctgtgatgacctttccctactttataggcctaagcatgctgagcgccatcagcaccgagcgctgcctgtccatcctgtggcccatctggtaccactgccgccgccccagatacctgtcatcagtcatgtgtgtcctgctctgggccctgtccctgctgcggagtatcctggagtggatgttctgtgacttcctgtttagtggtgctaattctgtttggtgtgaaacgtcagatttcattacaatcgcgtggctggtttttttatgtgtggttctctgtgggtccagcctggtcctgctggtcaggattctctgtggatcccggaagatgccgctgac

SEQ ID NO: 339981 - DNA, 1492 bp, Homo sapiens
attctcactgctgttattgttttctgacagcatgcctgaaccagctaagtcagctcctgctccgaagaagggttccaagaaggctgtgaccaaggcgcagaagaaggatggcaagaagcgcaagcgcagtcgtaaggagagctactccgtgtatgtgtacaaggtgctaaaacaggttcaccccgatactggcatctcatccaaggccatgggcatcatgaattccttcgttaacgacatcttcgaacgcatcgcaggcgaggcttcccgtctggcccactacaacaagcgctcgaccattacctccagggagatccagaccgccgtgcgtctgctgcttcccggagagctggccaagcacgcagtgtccgaaggtaccaaggctgtcaccaagtatacaagctccaagtaaatgtgtgcttaggtgctttaaaactcaaaggctcttttcagagccactcaagtctcacataaagagctttaatattgaatttcaccgttttctagggaataatttttccgattttgtaatcccagcactttgggaggccgaggcgtgcggatcgagaccagtttggctaacgtggttaaatctcgtttctactaaaaatacaaatattagccgggcgtggggcagtcgcgtgtcatcccagagactcgggaggctgccgcaggagaatcacttaaacccagcaagcaaaggttgcagtgaaaagacatggcgcttttgcattctagcctgggcgacaaaggcgaggcttcgtctcaaaaaaaaattgatcaggagatactcctgttctgtgttggcaagatcctgtaatcctagcactttgggaggtcgatgcatgaggctttcttcagctcaggagttaacagatttgcctgggcaacatagaactcgtctctgcaaaaaaatgaagctaaccaggtgtgacggcttgcgtctgtactatcatttactcggtaggctgaggtggtaggatagcttaaactctcgggctagagactgcaggaacatgtgaatacgctagtgcaattccagcctgggcaacactggaaagggtaggaagagtagtctttgggtccctaaagatcacctgataacaagtttgacttttctgagcactcttgtggagtttgttgtggagggaataccatgggcattggcaatgtaaagttgatctaaaaaatctcgttttccgccgtgcgcggtggctcacgcctctaatcccatcactttgggaggccgagacgggcggatcacgaggtcaggaggtcgagaccatcctggctaacactgtgaaaccctgtctctactaaaaaaatacaaacaaaattagccgggcgtggtggcactcacctgtagtttcagctactctggaagctgaggctggagagtcacttgaacccgggaggcggaggttgcagtgatcagagatcgcgccactgcactccatcctgggcgaaagagctagattccatctcataaaaa

SEQ ID NO: 339982 - DNA, 117 bp, Homo sapiens
agcagaaaacagtttacttttaacttaaaacccgagagtttagattgctactattgctagcatgctagagggtagcattctattaatagtttctgggccaggcgcggtggctcatgc

SEQ ID NO: 339983 - DNA, 194 bp, Homo sapiens
ttggcctcccaaagtgctgggattacaggcatgagccaatgcgctcggccacccagggctctttcaatgatgctgacttaaagctttctagttataaagccattttgcttttatggagaggttagacatgaaatgagagttgagccatcttactttctctgtcttctattaacatgctatcgtgatccctaagc

SEQ ID NO: 339984 - DNA, 400 bp, Homo sapiens
atataaaacacacatacacatatgcacacacacctcaaacatcttcccctgcctcagttcactatgtgtgttatgagccatacacattcacatctgttctttcaacttttcattgaatttcagatatccctttctccattattcatattacaagctgcactctgcctgatgcccatttctacaagccaacttcattcaagatgaagtgccttattaatggttatattcatgcatttcataaccatttaacatgtataatgtcttgctactatttttatgaggttcccatcttttttgatgtgtcattgttgaagtttttgaacgtggtaccccaaccccatttttcccataagccctgtggctgtgggaatttgcaaaatttgcatagcatggtgatgtt

SEQ ID NO: 339985 - DNA, 261 bp, Homo sapiens
gaaggatggagatttggaagacatgaatggatgaagaaccaagtgcgtgagggcacctatcaggattattgctgaaatccttatggagttaactggctgagaggaaggcaagcaagcgaggactgatgggcccttggcactgtgagaacagtggaggaggagggagcagggttcataaggaggagcacaaacagaaagttcagtggccccaataaaaataacaccagaatcttccagatactttctccataaggcgaaaag

SEQ ID NO: 339986 - DNA, 112 bp, Homo sapiens
gaccagtgaccctgagccagtcctcattgctatgttcagaagagacaaaggcaatgttagcatagtgaatgttgaactgggctgggtgccgtgaaaatgatataaggcagaa

SEQ ID NO: 339987 - DNA, 250 bp, Homo sapiens
cctccataaatagctgtcccactctccatctctccaaccggctctattcttcacagcacttattcccacatggttcttccactagaccataactactagaaagtaactagaatgctgtttttggtttttgtttttgtttctgttttagacatggtctcattctgtcgcccacagcccactgcagcctccaactcctgggctcaaggatcttcctgccacagtctccagagcagctaggactacaggggtg

SEQ ID NO: 339988 - DNA, 921 bp, Homo sapiens
ttgtaattgtaaaagtaatgtgaaggtaatatttaatgttttctcaaaagctagtgcccataaggtaacattttagtcatgaattttttgctggtgagacaggacccatctcatcccttccaacctaatcccttcttaaactacatcaggctgcgtttccttgggttcttcacctgcactcctctctaactcattttcttccctctttcaggttacctcatccttccctaccttgtctgcctagtaagctcctaatgatccttcagatgcctcctcctctgtagcattctcaatgctctgcacctccaaaattaaccgttacttcactgtgttcccattgcacagaagttcttaactagacgtcacatcagaatcacctaggacacttttttttaatagacagaaacaggaccctatccagaattgtcaggagtgaagtacatacaaacaaatgatttttaaaaaaatgttctcgttactactcggctacctcttctagttaagggcattgccatggggcttcagcctttgagataattacttcattgtcctcttgtatcagactgttgctgatgcaaagtctgatgtcaatataagtctcattgctttgtagttaatctgtttctgataggttttagagtcttctctttgtctgtaatgatctgtagtttcagtgtgatgtggttaggtatggtttttgttttgtgtgtgtttccggttggctctttcaatctcacaatctatgtgttccttcagttctgggacattctcagtcattgctctttcacatactgctttccctttccttccttctggaactcgtgttaggcaattggagcatctgagtccgtcttccatgtctctttaactttttctttggtacttttcatttctttgtactacattttaggtaactcctca

SEQ ID NO: 339989 - DNA, 162 bp, Homo sapiens
agtttgagaagcactgacccagcaaatgctttcatcactgtgtcttaataagagccagtgtccacgttggccatgttctaattacatgttggcactcagggctgccatcaccccagtcattcaacaagcatgtatgaagtaacctagggccatcaccttgag

SEQ ID NO: 339990 - DNA, 158 bp, Homo sapiens
caatctactgatgagctgtccaccaataagatgtggtctcatttgacatttacaaccttttataatcctgttgtaatgaataattgcttccatattgcctttttttaaaagttctttgaaattaactgaagatcccttttttccctgtccttcgctaa

SEQ ID NO: 339991 - DNA, 870 bp, Homo sapiens
ctccatccatgttgctacaaaggacatgatctctttcttttttatggctgcatagtagtccatggtgtatatgtaccgtattttcttcagtctactggtgatgggcatttaggttgatgccatgtctttacgattgtgaatagtgctgcagtgaacatacatgtacatatatctttatggtagaatgatttatattcttttgggtatagacccaatactgggattgttgggtcgaatggtaattctgttttaagttctttgagaaatcgccacactgctttccgcggttactgaactaatttacattcccaccagcattgtataagcattcccttttctccacaacctcaccagaaaccagcatctgttatttcttgacttttattaatagccattctgactggtgtgagatgatatctcattgtagttttgatttgggtttctctagtgattagtgatgttgagtattttatatgcttgttggccatgtagcttcttttggctagggacctgtgagtctccctaggtttcttgcacttactaagccttcaacaaatggtagaagagtcaattctcttggtgtttcagaagaaaacaatatcacagcccctctccactggataatactataaatcttaaaatgaattttcattcagagtaataaacacaagccaaagaactttgtataacatccgtcaactttttgtgttatctatttcttttccaaaacattgcctctggttttaaaggtaactgcccacagtgtttcactaataacattttaagcattacaagttcaacactgaaggtcaaatgacaacgaactttcagtgcttccaaaagcaggggcagagggcaactgctgagggg

SEQ ID NO: 339992 - DNA, 564 bp, Homo sapiens
  misc_feature (16)..(16): n is a, c, g, or t
tcagccggcaccttgnaatgggcacagaaattatttgggctatgtggagcaagctgtcttgcataaaaagctatattgggctctagagaaagtgagaatggaaagaatttgagagatacgtgagaccaaaaaaaaaaaagacacaattaagaatgttgaatagaatacaatgacaagaagcctttccaagacagtaaatccaaaaagcctgctaaatagcataagacaggaaaaagataaggaagcaaagggtggctgggaagctttaatccagagctcccgatatacaagagaggcatcaactttctttttaaaactgtttgcatttcctatcaatttctgtgcccatttcaagtaaacaacggaaagtgatctggaacataactttcagtttcctctgcagtttttaagtgctgaactactgatcatcctagagataacccactgaaaagtcttctctaatccagattttacaaaaggaaagtctttttaacatttggtttgataaaatgttttccgaagaaatactttactagcctgttttaatttctgtgcccatttaca

SEQ ID NO: 339993 - DNA, 126 bp, Homo sapiens
cgtgtcctggagtgaagaaaacaaggaagagagtatagtaagacagtccaagagaagacaggacacctgataatgtggggtcttgtaggctcgtgtagcaactgactttttttttttttttttttt

SEQ ID NO: 339994 - DNA, 245 bp, Homo sapiens
tggagatgggttttaccatgttggccaggctgggccttgtttagctttactttctgggttgtgatagtgtaagcttttaatttttatctaaatatagtagtacaacaaattagattatataaatgacaaattttgctaatatctttatataacatatcattaaaagggataggcttcatgagaaaaatcttttttacctagagaaaatattgtaatccaaaaattaagtattagctgtatatttg

SEQ ID NO: 339995 - DNA, 653 bp, Homo sapiens
tctggaagctgaggtgggaggattcctcaggcccagaaagttgagactgcagtgagctgtgatcgggccactgcacttcagcctgggcaacagagtgagatcttgtctttaaaaaaaaaacaaaagaaaaagagcgagaagccaaaggaattagctgtaggtcaggagcaaggaccagctgaagctggctacagagatatctcctaattgagtaattttcatctcatccttagaatcttactgtaagccttccatcaggcctctctggcattcaacccccgtgtgcaggtgtttgaatttgtaaacctttccattcttcaggtttcttacccataagatagggataattacaatgccttccttgtaagtcccttttgagattatatgggagttgcttatgatgtgcctggcacaccataatccctcagtaaatggtaataattcaataaaagagagaggacaggagagttaggatgaaatatttctgttactaattttgaggcttacatacttaagtgcagtggtgccgggcgtggtggctcacccctgtaatcccagcactttgggaggccgaggcgggtggatcacgaggtcaggagttcaagaccagcctggccaagatggtgaaaccctgtctctactaaaaatacaaa

SEQ ID NO: 339996 - DNA, 355 bp, Homo sapiens
tgtctcccaccgtaccttccattctctcttctgtcatggtaatagggtaataatgatagcatcgcagcttcaggtgggccccagttagagacctcatgtgccctagaaagtgcatcttcttcataactggcctttcccaaataacttgattagaatgtccacccatccattcattcatttactcattcactcattcatatatcaaatacgtatggggtgcctgttctgaggcagactcttgggaatctgagataagatagacacacttgctgcccccgtctctcctggcacgatgggggagacctgcctgtacctgtgagacgcctttattcctggtgaatccttctcagctgag

SEQ ID NO: 339997 - DNA, 235 bp, Homo sapiens
aattgtgtgttttcccctcccaaacctgcttttctcaggtcttgggcattttgttaagtggaaactacagtttcccaattgccaggccagtaatcttgagcctcctccttaaccggtctttctgctttccaaccttctactcttcagtatctttatgtagcaatgagctccagttactcttctgctcaaaaccctctcagatgtccttgcaagtggctcatgaggccctacacgt

SEQ ID NO: 339998 - DNA, 220 bp, Homo sapiens
acagcgtaaagagtacaggctttggaatcagacagaactggattataattctagccccatggcataccagccatgtgacctggttcaagttacttactttctctgaacctcaatttccataccacaaaaattggatagtgacacctataaatacatgggctttccgtgaagatgacatatgcaagcctggaacagctggatattcagtgagtgacacagt

SEQ ID NO: 339999 - DNA, 447 bp, Homo sapiens
ttggagctcagagaagttatggcccaagatggaagagcaagtctgtggcagacgaggtccaagaactcgctctcctgatgcctcagttgagaacacgttctacttcactacctggtctcccagctacccaagggcatatgaacaaccagggaattactttgggggataccagcaaggagatttggagatcctggaaattggaaaaaacaaaacaatctgtctaggacggcagagagagctggtctcatccaggacactaattcctgcccttggacactggtactcctggttctcaggcctttgaacttggacccggacttacaccatcagctcccctggttatataccaccagccttcttggttcttcaccttcagacaacagacagtgggacttcttgacctccatttccaattcccaaaataaatcttcttatatctatgcatct

SEQ ID NO: 340000 - DNA, 316 bp, Homo sapiens
cagcatgcaagtgcagagtggttagtgtatgaagtgcaagtcagagggcagaaagaaatgatgctggagaaacagggagttcagattgtgggaaatcttatgtgcaggggcaggagctcagacctagtcttgtggatggtgctgccccattgcaaaggaggcacatgttagtggggcggggtgaaggggataggaaacactagtccagggaagagggagtgaggctctgagtaggaccagaatagtaggatcacgagagcattaaaaaaatatttcagagcagactctcctcatgttggacagtaagtagtaaagg

SEQ ID NO: 340001 - DNA, 235 bp, Homo sapiens
taaattacacgcaagcctaaaaattcagctttttgggaaaaaatgtttcgcagatgtgacccataaacgtccctcctgtatttgtgtatgtatgttagaacaacctaagtttgttggttttctagtgttgcaattttcttagccccttgacctgcattttatagatatatttaaacattggtattcttttcagtcttaacagatttgatggttccaagaatcattggatttttag

SEQ ID NO: 340002 - DNA, 218 bp, Homo sapiens
tcacccaccctctctcggttcctcctaagctgcagaactgcctgccccatgacaaagacccacccgtacaattctatgaatggagcctgttcaccaaccgtagggagatagagtctcacttgggggatgccagttctggcattcttcatagaaaatgggttccaccacgtttcccgagcttttgtttatatttacccaatgtcttttttttttttttt

SEQ ID NO: 340003 - DNA, 650 bp, Homo sapiens
tcaatgggtgtgtgctgggaaggaaggctcactgtagacaaaatgaacaaactgcattttctctgtacattggagttttccagtgaatgaaagtggtgactgtacaacatggaggaagaaggttgtggccagggaacaagatgtacaaaggctgggaagctagaaggaccacagcgagttcaggggtgaagagacactgactagatcctggggcattctctgagcagtttaataagtggggcaagattataaaagaacttgaaagtgaggcagaaaaagagagaacttggtagactgggcaatgagaagccatcaagattctttttcgagacagggtctcgctctgtcacccaagctggagtgtagtggcgcaatcatggctcactgcagcctcaacctcccaagctcaagtaatcctcccacatcaagcctcccgagtagctggaaccacaggtgcacaccaccacgcccggctaatttttgtattttttgtagagatggggtttcgccatgttgcccaggctgttctcaaactcctgacctcaggtgatccgcctgcctcagcctcccacggtgctggggttacaggcacgagccaccgcgcctggccttcttggtttgttttttaaccagctgtatccattctgatt

SEQ ID NO: 340004 - DNA, 130 bp, Homo sapiens
ttttccatttctcacgcctatagaaacaccaattaaactttggaaaacaattaccacaggaaaataacaaaggcttttctatattgctattgaagaataaagaaggtaggacggaaagaaagaaagaaaa

SEQ ID NO: 340005 - DNA, 1102 bp, Homo sapiens
ggtcgaagttagagaaagggcacctgagagggccagagattagagactggagggggccccagttggagggtgagaaagattggggactggaaggttatgtctggagggggtcccagttggaggaccaggcgctaagaggattggaagggtatacctggagggtggcccagctggaagatcgcaggagtaccaccgacctgagggggacccagtttgactatgagagggtcaggagtcttgaaggaagcccctggaggggggcgcagctgcacgatgaaagggcagggggactgagaactgcagaatggaaggggccacagtcagaagtagagaaggggagggggctggaggtcagaaacttgagggggatccccttggagaagtccctggagttggcccctgagaacggagaccaaaggggaccccagtgggaagatgagaggaggagagggccagagattgcagaggagaggggagcgagggtgggggtcaaaagaagaaggggcctggaggatatagttctggtccagctgggagacacgagggtcacaggcatggagaatggagatggagggggagcccggtccgtgggccccaagagccgagccggacgagggatggagtggggagacgcaggagggcggtgtctagggctggggaatggagtcgtgtctggcaccccggtggggactgtattggaaggcagcccagaatgggcagcggcgaggagtgaacacctggctgcaggtgacggcctgcaggaaggaggcgaagatggccccagggaaccaaagaggctttgccgacccccgggagaggaggaggtggactgggaacccctggccaaattccgagcagcctgcgggccagagctggcagacctggtggctgaggagttggcctttgctaggcagcatgggacccggggtttccactggaccggagctggctttgcccttaaggacggcacctcggacttcttcctggatggggccctgacacgctgcagctgctcaattcacgccgcccgccgtctgccctgcagacacctctttgcagcgcgcctcctcactggggctgccttattccacatggacctgct

SEQ ID NO: 340006 - DNA, 337 bp, Homo sapiens
ctgccccctgaatgcacactctttctcctctgggagtctctgaagtgggtgatatcctctgcttataatatgcttccccttaaacctctactctcttcctggctagcttcggctcctctgtcacttgtccgctttggcatcacctcctcatggaagacttccttgactccccagattctcaggagcatggcaggtgaggtgctcctcccatgaatggatggagattagggagtgtgtgttattcatgcttaattcaccagtggttagctcagtacctggcacaagttactgtggtggccaaagtaataaccccccaccctgccaactaattgctcat

SEQ ID NO: 340007 - DNA, 268 bp, Homo sapiens
tccagcctgggcgacagagtgagaccctgtgtctctcacacacgcacacacacacacacacacacacacagaaaatgcaatagatgaaatgtttctggctttaactacattattctcttttgtcccttgcccccagagacaatttaaaagtttactgatgtgggaatgggagatgggagtctgggttacatgatgttcctaagggggttagacactggtctgagttcccttgggcttggcctgtggctgacactccttttcccacttt

SEQ ID NO: 340008 - DNA, 484 bp, Homo sapiens
tttactttaatttctgaatgttttgcaaacacattctttgttgacagccctagctggaaatgtttcagctcaccgtgttctgggtaaaaaacattgtcaagtctttttttaacccctcacgttagatggtttttcttggcctgcatttcagtgtccattaaccttagtgtcgtaacatcttggagttagaagcaaccttggaagccacccatccaacttcccacccagtgggagaattgttctgaagcttgcctgatcaccagcctcagatagcttgctttttaagggcattgctgtacagacacagagtaccatagtttaccaattccccataacattttgcatacattttcatgaatcttgcagaatcagaaagcagtgtgagcaattccaagtttgctaattaaattaaaatgagcacagactcttacaaaacaggttttagagtttcaggaggccttacatggtcaaagacatttttcac

SEQ ID NO: 340009 - DNA, 383 bp, Homo sapiens
aaaacagaacaaaacaaaactctgtctcaaacaaaacaaaacaagataacaaaagcaaaacccccttgcataacttcccattgcttgaagataaaattcaccacctttaatggagtctaaagagcctgaataatttaaccttttgtgattccttggcccaatcttgacttaattgccctctgaattttctttgctcttgccactcttggcttctttatttcactggatgtttcatgtatttgcttcttttggagtctttacatatattggtccttcttgaaagaagcttttacaacatttgtcctcttatagctctgctcctcctttcccaagtctctcttctttgtattttggcttaaatgtcactttttcagacagtgagg

SEQ ID NO: 340010 - DNA, 283 bp, Homo sapiens
ggtaggacgtaaccaggtagactagccaggtagactaacccaggcagatgtaacaggtagactacccaggtagacctaacattatgcacagaaacatttattgtgggaatttgtttacacataatatattctgtacataatgtttggcttcctttttttcctaaactatactaaattagaacaaatagcactggactaaaaataaagaatgtgtcaggttcctagttttagtgtaattatttgtttgactttgtaatttagactttttctgtctctatttctt

SEQ ID NO: 340011 - DNA, 300 bp, Homo sapiens
agtatccagaagatatagagaattcctataattcaataaaaagacaaatcaattttttaaatgggcagaggcagaggatttgaataaatatttcttcaaagaagatatataaatggctcatatacacataaaaatgttgaatgtcttaaatcattagggaaatgtccatcaaaaactgcagcgagatactactttacactcactgggatggctatgagaagagacagacaacgacagtgttgacaaagacccggggaaattgaaaccctcaaacactgcagatggaagtgtaaaatggag

SEQ ID NO: 340012 - DNA, 176 bp, Homo sapiens
taaagaagattacttctaagaatggctctgtgattcttataatttgtttcaaggccagaaacttaattgcagatcttctaagcatactcctgttcatgtttttatacttctaaaatgagatttattgttgaacagcaatcagattatgttgggcaaagttttgaaatatacactgt

SEQ ID NO: 340013 - DNA, 261 bp, Homo sapiens
gggccttggctcactgcctggagttttcaggctattgcacaggacgggaaacctcgtcagagcctgacagtcttgcagagttgaggaagaagagattagagtttacagaggccaaaatggccagcatttgtggagcagactaccagagaggcaggagtttcacagtcagaaggaaatctgaagagagaatccccttaagcctttgggtcaataatgatttgcaaaagcatgagaggtaactaccaaaagtggggctgggtg

SEQ ID NO: 340014 - DNA, 280 bp, Homo sapiens
tccttcaagatgaaaagacgtgtgacacaacatgaagtgcaaactgagttcattcacagaatgaatccaaatctaagaaaactacgtatatccaaattctaggaaatctaactacactgaagtcatgttaaccaatgaggtttaataaacaatgatcaatgctataaagctctcaaagtaaactgtgaaatacattctttagcagttttactgatttttatttgaatggagccaattgagtattttcttccagaaactaagttaggagtatattaaatgt

SEQ ID NO: 340015 - DNA, 481 bp, Homo sapiens
gatgggggctggtcccgggaagcaagttaggattagagggctgggacgtttagccccacccctttacccatcacatctgggaaggggagagggaactgaaggccccctgaagttgcaatggccagtggtttaatcagtcatgctcacatgaagcctccataaaaacggggttcagagagcttccaggtagtggaacatgtggaggttcctggagggtggcacacctgaggagggcatggaagctttgtactccttctcctatacctcaccttttcttctgtattatttgtgatatccttaaaataaactgggaaatgtgtttccctgagttctctgagcagctttagcaaattaattgaactgaaagagaggagcatgagaatctcacgttgaacccggttggtcttagaagttctggaggcccagacttaccactggtgtctagggggtgggcggtcttggggactgagcactcaacctg

SEQ ID NO: 340016 - DNA, 646 bp, Homo sapiens
gcagaggatatgatctcattcttttttatggctgcatagtattccatagtatatatatatatgtaccacattttctttatctaggctactgttgatgggtatttagatctttgctgttgtgaatagtgctgcagtgaacatatgcgcgcatgtgtctttatggtagaacaatttatattccttcgggtatttactcagtaatgggattgctgggtcaatggtagttctatttttagtttttcgagcaatccccacactgctttctacaatggttgaactaatttacactcccaccaacagagtatcagcattgccttttctttgcaaccttgccagcatctgttactttttgactttctgataatatccattctgactggtgtgagaccagcttttaaagtggtagggaatgttagtgggagaatgaccccgtagggtaagctcatgtgctcagattagaagacctcacctgtcacaaagaggtgtaaagcaaggcctgccaaactatcaagggaggctttgagcagttgtgaagtttgtgtgactctaaggtgactagaactagtaaaaaaaaaaagaaaaaaacccagaaccttcacacataagtgagtaatatctcaagtcattctatttatgtattctgtat

SEQ ID NO: 340017 - DNA, 418 bp, Homo sapiens
cacaaagaggtgtaaagcaaggcctgccaaactatcaagggaggctttgagcagttgtgaagtttgtgtgactctaaggtgactagaactagtaaaaaaaaaaagaaaaaaacccagaaccttcacacataagtgagtaatatctcaagtcattctatttatgtattctgtatttaccgacaaacaggtggtgggagtggagggggtcttgtgcttagcctgggattacaaagagcatggagacccacccattctttgtccgagggaagtccagcctagctccaccacccttgcttaaaacacttttggctctcccttagaaattgccctcaggagctcagagaaaattgatctaatttgtctcagtattgacctctggggtccccttctcttcatgaataaagggaagagcaggtgg

SEQ ID NO: 340018 - DNA, 380 bp, Homo sapiens
taatcacatgtttttatcctttaagccatttttcatcatcctaccccactcgctcttgcttccagtgctttttctaccataagatcatggcaattatcaaaagactgaacagttctgccaccttagtcacagtctccaattgtcttaccacgtttaatatcatgtccagaataattttaaggccatgttttgtactcttgccatcatttctagcatactggaatattaccaatgtcaagtgacaatttaaagcctcttaaaggctgggtgtggtggttcacacctgtaatcccagcactttgggaggccttggcaagtggatcacttgagcctaggagttcaagaccagcctaggcaacatggcaaaaccctgtttctat

SEQ ID NO: 340019 - DNA, 315 bp, Homo sapiens
tgagcacgttactcagaaaaggcactaaggaccgaaccgtgtcgcccaattaatatgtgtcagccctgaccatcacgtggctgtgcttgaagtaaggaagtgttattgttagatgagaacgcaaacgtggggccctgacccaagagggctggttccctaaaagaacagacaccagctgggcgcggtgcctcacacctgtaatcccagcactttgggaggccaatgcgggcagatcacgaggtcagtccaagaccagtctggccaatatggtggaacctcatctctactaaaaatacaaaaattagccaggtgtgg

SEQ ID NO: 340020 - DNA, 200 bp, Homo sapiens
tgatgtaggatgtgatgggtgctagaagaggcacacaggcagactgttacccaagttcagaggagggaggagttacttctagctggaggaatttggaaagacttagtggaggatatagcctctgctatcagctctgaaatgatatatgccaatgacagcagatagaggggaaaaggagaggagagaaggaaatgccaggg

SEQ ID NO: 340021 - DNA, 696 bp, Homo sapiens
tttatcaactcacttaaacctgcaggcagtattatctccattttacagataaggaaactaaagctcagagaggttaagtaacttgaccaaattaacacagtgaaaaaggggcagagctgggatccaatcccaggcaatatggctttatagttcatgttcttaaccactattttatactgcctctgtatttctaaactaaaagttgaaacctaccattggagatctttaaaaataaaagtaggtcattagctctttaagacagtctatgtatgtagcgacatttattaaatactgactgaataaagtacctaagagtatgccaggtactcttctagttgctctcatgtattagctcattaatccccacaacactcctgagaggtaagtattattattttcatccccattttgcagaggagaaaactgaggcatggagagggttagtatccacggtcacagagccaggatgtgacaagactggaacccaattgtctggctctagattctaaataaaagtgaaactactagcttatgaaacaaaatttgacaaacctctcaacttggttattctgacggaagaaattctaggaatagagaaccctcctggagttaccgtcttagttactagagctcagtttgtgagactccatagcttttcagaatattttatattctgaataaaaaaatgcacacaac

SEQ ID NO: 340022 - DNA, 434 bp, Homo sapiens
cgtcttttaaaaactactggcaaattttaaatgtgcagtgcactatataaataggaatgagaagagtctattcatggcaaggtaattagagcatctttggctagaatatctctgagtaaaaatagctagtctcaatgttggagtaaggtaattaagtcctgaagaataatgatgaaaaccttttgctcagataccctttcttcatttaagttcaatgccgtacattcaaataaaatctgtgtaatcaaactagcccattaagtactactgagtgagataaattgtaatacctattctatatccttgcaaaagggaaatgcatgttatctagaaacataacagcttataaattaaaaacattcatttttcttctcttttgtcttatatcaactttttgtatatttatatacataatcacctaactcctacctcct

SEQ ID NO: 340023 - DNA, 258 bp, Homo sapiens
ggctgaggcaggagaatcgcttgaacctgggaggcagaggttacagtgagacaagatcgtgccaccacactttggtgtgggtgacagagcaaggctccctctcaaaaacaaaggggggtgacacatggtacatacttgctaagggttggcggttattatcgtcatcaccatcatgatttgctctcctgagacggacccggtacagcacacagtgtgatgcttagtcactgctatgagcatcatgggtctttcaaggag

SEQ ID NO: 340024 - DNA, 365 bp, Homo sapiens
agctcccctagaagctaggactatagtgacaatggggttttgccatgttgcccaggctggtctcaaactcctgagctcaagcaatctgccctcatcggccttccaaagtgctaggattacaggcgtaagtcactgatcccagccttgcggtgtttttttaatcaagttcatatgctatcatctagaccaactcccatctcttaccattcctttggctttgtaggtacatatgctttaatcactcgctcttgtccacattctccactccttcccctctgcccatcacaaccattctgagtgtttaatgtggttcttttatttctatccattcttgcaaaatgttcattattttgggtgaatgtatc

SEQ ID NO: 340025 - DNA, 577 bp, Homo sapiens
tctctgttttcaggctacccacactttcctcactcagcttagacattccaagccttagaccttgcttggacctttccttagaagaattcacatattacttgtcctttcccggtatggcttgagctcttggtttgaaaaaaggcagcagactctcacctccttacaggagttcatcctaaaatacaaaacatttgcccttctctgttgtttagacaaacttccattgaactagagccctactcattttcccaggactggcttcccttctgtctcttgtctctcaccccaaaaactacatcatgaagaacaaaagctcctgtgtcaaaagacttgcatttcaatttagaacagtcagtttctcacacatcttaacaaaagttaaaaccatgcagttcattctctttatagcaatggcttggagacagccacctaaccacagtgttcctcccataagaagggctctaaacctaactcagttgttttcctatgggcttcaggggtttgtgatgccttccccttagttgttatgcaaaatgtaatgaacatatgcatactcttctatccagaaacccataat

SEQ ID NO: 340026 - DNA, 693 bp, Homo sapiens
cgaaaaacctgatgtgttatcccaggagttggggatggaaggggagaaatcatccgctgaagaccagatgagaatgaaatgggaaagcctacatcaagaatttagtaccaagcagaaactactacagaatgttctggaacaggaacaagagcaagtgctttatagcaggccaaatcgactcttgtctggtgtgccactgtacaaaggggacgtgccaacccaagataaatctgcagttacatctttgctggatggactgaaccaagccttcgaggaggtttcatcccagagtggaggggcaaagaggcagagtatacacttggagcagaagttgtatgatggagtctcagccacctctacttggttggatgacgttgaagaacgtttatttgttgccacagcacttttaccagaagaaacagagacttgtctcttcaaccaagagattcttgccaaagacattaaggaaatgtctgaagaaatggataagaacaaaaacttgttttcccaagcttttccagagaatggtgataatcgagatgttattgaagatactttgggttgtcttttgggcaggttatccttgctagactcagtagtgaatcaacgatgtcatcagatgaaagaaagacttcagcaaatactaaatttccagaatgatctgaaagtgctgtttgcatcacctagctgact

SEQ ID NO: 340027 - DNA, 194 bp, Homo sapiens
gggagcgaagagaggagctcagtttgcaaaggtacagagataggggcttggaaggacttgtggaaggaccaacagtggggtgttgacagaagggaggtgtttagagtttattccctggcctggggtctgccagttgtcctggctggtggtcaggagtgagggcctgccagagcaaagccctgggagaagattcg

SEQ ID NO: 340028 - DNA, 595 bp, Homo sapiens
ggtcggatgattctccaccagctccgacccgacaggggccagtggagctggaaaccctagacctcagtcccggctctgacacctgccagctgttgcctcgggaaagtcactttgccctctgagcctcggtttcctcgtctgtaagatgaggatagtaaagccttgtgttgcctcattcttgggattgggcaagaacccagcaagagagtggaaaaccaggggtttgaaagcggcattgcgggtcctcgtgaggggtcactgggatgagaggctttgcggggtagggctctgtgcaggctttggtgggagacaaggtccaaaacccacctctttcccctccgttgtgtgtctttgagtgagtcagtgagtctctctgagcctcacttttcttcctttctttttttttgactgacccaaattagatctttattgtatttttccacatatctatcattcccaaaagatcagtcagctcgatccttaatttttcttactatgagatgtccctaatacacagtctttgtataaattatccattttaagtatatagtgaattccagatgtgatcacaactgcatttctttctttttttttt

SEQ ID NO: 340029 - DNA, 449 bp, Homo sapiens
ttggtgtacaaatatcttttcaagaccctgctttccattcttttgggtacataactagaagcagaattgctggatcataaggtaattttattttcaaaatgtttgaggaatcatcatcctgtcattggtaacaactgcatcattttcctttcccaccaacggtgcacaaagattccagtgtttcctcatcagcacttgtgatttctctgtttgtttttttgttgtttgttttttgttttgttttgttttttacagcagccatcctaattggtataactcattggcttttaatatgaggatatgaaaatactacaaataataataataatggcaaacatttacatagcacttactatgtgccaggcagtgttctaagaatttaaatattaatttaatcctccccacaacccagagaggtaagtgtactattattatcatccccactttac

SEQ ID NO: 340030 - DNA, 340 bp, Homo sapiens
ttgttgatttttaattttcaaaagtaacaatagttaaatggttaaaataaagaagtatttgggaaatgttacaaaaaatgactgattagtttgtaggcaagatggcagaacgatgaataaattaataggaagcactaatgagagacagaatagcacagtggctaagagctgtagagttagtcacacctgggttacatcccagctcttgctgctttctagtttaaattatagttaactggctgggcacagtggctcacgcctgtaatcctagcactttgggaggccaaggcaggaggatcatgaggtcaggagtttgagaccagcctgaccaacatggtga

SEQ ID NO: 340031 - DNA, 330 bp, Homo sapiens
cctgggcaacaaagggagacctgtctctacaaaaaaatttaaaaattatccaggtgtggtggcatgtgcctgtagtcttgtgcaatcccatttacaatagccatatgcacacacacaaaatacctaggatatatctaaccaaggaggtgaaagatctctacaagaactacaaaacactgttgaaagaaaccatagatgacacaaacaaatggaaagacatttgcagatcctgaggtggatcactgagcccagaaagtcgaggctgcagtgagccatgatctcatctcaccaccgcactgtagcctgggtgacagaatgagactctgcctc

SEQ ID NO: 340032 - DNA, 450 bp, Homo sapiens
gttgacttgcagacatccttaaacacgcaaccaaaattcttaagatattaaatgggagacataaccgttaaggaaaatcgaaggagacattgatggactttgtcctctaagatgggcatgggcgtctttctaggcatctccctgtgatctcaccactttctaacttacttttcacttctcacttcctggctgcccccaccattgctgggaaattaagcatgttgaagtaaacaattctttgccaccacatatcctggaacctgctacgtgtagaagtggccacatgagaggtagtgtgactgcaaatctaaacctgtgagttgaaagaaactgcccaaattgcagcccctctgaaacttggaacatgcaggagcttctcccaacagagacgccagactcaccgtcctatctcagtcccatctgctccagggagggctgctcaacactctg

SEQ ID NO: 340033 - DNA, 318 bp, Homo sapiens
gtgataaaaatattctaaacttaggtcatgatataggttgcatagctctctggatatgctaaaaaccaaaatattgtagctttaaaaatgtccatttttcacaaaaggtctgatatccacaatctacaaggaatttaaaataaacaagcaaaaagcaaataaccacattaaaaagtggacaaagaatatgaacagacatgtctcaaaagaagacatacaagcagccaacaaacatatgaaaaaatgctgaacatcactcatcatcagggaaatgcaaatcaaaaccacaatgacataccgtctcatgcacaatgagat

SEQ ID NO: 340034 - DNA, 426 bp, Homo sapiens
catttccaagacaaaggggattcaagaccctcaactaaaatatactgaaggtggtagcccccagcagtccagtggtgactatagggccacacctaggctggctgaggctggattcaaaccgccctcaggtttattacccacctaacttggaccagttgttgccacatccctgagaggcaggttccttggctatcaactccaacagtccaaaaaacactaaaattacccaacagtcagataaggatgcggagaaatgagaacctctgtgcactgttggtgagaatgtaaaacagcgtagccactatagaaaacggtttggcaattcctcaaaaaattaaatataggattaccctttgacgcagaaactccacttccgcagaaactccaaaagaactgaaagcaaggattcaaacagattattgtcca

SEQ ID NO: 340035 - DNA, 555 bp, Homo sapiens
caacatagggattgtttgcagcaaagtgctttcctagtgatgttgaaagcagacaatgtgttaccaggaaatgatctctcattagatctcctttagatccaatgaaaaacatggtgtgctagcagacatatcaaacattaaaggcacagctgagatctgccattgctgaactccccatatatcaatttgttcaaagatgcaggttaaagggtaatggagacaagcattctgggaaaggattgagcaagagcctctgctgtcagctggactcttgaacccttctgtttgcttctgagaagtctattagagctgcaggcacaactttctaacaaagaaagctgactctcgaagtggactgggcttcctcacacagaaacgaacattttaccttaacatagcttagcagctaagaggatgatctttggagtcagagtgcctgaatttgtagccctgctccaccattcattagttccgtgaacttaagacctctctgtgcctcactttccttactgtaaaatgcgcccaataatagcaccttctttatagagtgtgaga

SEQ ID NO: 340036 - DNA, 188 bp, Homo sapiens
agagactggggagggggctagatagagttaggctgcagagtgtaagagccctacaggagggctccttgcactggaatagaactggctactggctctggagcctcctaggtgactgctgcgtggagaaggaggggcgggtccagccatcagactgggactccccagaccctgggcacaagtgactggag

SEQ ID NO: 340037 - DNA, 588 bp, Homo sapiens
tttttctttttttttttttctgaggagtttcactgttgctgcccaggctgcagcgcagtgctgggatctcggttcactgcatcctccaccccgccagttcaagtgattctcctgccttagcctcctgagtagctgggattacaggcacccacccaccaccatacccggccaattttttgtgttcttagtacacatggggtttcaccatgttggccaggatggtctcgaacttcagacctcaggtgatccgcccaccttggcctcccaaagtgctgggattacaggcatgagccaccgcacccagccagttaatttttctattaactaagacctaattaagattgaggcagaagaaatgggtccttgggatttgaaaattactattcaatttggaagtttaatttgcaacatagattgtctgttattaaattactagatataatatcacaaaggtggaaagaaaggttgcttagttaaagatctaagttactagtcatggtgtcagatatagagaatgattgaaggttatcagagtcacacaccagatgagtaaattgttgttttcaaggaagaggttacataaaggta

SEQ ID NO: 340038 - DNA, 532 bp, Homo sapiens
aatacagtattttgtgaatatataaagtagtactgaacaaacgccaagtcataaaagagtttgatatagtgtatgaatcaatgacccatcttttgcattttggctgtgatatttcagatgtcaccatctcaaccagcccctagtgaagagattatgcgccctttgaactcatctttgaggatcagcctaatatctgggtataggctaataccaagaagtcatttcaatacagttattgttaactgattttgtaaaatcaattgaagattaaggaactttgtgcctgacttttactatatcagtcaggacatacaatctgcctgtatgtcctgttagtcatataagtattagagtgcatagtttaatgtcttactagtgcacatcatccactgatattctaacagacctagtgctattatttcttgaaaacacataaataaattttgacaccgttgtcagaaccccaggaggttctccaaaaccaacagattagaattacattatccaaccactgtattaacaaaattatagg

SEQ ID NO: 340039 - DNA, 233 bp, Homo sapiens
gaaagggaagggaaggaaaagaagtagcatcagacatcaccaggtcccacagttaggacaatcaatcttggcacctgattttcccatccttacgcctgcattcctgtgagatgcccccatatccctctaataaatgcccttttttcataagttagtatgagcgggtttctagtcctataacaagacactccctgcccaaggacatccatcaaagcacactgccctttctgtgg

SEQ ID NO: 340040 - DNA, 146 bp, Homo sapiens
ttattttacagcattgcaatccccagggtgaaaacacaaataccaaaaatcaataaccaggaagaatacctcacatcttaatacaactcttttgatgtcaggaaaattttgatccaaccttagaaataaatctttaaatttgcatt

SEQ ID NO: 340041 - DNA, 506 bp, Homo sapiens
atcacttgaggccaggagttcaagaccagtgtgggtaatatagcaagattccatctctacaaaaatattttttttaaaaaatgtctcactcaaaatgggaacctgccctactagaagcacaccctgcgaacgggtgaaggcgcaaagatcagaaaattacagacggccaacatgacagcaaagcgttccacagaaaattacagcggccggcgaccgacacaacaacaaaacagcaaaggcttctgcagaaaatgacagcggccaacacggcagcaaaacagcaaaggcttcctttcttacgtttctgttgtgagcatgtttgtttaagggctgctaaccttcacctgccacccaaatgatgatgctgacgtcacagcccgtgggcccggatgtggcctgcggacatgtccatattcttggtaactctgttcccaatgtttggttttcagacaacagcccagtaaggctcccaggcaggccccaatgccgctggcctacagcacatg

SEQ ID NO: 340042 - DNA, 616 bp, Homo sapiens
tcggtacccgctgtggacgctgcctcccgccatcgagtcggtcttgctcctcgagggcgaggagatccccattcacaaggacaccaaggtacccaatgccagtttattcaccatcaacaaagaaggccacaccctggggtacatcatttaatcaagtgcactgcttccccttcgccttctgccgtgattgtcagtttcactgaggcactcccctgccctactagaagcacaccctgcgaacgggtgaaggcgcaaagatcagaaaattacagacggccaacatgacagcaaagcgttccacagaaaattacagcggccggcgaccgacacaacaacaaaacagcaaaggcttctgcagaaaatgacagcggccaacacggcagcaaaacagcaaaggcttcctttcttacgtttctgttgtgagcatgtttgtttaagggctgctaaccttcacctgccacccaaatgatgatgctgacgtcacagcccgtgggcccggatgtggcctgcggacatgtccatattcttggtaactctgttcccaatgtttggttttcagacaacagcccagtaaggctcccaggcaggccccaatgccgctggcctacagcacatg

SEQ ID NO: 340043 - DNA, 203 bp, Homo sapiens
gcatctagatgggaaaggaatgtcaatattagcagacaacatgaccgtccatgtggaaaatttgatggaatgtacagaaaactgactagaactaacaagtatgttgagtgaggttgcaggacacaaggtcaatacacaaataacagttgtatttctatataccagcaacaaactattggaaattaaaattttttttttttcgt

SEQ ID NO: 340044 - DNA, 205 bp, Homo sapiens
ctcctccatctctaaattttaaaaacaaatgtaccaatggaactatttcttcaatcttctccaaacacccgattgttgatataactttacctcaaagaatcatggtacagaagagctggaagggcctaaagttcagcaagctcttaaatgagacaaaaaggttccaagtcattttctctctcttttttttttgttttttgagatg

SEQ ID NO: 340045 - DNA, 271 bp, Homo sapiens
actccatgtggtcacacagtcacacacagtcacacagtcacacacagtcacacacggccacacagtcaaatgtggtcacacagtcacacgtggccacacagtcacacgcagtcacacacagtcacacagtcacatatggccacacagtcacacatggttacacagtcacacacactccacacggtcacacagtcacacacagtcacacagtcacacgtggccacacagtcacacctggtcacacagtcacatatggccacacagccacaca

SEQ ID NO: 340046 - DNA, 338 bp, Homo sapiens
ccaagggctaccaagggaaagagctttgggcagacggagcagcaaacacagaggcctggggtaggtagggacagcgaagaggcctgaccaggtaagcggcagggaggcggcatgatcaggaactgggttatggtaaggcttcctaccctcaaaaccacaggggggagggcaagggcgagaggccccgcagtttgtggtcatggcaatacaatgataataacactcctcattccttatttagatctgtaaacctttcctagtccagtctaatacataaaagaaagaaagaaatgtaaactatgtatttggtgggagcaagactaatctataacctttgg

SEQ ID NO: 340047 - DNA, 481 bp, Homo sapiens
cggccgcctggtaccttccttgccgtctctttcctctgtctgctgctctgtgggacacctgcctggaggcccagctgcccgtcatcagagtgacaggtcttatgacagcctgattggtgactcgggctgggtgtggattctcaccccaggcctctgcctgctttctcagaccctcatctgtcacccccacgctgaacccagctgccacccccagaagcccatcagactgcccccagcacacggaatggatttctgagaaagaagccgaaacagaaggtaattccagccctggttttctgctgggaccagggtgccttctctgcccaggagggactgttccctgcctgctgcatctagtgtcacagtgggagggctcggaggactgtgcccaagtcacaattggggacactgaggcaaagaagattcatgcagtgaggctgggcagaaatgaggttggggtctcttgttcagcacagcttag

SEQ ID NO: 340048 - DNA, 2840 bp, Homo sapiens
cggccgcctggtaccttccttgccgtctctttcctctgtctgctgctctgtgggacacctgcctggaggcccagctgcccgtcatcagagtgacaggtcttatgacagcctgattggtgactcgggctgggtgtggattctcaccccaggcctctgcctgctttctcagaccctcatctgtcacccccacgctgaacccagctgccacccccagaagcccatcagactgcccccagcacacggaatggatttctgagaaagaagccgaaacagaagatgaggcaatgaggctgcgagaggtagagtgattttccctcggtgactcaactgggacgtagcaggtcgggcagtcaagccaggtgaccccatgagctgtcgctgcatctttctcatgaagcacggggaacgggtcggatggcccgtgggagtcagcatgccgcgtggctgggccgcccccttgctcctgctgctgctccagggaggctggggctgccccgacctcgtctgctacaccgattacctccagacggtcatctgcatcctggaaatgtggaacctccaccccagcacgctcacccttacctggcaagaccagtatgaagagctgaaggacgaggccacctcctgcagcctccacaggtcggcccacaatgccacgcatgccacctacacctgccacatggatgtattccacttcatggccgacgacattttcagtgtcaacatcacagaccagtctggcaactactcccaggagtgtggcagctttctcctggctgagagcatcaagccggctccccctttcaacgtgactgtgaccttctcaggacagtataatatctcctggcgctcagattacgaagaccctgccttctacatgctgaagggcaagcttcagtatgagctgcagtacaggaaccggggagacccctgggctgtgagtccgaggagaaagctgatctcagtggactcaagaagtgtctccctcctccccctggagttccgcaaagactcgagctatgagctgcaggtgcgggcagggcccatgcctggctcctcctaccaggggacctggagtgaatggagtgacccggtcatctttcagacccagtcagaggagttaaaggaaggctggaaccctcacctgctgcttctcctcctgcttgtcatagtcttcattcctgccttctggagcctgaagacccatccattgtggaggctatggaagaagatatgggccgtccccagccctgagcggttcttcatgcccctgtacaagggctgcagcggagacttcaagaaatgggtgggtgcacccttcactggctccagcctggagctgggaccctggagcccagaggtgccctccaccctggaggtgtacagctgccacccaccacggagcccggccaagaggctgcagctcacggagctacaagaaccagcagagctggtggagtctgacggtgtgcccaagcccagcttctggccgacagcccagaactcggggggctcagcttacagtgaggagagggatcggccatacggcctggtgtccattgacacagtgactgtgctagatgcagaggggccatgcacctggccctgcagctgtgaggatgacggctacccagccctggacctggatgctggcctggagcccagcccaggcctagaggacccactcttggatgcagggaccacagtcctgtcctgtggctgtgtctcagctggcagccctgggctaggagggcccctgggaagcctcctggacagactaaagccaccccttgcagatggggaggactgggctgggggactgccctggggtggccggtcacctggaggggtctcagagagtgaggcgggctcacccctggccggcctggatatggacacgtttgacagtggctttgtgggctctgactgcagcagccctgtggagtgtgacttcaccagccccggggacgaaggacccccccggagctacctccgccagtgggtggtcattcctccgccactttcgagccctggaccccaggccagctaatgaggctgactggatgtccagagctggccaggccactgggccctgagccagagacaaggtcacctgggctgtgatgtgaagacacctgcagcctttggtctcctggatgggcctttgagcctgatgtttacagtgtctgtgtgtgtgtgtgcatatgtgtgtgtgtgcatatgcatgtgtgtgtgtgtgtgtgtcttaggtgcgcagtggcatgtccacgtgtgtgtgtgattgcacgtgcctgtgggcctgggataatgcccatggtactccatgcattcacctgccctgtgcatgtctggactcacggagctcacccatgtgcacaagtgtgcacagtaaacgtgtttgtggtcaacagatgacaacagccgtcctccctcctagggtcttgtgttgcaagttggtccacagcatctccggggctttgtgggatcagggcattgcctgtgactgaggcggagcccagccctccagcgtctgcctccaggagctgcaagaagtccatattgttccttatcacctgccaacaggaagcgaaaggggatggagtgagcccatggtgacctcgggaatggcaattttttgggcggcccctggacgaaggtctgaatcccgactctgataccttctggctgtgctacctgagccaagtcgcctcccctctctgggctagagtttccttatccagacagtggggaaggcatgacacacctgggggaaattggcgatgtcacccgtgtacggtacgcagcccagagcagaccctcaataaacgtcagcttccttc

SEQ ID NO: 340049 - DNA, 3102 bp, Homo sapiens
cggccgcctggtaccttccttgccgtctctttcctctgtctgctgctctgtgggacacctgcctggaggcccagctgcccgtcatcagagtgacaggtcttatgacagcctgattggtgactcgggctgggtgtggattctcaccccaggcctctgcctgctttctcagaccctcatctgtcacccccacgctgaacccagctgccacccccagaagcccatcagactgcccccagcacacggaatggatttctgagaaagaagccgaaacagaaggcccgtgggagtcagcatgccgcgtggctgggccgcccccttgctcctgctgctgctccagggaggctggggctgccccgacctcgtctgctacaccgattacctccagacggtcatctgcatcctggaaatgtggaacctccaccccagcacgctcacccttacctggcaagaccagtatgaagagctgaaggacgaggccacctcctgcagcctccacaggtcggcccacaatgccacgcatgccacctacacctgccacatggatgtattccacttcatggccgacgacattttcagtgtcaacatcacagaccagtctggcaactactcccaggagtgtggcagctttctcctggctgagagcatcaagccggctccccctttcaacgtgactgtgaccttctcaggacagtataatatctcctggcgctcagattacgaagaccctgccttctacatgctgaagggcaagcttcagtatgagctgcagtacaggaaccggggagacccctgggctgtgagtccgaggagaaagctgatctcagtggactcaagaagtgtctccctcctccccctggagttccgcaaagactcgagctatgagctgcaggtgcgggcagggcccatgcctggctcctcctaccaggggacctggagtgaatggagtgacccggtcatctttcagacccagtcagaggagttaaaggaaggctggaaccctcacctgctgcttctcctcctgcttgtcatagtcttcattcctgccttctggagcctgaagacccatccattgtggaggctatggaagaagatatgggccgtccccagccctgagcggttcttcatgcccctgtacaagggctgcagcggagacttcaagaaatgggtgggtgcacccttcactggctccagcctggagctgggaccctggagcccagaggtgccctccaccctggaggtgtacagctgccacccaccacggagcccggccaagaggctgcagctcacggagctacaagaaccagcagagctggtggagtctgacggtgtgcccaagcccagcttctggccgacagcccagaactcggggggctcagcttacagtgaggagagggatcggccatacggcctggtgtccattgacacagtgactgtgctagatgcagaggggccatgcacctggccctgcagctgtgaggatgacggctacccagccctggacctggatgctggcctggagcccagcccaggcctagaggacccactcttggatgcagggaccacagtcctgtcctgtggctgtgtctcagctggcagccctgggctaggagggcccctgggaagcctcctggacagactaaagccaccccttgcagatggggaggactgggctgggggactgccctggggtggccggtcacctggaggggtctcagagagtgaggcgggctcacccctggccggcctggatatggacacgtttgacagtggctttgtgggctctgactgcagcagccctgtggagtgtgacttcaccagccccggggacgaaggacccccccggagctacctccgccagtgggtggtcattcctccgccactttcgagccctggaccccaggccagctaatgaggctgactggatgtccagagctggccaggccactgggccctgagccagagacaaggtcacctgggctgtgatgtgaagacacctgcagcctttggtctcctggatgggcctttgagcctgatgtttacagtgtctgtgtgtgtgtgtgcatatgtgtgtgtgtgcatatgcatgtgtgtgtgtgtgtgtgtcttaggtgcgcagtggcatgtccacgtgtgtgtgtgattgcacgtgcctgtgggcctgggataatgcccatggtactccatgcattcacctgccctgtgcatgtctggactcacggagctcacccatgtgcacaagtgtgcacagtaaacgtgtttgtggtcaacagatgacaacagccgtcctccctcctagggtcttgtgttgcaagttggtccacagcatctccggggctttgtgggatcagggcattgcctgtgactgaggcggagcccagccctccagcgtctgcctccaggagctgcaagaagtccatattgttccttatcacctgccaacaggaagcgaaaggggatggagtgagcccatggtgacctcgggaatggcaattttttgggcggcccctggacgaaggtctgaatcccgactctgataccttctggctgtgctacctgagccaagtcgcctcccctctctgggctagagtttccttatccagacagtggggaaggcatgacacacctgggggaaattggcgatgtcacccgtgtacggtacgcagcccagagcagaccctcaataaacgtcagcttccttccttctgcggccagagccgaggcgggcgggggtgagaacatcaatcgtcagcgacagcctgggcacccgcggggccgtcccgcctgcagagggccactcgggggggtttccaggcttaaaatcagtccgtttcgtctcttggaaacagctccccaccaaccaagatttctttttctaacttctgctactaagtttttaaaaattccctttatgcacccaagagatatttattaaacaccaattacgtagcaggccatggctcatgggacccaccccccgtggcactcatggagggggctgcaggttggaactatgcagtgtgctccggccacacatcctgctgggccccctaccctgccccaattcaatcctgccaataaatcctgtcttatttgttcatcctg

SEQ ID NO: 340050 - DNA, 667 bp, Homo sapiens
cggccgcctggtaccttccttgccgtctctttcctctgtctgctgctctgtgggacacctgcctggaggcccagctgcccgtcatcagagtgacaggtcttatgacagcctgattggtgactcgggctgggtgtggattctcaccccaggcctctgcctgctttctcagaccctcatctgtcacccccacgctgaacccagctgccacccccagaagcccatcagactgcccccagcacacggaatggatttctgagaaagaagccgaaacagaagatgaggcaatgaggctgcgagaggtagagtgattttccctcggtgactcaactgggacgtagcaggtcgggcagtcaagccaggtgaccccatgagctgtcgctgcatctttctcatgaagcacggggaacgggtcggatggtaagaggccaacccagttccctgtgcatgtggaggagaggagggtggggaggtcagtggaggctgagccttgaaggatgggaaaggaagaacattcctggtggaggagccctggggagcgggaacttaggacttgccgcaggaatgacgtctctgctcagtgaaggcagaagaccaggtgcgggacattcaaagccaggaggctgctgcgaggaggacatctgtgattccctggggggagagtggggct

SEQ ID NO: 340051 - DNA, 3178 bp, Homo sapiens
cggccgcctggtaccttccttgccgtctctttcctctgtctgctgctctgtgggacacctgcctggaggcccagctgcccgtcatcagagtgacaggtcttatgacagcctgattggtgactcgggctgggtgtggattctcaccccaggcctctgcctgctttctcagaccctcatctgtcacccccacgctgaacccagctgccacccccagaagcccatcagactgcccccagcacacggaatggatttctgagaaagaagccgaaacagaaggcccgtgggagtcagcatgccgcgtggctgggccgcccccttgctcctgctgctgctccagggaggctggggctgccccgacctcgtctgctacaccgattacctccagacggtcatctgcatcctggaaatgtggaacctccaccccagcacgctcacccttacctggcaagaccagtatgaagagctgaaggacgaggccacctcctgcagcctccacaggtcggcccacaatgccacgcatgccacctacacctgccacatggatgtattccacttcatggccgacgacattttcagtgtcaacatcacagaccagtctggcaactactcccaggagtgtggcagctttctcctggctgagagcatcaagccggctccccctttcaacgtgactgtgaccttctcaggacagtataatatctcctggcgctcagattacgaagaccctgccttctacatgctgaagggcaagcttcagtatgagctgcagtacaggaaccggggagacccctgggctgtgagtccgaggagaaagctgatctcagtggactcaagaagtgtctccctcctccccctggagttccgcaaagactcgagctatgagctgcaggtgcgggcagggcccatgcctggctcctcctaccaggggacctggagtgaatggagtgacccggtcatctttcagacccagtcagaggagttaaaggaaggctggaaccctcacctgctgcttctcctcctgcttgtcatagtcttcattcctgccttctggagcctgaagacccatccattgtggaggctatggaagaagatatgggccgtccccagccctgagcggttcttcatgcccctgtacaagggctgcagcggagacttcaagaaatgggtgggtgcacccttcactggctccagcctggagctgggaccctggagcccagaggtgccctccaccctggaggtgtacagctgccacccaccacggagcccggccaagaggctgcagctcacggagctacaagaaccagcagagctggtggagtctgacggtgtgcccaagcccagcttctggccgacagcccagaactcggggggctcagcttacagtgaggagagggatcggccatacggcctggtgtccattgacacagtgactgtgctagatgcagaggggccatgcacctggccctgcagctgtgaggatgacggctacccagccctggacctggatgctggcctggagcccagcccaggcctagaggacccactcttggatgcagggaccacagtcctgtcctgtggctgtgtctcagctggcagccctgggctaggagggcccctgggaagcctcctggacagactaaagccaccccttgcagatggggaggactgggctgggggactgccctggggtggccggtcacctggaggggtctcagagagtgaggcgggctcacccctggccggcctggatatggacacgtttgacagtggctttgtgggctctgactgcagcagccctgtggagtgtgacttcaccagccccggggacgaaggacccccccggagctacctccgccagtgggtggtcattcctccgccactttcgagccctggaccccaggccagctaatgaggctgactggatgtccagagctggccaggccactgggccctgagccagagacaaggtcacctgggctgtgatgtgaagacacctgcagcctttggtctcctggatgggcctttgagcctgatgtttacagtgtctgtgtgtgtgtgtgcatatgtgtgtgtgtgcatatgcatgtgtgtgtgtgtgtgtgtcttaggtgcgcagtggcatgtccacgtgtgtgtgtgattgcacgtgcctgtgggcctgggataatgcccatggtactccatgcattcacctgccctgtgcatgtctggactcacggagctcacccatgtgcacaagtgtgcacagtaaacgtgtttgtggtcaacagatgacaacagccgtcctccctcctagggtcttgtgttgcaagttggtccacagcatctccggggctttgtgggatcagggcattgcctgtgactgaggcggagcccagccctccagcgtctgcctccaggagctgcaagaagtccatattgttccttatcacctgccaacaggaagcgaaaggggatggagtgagcccatggtgacctcgggaatggcaattttttgggcggcccctggacgaaggtctgaatcccgactctgataccttctggctgtgctacctgagccaagtcgcctcccctctctgggctagagtttccttatccagacagtggggaaggcatgacacacctgggggaaattggcgatgtcacccgtgtacggtacgcagcccagagcagaccctcaataaacgtcagcttccttccttctgcggccagagccgaggcgggcgggggtgagaacatcaatcgtcagcgacagcctgggcacccgcggggccgtcccgcctgcagagggccactcgggggggtttccaggcttaaaatcagtccgtttcgtctcttggaaacagctccccaccaaccaagatttctttttctaacttctgctactaagtttttaaaaattccctttatgcacccaagagatatttattaaacaccaattacgtagcaggccatggctcatgggacccaccccccgtggcactcatggagggggctgcaggttggaactatgcagtgtgctccggccacacatcctgctgggccccctaccctgccccaattcaatcctgccaataaatcctgtcttatttgttcatcctggagaattgaagggaggtcaagttgtttgtcaatgatttgtcagagaacctgttgaaatgtgaattaagaagctaag

SEQ ID NO: 340052 - DNA, 3640 bp, Homo sapiens
gcaggcagaagcagcaggtaccccctccacatccctagggctctgtgatgtaggcagaggcccgtgggagtcagcatgccgcgtggctgggccgcccccttgctcctgctgctgctccagggaggctggggctgccccgacctcgtctgctacaccgattacctccagacggtcatctgcatcctggaaatgtggaacctccaccccagcacgctcacccttacctggcaagaccagtatgaagagctgaaggacgaggccacctcctgcagcctccacaggtcggcccacaatgccacgcatgccacctacacctgccacatggatgtattccacttcatggccgacgacattttcagtgtcaacatcacagaccagtctggcaactactcccaggagtgtggcagctttctcctggctgagagcatcaagccggctccccctttcaacgtgactgtgaccttctcaggacagtataatatctcctggcgctcagattacgaagaccctgccttctacatgctgaagggcaagcttcagtatgagctgcagtacaggaaccggggagacccctgggctgtgagtccgaggagaaagctgatctcagtggactcaagaagtgtctccctcctccccctggagttccgcaaagactcgagctatgagctgcaggtgcgggcagggcccatgcctggctcctcctaccaggggacctggagtgaatggagtgacccggtcatctttcagacccagtcagaggagttaaaggaaggctggaaccctcacctgctgcttctcctcctgcttgtcatagtcttcattcctgccttctggagcctgaagacccatccattgtggaggctatggaagaagatatgggccgtccccagccctgagcggttcttcatgcccctgtacaagggctgcagcggagacttcaagaaatgggtgggtgcacccttcactggctccagcctggagctgggaccctggagcccagaggtgccctccaccctggaggtgtacagctgccacccaccacggagcccggccaagaggctgcagctcacggagctacaagaaccagcagagctggtggagtctgacggtgtgcccaagcccagcttctggccgacagcccagaactcggggggctcagcttacagtgaggagagggatcggccatacggcctggtgtccattgacacagtgactgtgctagatgcagaggggccatgcacctggccctgcagctgtgaggatgacggctacccagccctggacctggatgctggcctggagcccagcccaggcctagaggacccactcttggatgcagggaccacagtcctgtcctgtggctgtgtctcagctggcagccctgggctaggagggcccctgggaagcctcctggacagactaaagccaccccttgcagatggggaggactgggctgggggactgccctggggtggccggtcacctggaggggtctcagagagtgaggcgggctcacccctggccggcctggatatggacacgtttgacagtggctttgtgggctctgactgcagcagccctgtggagtgtgacttcaccagccccggggacgaaggacccccccggagctacctccgccagtgggtggtcattcctccgccactttcgagccctggaccccaggccagctaatgaggctgactggatgtccagagctggccaggccactgggccctgagccagagacaaggtcacctgggctgtgatgtgaagacacctgcagcctttggtctcctggatgggcctttgagcctgatgtttacagtgtctgtgtgtgtgtgtgcatatgtgtgtgtgtgcatatgcatgtgtgtgtgtgtgtgtgtcttaggtgcgcagtggcatgtccacgtgtgtgtgtgattgcacgtgcctgtgggcctgggataatgcccatggtactccatgcattcacctgccctgtgcatgtctggactcacggagctcacccatgtgcacaagtgtgcacagtaaacgtgtttgtggtcaacagatgacaacagccgtcctccctcctagggtcttgtgttgcaagttggtccacagcatctccggggctttgtgggatcagggcattgcctgtgactgaggcggagcccagccctccagcgtctgcctccaggagctgcaagaagtccatattgttccttatcacctgccaacaggaagcgaaaggggatggagtgagcccatggtgacctcgggaatggcaattttttgggcggcccctggacgaaggtctgaatcccgactctgataccttctggctgtgctacctgagccaagtcgcctcccctctctgggctagagtttccttatccagacagtggggaaggcatgacacacctgggggaaattggcgatgtcacccgtgtacggtacgcagcccagagcagaccctcaataaacgtcagcttccttccttctgcggccagagccgaggcgggcgggggtgagaacatcaatcgtcagcgacagcctgggcacccgcggggccgtcccgcctgcagagggccactcgggggggtttccaggcttaaaatcagtccgtttcgtctcttggaaacagctccccaccaaccaagatttctttttctaacttctgctactaagtttttaaaaattccctttatgcacccaagagatatttattaaacaccaattacgtagcaggccatggctcatgggacccaccccccgtggcactcatggagggggctgcaggttggaactatgcagtgtgctccggccacacatcctgctgggccccctaccctgccccaattcaatcctgccaataaatcctgtcttatttgttcatcctggagaattgaagggaggtcaagttgtttgtcaatgatttgtcagagaacctgttgaaatgtgaattaagaagctaagaaaatatttcttagcaacattttctttttctttttttttttttcttttgagacagagtctcactctcgtcgcccaggctggaatgcagtggtgcgatctcggctctctgcagcctctgtctcccgggttcaagcgatttcctgcgtcagccccagagtagctggaattacaggcacacaccaccacgcctggctaatttttgtatttttagtagagctggggccaccctggcccggccccgtcttcctccccaaaggtcagactgcaggctgcagggctgtgctggaggagccagctctagctcacccatgcttttgcaacagggtcgggttggaagtcagcacaggtcagtcctgcggaaggttccttcgtgactcatctgtgaagtggggtggttgggagaggtagctgagagaatgcatgagagtcctcggtgcctggtttacaatttccatcagtctcccagccccgacctgccaaagtccccgggttttacaagccaggcttactgtgctgtgtctgcggtggaattctctcctctgtcccctcaagtctcctcatgggagtgacctgaaggtggtggcttcctccactttttctcagtataccttgcctttagtttcccacgaggagggaggctggactcttaactctgtacccttgatagtttttattctgg

SEQ ID NO: 340053 - DNA, 2830 bp, Homo sapiens
ccgagatggcaccactgcattccagcctgggcagcagagccagactgtctcaaaagaataaaagtaaaagaaaaataaaccctcaccttaccctcatcctgtgctatgactctctctttttctctctcacagaaatgggtgggtgcacccttcactggctccagcctggagctgggaccctggagcccagaggtgccctccaccctggaggtgtacagctgccacccaccacggagcccggccaagaggctgcagctcacggagctacaagaaccagcagagctggtggagtctgacggtgtgcccaagcccagcttctggccgacagcccagaactcggggggctcagcttacagtgaggagagggatcggccatacggcctggtgtccattgacacagtgactgtgctagatgcagaggggccatgcacctggccctgcagctgtgaggatgacggctacccagccctggacctggatgctggcctggagcccagcccaggcctagaggacccactcttggatgcagggaccacagtcctgtcctgtggctgtgtctcagctggcagccctgggctaggagggcccctgggaagcctcctggacagactaaagccaccccttgcagatggggaggactgggctgggggactgccctggggtggccggtcacctggaggggtctcagagagtgaggcgggctcacccctggccggcctggatatggacacgtttgacagtggctttgtgggctctgactgcagcagccctgtggagtgtgacttcaccagccccggggacgaaggacccccccggagctacctccgccagtgggtggtcattcctccgccactttcgagccctggaccccaggccagctaatgaggctgactggatgtccagagctggccaggccactgggccctgagccagagacaaggtcacctgggctgtgatgtgaagacacctgcagcctttggtctcctggatgggcctttgagcctgatgtttacagtgtctgtgtgtgtgtgtgcatatgtgtgtgtgtgcatatgcatgtgtgtgtgtgtgtgtgtcttaggtgcgcagtggcatgtccacgtgtgtgtgtgattgcacgtgcctgtgggcctgggataatgcccatggtactccatgcattcacctgccctgtgcatgtctggactcacggagctcacccatgtgcacaagtgtgcacagtaaacgtgtttgtggtcaacagatgacaacagccgtcctccctcctagggtcttgtgttgcaagttggtccacagcatctccggggctttgtgggatcagggcattgcctgtgactgaggcggagcccagccctccagcgtctgcctccaggagctgcaagaagtccatattgttccttatcacctgccaacaggaagcgaaaggggatggagtgagcccatggtgacctcgggaatggcaattttttgggcggcccctggacgaaggtctgaatcccgactctgataccttctggctgtgctacctgagccaagtcgcctcccctctctgggctagagtttccttatccagacagtggggaaggcatgacacacctgggggaaattggcgatgtcacccgtgtacggtacgcagcccagagcagaccctcaataaacgtcagcttccttccttctgcggccagagccgaggcgggcgggggtgagaacatcaatcgtcagcgacagcctgggcacccgcggggccgtcccgcctgcagagggccactcgggggggtttccaggcttaaaatcagtccgtttcgtctcttggaaacagctccccaccaaccaagatttctttttctaacttctgctactaagtttttaaaaattccctttatgcacccaagagatatttattaaacaccaattacgtagcaggccatggctcatgggacccaccccccgtggcactcatggagggggctgcaggttggaactatgcagtgtgctccggccacacatcctgctgggccccctaccctgccccaattcaatcctgccaataaatcctgtcttatttgttcatcctggagaattgaagggaggtcaagttgtttgtcaatgatttgtcagagaacctgttgaaatgtgaattaagaagctaagaaaatatttcttagcaacattttctttttctttttttttttttcttttgagacagagtctcactctcgtcgcccaggctggaatgcagtggtgcgatctcggctctctgcagcctctgtctcccgggttcaagcgatttcctgcgtcagccccagagtagctggaattacaggcacacaccaccacgcctggctaatttttgtatttttagtagagctggggccaccctggcccggccccgtcttcctccccaaaggtcagactgcaggctgcagggctgtgctggaggagccagctctagctcacccatgcttttgcaacagggtcgggttggaagtcagcacaggtcagtcctgcggaaggttccttcgtgactcatctgtgaagtggggtggttgggagaggtagctgagagaatgcatgagagtcctcggtgcctggtttacaatttccatcagtctcccagccccgacctgccaaagtccccgggttttacaagccaggcttactgtgctgtgtctgcggtggaattctctcctctgtcccctcaagtctcctcatgggagtgacctgaaggtggtggcttcctccactttttctcagtataccttgcctttagtttcccacgaggagggaggctggactcttaactctgtacccttgatagtttttattctgg

SEQ ID NO: 340054 - DNA, 1663 bp, Homo sapiens
cggccgcctggtaccttccttgccgtctctttcctctgtctgctgctctgtgggacacctgcctggaggcccagctgcccgtcatcagagtgacaggtcttatgacagcctgattggtgactcgggctgggtgtggattctcaccccaggcctctgcctgctttctcagaccctcatctgtcacccccacgctgaacccagctgccacccccagaagcccatcagactgcccccagcacacggaatggatttctgagaaagaagccgaaacagaaggcccgtgggagtcagcatgccgcgtggctgggccgcccccttgctcctgctgctgctccagggaggctggggctgccccgacctcgtctgctacaccgattacctccagacggtcatctgcatcctggaaatgtggaacctccaccccagcacgctcacccttacctggcaagaccagtatgaagagctgaaggacgaggccacctcctgcagcctccacaggtcggcccacaatgccacgcatgccacctacacctgccacatggatgtattccacttcatggccgacgacattttcagtgtcaacatcacagaccagtctggcaactactcccaggagtgtggcagctttctcctggctgagagcatcaagccggctccccctttcaacgtgactgtgaccttctcaggacagtataatatctcctggcgctcagattacgaagaccctgccttctacatgctgaagggcaagcttcagtatgagctgcagtacaggaaccggggagacccctgggctgtgagtccgaggagaaagctgatctcagtggactcaagaagtgtctccctcctccccctggagttccgcaaagactcgagctatgagctgcaggtgcgggcagggcccatgcctggctcctcctaccaggggacctggagtgaatggagtgacccggtcatctttcagacccagtcagaggagttaaaggaaggctggaaccctcacctgctgcttctcctcctgcttgtcatagtcttcattcctgccttctggagcctgaagacccatccattgtggaggctatggaagaagatatgggccgtccccagccctgagcggttcttcatgcccctgtacaagggctgcagcggagacttcaaggtgagctcccgaccctgtgatgagctcctcggagcccctcctcctcttcaggagccccacctcccctcaccccaggctccccagcctcaccccacaggcctagagcatccaggtctcagccaagccacaagccaggcctcagtttccccatgtgcaaagtgtagacagtcattcttgtggtgcagaattggcagaagaattaaacaagatttgaccaggtgtggtggctgacatctgcaatcccagcactttgggaggccaaagcaagtggactgcttgaggccaggagttcaaaaacagcctgggcaacatagggagaccctcaccaccactccgcctccccatctctaccaaaaacttaaaaatcattcaagtgaggtggtgcacgcctgtagtcccagcaactcgggaggctgaggcaggacgatcgttcagaggctgccgtgagctatgatcacaccactgccctccagcctggccaacagacagagactatatcttaaa

SEQ ID NO: 340055 - DNA, 585 bp, Homo sapiens
tgtataccaattctcaagcatgttgtcatgcattttttccttgtttgcctgattattttttgttgaatgccactcattgcacttgaaaacatgtagaaatcatttgaatcctaggaagatgatatctttctcagagaggatttatgtttgcttctgcccacagcctgggactctcacagtaccagataactttataccattttcagtacctgagaggatttgaagctgggccgaaatgcacatttggcctagttttcttgccatttacccttggtccttagatgcagcccaacccacagcacaaggagttgacaaacactcccccagaaatcagtacacacttcatggggctctggacttgacctgtcaccctagctttgcactaggtccaaagcactgctcagccttcgggagcttcttcagtggtcagcaactccccctgccacccagggaaaagtaggttaatcctttccagatgttggcccagtgattcttcactatcttgttagctcgctggctctttaatgctttaaagatgtgtgcgtgcgtgtgtgtgtgtgtgtgtgtgtgtgtgtgtgtgtgtgt

SEQ ID NO: 340056 - DNA, 172 bp, Homo sapiens
ggtgctaggggagcagagaagaggggcatgccatcggtgcacaaggaggtgtcactgacatgaatctgaaagggcgggtaggagttgccttagacaagttggtaagaagagaaatttgtggcaaccccagagaaggagggtacatgtagaaaggaagggtaaagagatgcaa

SEQ ID NO: 340057 - DNA, 503 bp, Homo sapiens
tcataatattctttgtaattataatgaagatgcacagaatactttaattctgctatatatttgagacaacaaagacttaaaaatgactataaatctgtgccaacagattcacaacacaaaatgatataatttgtgacatcaataaaacacatagggagccataaagaggcagggttttatatgtaatagtagttattcttggtaatatctatagtaacaacaaagaaaatacctacagttcttaggattttgagactagtctgggtaacatggaaaaaccctgtctctatgcaaaataacaactgttagccaggagtagtggtgcacatctgtggtcccaggtactcagaaggctgtggtgggaggattgtttgagttgagcctgagaggcagagcttgagtaagcagagattgtgccactgcactccagcctgggtgacagagcaagaccctgtcaaaaaaaaaaaggaaatacctatagtacacacacagaaagacataca

SEQ ID NO: 340058 - DNA, 1572 bp, Homo sapiens
gcccgggtgagcgcggggctgctgggtgacccggctcctgcttgccccgcagccccggccccctgcccaccatgaacgccagcggttctggctacccgcttgcctcgctttacgtgggcgatctgcaccccgacgtgaccgaggccatgctctatgagaagttctctcccgccggccccatcctgtccatccgcgtgtgccgcgatgtagccacccggcgctcgctgggctacgcctacatcaacttccagcagcccgcggacgcggagcgggcactggacacaatgaactttgagatgctcaaaggccagcctattcgcatcatgtggtcccagcgagacccaggacttcgcaagtcaggtgtgggcaacatcttcatcaagaacctggaggactccattgacaacaaggctttatatgataccttctccacctttgggaacatcctctcttgcaaggtggcgtgtgacgagcatggctcccggggtttcggctttgtccattttgagacccatgaggccgcacagcaggccatcaacaccatgaatgggatgctgctgaatgaccgcaaagtctttgtgggtcacttcaagtctcgacgggagcgggaggcggagctgggggcgcgggccctggagttcaccaacatctacgtgaagaacctcccggtggatgtggacgagcaaggcctgcaggacctcttctcccagtttgggaaaatgctgagtgtgaaggtgatgagggacaacagcggccactcgcggtgctttggctttgtcaactttgagaagcatgaggaagcccagaaggccgtggtccatatgaacgggaaggaggtgagcgggcggctgctgtacgcgggccgggcccaaaagcgcgtggagcggcagaatgaactgaagcgcaggtttgagcagatgaagcaggaccggctgaggcgttaccagggtgtgaacttgtatgtgaagaatctggacgactccattgatgacgacaaactgaggaaagagttctctccctatggagtaattaccagtgcgaagaagaggcgacaaaggccgtgacagagatgaacgggcgcatcgtgggcaccaagccactctacgtggcactggcccagcgcaaagaggagcggaaggccatcttgaccaaccagtacatgcagcgcctctccaccatgcggaccctgagcaaccccctcctgggctcctttcagcagccctccagctacttcctgcctgccatgccccaggtgacggcctgcccgcaactcccaccgcagccttcccccctgccccagcaaggcagagcatgaagactagagttctagggaaatggaggtttctaacttgcttctgccgaggactcattaggaagtctttgtttccctctctataaaagggagagatagtgttagtcaaatggcatttcccagtgagagaagctcgtgaatgttgtgctgaaaaagactcttaatgatccagcaagtttgggaaatgctgcgttaagcaagacctacatttttccttccttccttccttcccttccctcccttccctcccttccctccct

SEQ ID NO: 340059 - DNA, 1652 bp, Homo sapiens
tatagacctgacgctgccacagacctttcatgtttcttattctcagttttcccatctgtaaaatgaggggcaggaatccatgctcatgtggctgcagggagttggttgaatgagatcataactggaaggttgggggagcaccatacacactaattctcagcttatccttcctgagcctttgggctcttatctcagttatttgggctcttatcttggcttattgtctgggacccagacaatgactttctctttattggctcccagttaagcacctcgaggggtgggtgatcaaggtaagaaaattccctaaacttgctaatttctctcctcttccttctgtccagcggagcgggcactggacacaatgaactttgagatgctcaaaggccagcctattcgcatcatgtggtcccagcgagacccaggacttcgcaagtcaggtgtgggcaacatcttcatcaagaacctggaggactccattgacaacaaggctttatatgataccttctccacctttgggaacatcctctcttgcaaggtggcgtgtgacgagcatggctcccggggtttcggctttgtccattttgagacccatgaggccgcacagcaggccatcaacaccatgaatgggatgctgctgaatgaccgcaaagtctttgtgggtcacttcaagtctcgacgggagcgggaggcggagctgggggcgcgggccctggagttcaccaacatctacgtgaagaacctcccggtggatgtggacgagcaaggcctgcaggacctcttctcccagtttgggaaaatgctgagtgtgaaggtgatgagggacaacagcggccactcgcggtgctttggctttgtcaactttgagaagcatgaggaagcccagaaggccgtggtccatatgaacgggaaggaggtgagcgggcggctgctgtacgcgggccgggcccaaaagcgcgtggagcggcagaatgaactgaagcgcaggtttgagcagatgaagcaggaccggctgaggcgttaccagggtgtgaacttgtatgtgaagaatctggacgactccattgatgacgacaaactgaggaaagagttctctccctatggagtaattaccagtgcgaagaagaggcgacaaaggccgtgacagagatgaacgggcgcatcgtgggcaccaagccactctacgtggcactggcccagcgcaaagaggagcggaaggccatcttgaccaaccagtacatgcagcgcctctccaccatgcggaccctgagcaaccccctcctgggctcctttcagcagccctccagctacttcctgcctgccatgccccaggtgacggcctgcccgcaactcccaccgcagccttcccccctgccccagcaaggcagagcatgaagactagagttctagggaaatggaggtttctaacttgcttctgccgaggactcattaggaagtctttgtttccctctctataaaagggagagatagtgttagtcaaatggcatttcccagtgagagaagctcgtgaatgttgtgctgaaaaagactcttaatgatccagcaagtttgggaaatgctgcgttaagcaagacctacatttttccttccttccttccttcccttccctcccttccctcccttccctccct

SEQ ID NO: 340060 - DNA, 1470 bp, Homo sapiens
gcccgggtgagcgcggggctgctgggtgacccggctcctgcttgccccgcagccccggccccctgcccaccatgaacgccagcggttctggctacccgcttgcctcgctttacgtgggcgatctgcaccccgacgtgaccgaggccatgctctatgagaagttctctcccgccggccccatcctgtccatccgcgtgtgccgcgatgtagccacccggcgctcgctgggctacgcctacatcaacttccagcagcccgcggacgcggagcgggcactggacacaatgaactttgagatgctcaaaggccagcctattcgcatcatgtggtcccagcgagacccaggacttcgcaagtcaggtgtgggcaacatcttcatcaagaacctggaggactccattgacaacaaggctttatatgataccttctccacctttgggaacatcctctcttgcaaggtggcgtgtgacgagcatggctcccggggtttcggctttgtccattttgagacccatgaggccgcacagcaggccatcaacaccatgaatgggatgctgctgaatgaccgcaaagtctttgtgggtcacttcaagtctcgacgggagcgggaggcggagctgggggcgcgggccctggagttcaccaacatctacgtgaagaacctcccggtggatgtggacgagcaaggcctgcaggacctcttctcccagtttgggaaaatgctgagtgtgaaggtgagcgggcggctgctgtacgcgggccgggcccaaaagcgcgtggagcggcagaatgaactgaagcgcaggtttgagcagatgaagcaggaccggctgaggcgttaccagggtgtgaacttgtatgtgaagaatctggacgactccattgatgacgacaaactgaggaaagagttctctccctatggagtaattaccagtgcgaagaagaggcgacaaaggccgtgacagagatgaacgggcgcatcgtgggcaccaagccactctacgtggcactggcccagcgcaaagaggagcggaaggccatcttgaccaaccagtacatgcagcgcctctccaccatgcggaccctgagcaaccccctcctgggctcctttcagcagccctccagctacttcctgcctgccatgccccaggtgacggcctgcccgcaactcccaccgcagccttcccccctgccccagcaaggcagagcatgaagactagagttctagggaaatggaggtttctaacttgcttctgccgaggactcattaggaagtctttgtttccctctctataaaagggagagatagtgttagtcaaatggcatttcccagtgagagaagctcgtgaatgttgtgctgaaaaagactcttaatgatccagcaagtttgggaaatgctgcgttaagcaagacctacatttttccttccttccttccttcccttccctcccttccctcccttccctccct

SEQ ID NO: 340061 - DNA, 899 bp, Homo sapiens
ttagaggatccatggaccaggcagactcttctcccaggttgggaaaatgctgagtgtgaaggtgatgagggacaacagcggccactcgcggtgctttggctttgtcaactttgagaagcatgaggaagcccagaaggccgtggtccatatgaacgggaaggaggtgagcgggcggctgctgtacgcgggccgggcccaaaagcgcgtggagcggcagaatgaactgaagcgcaggtttgagcagatgaagcaggaccggctgaggcgttaccagggtgtgaacttgtatgtgaagaatctggacgactccattgatgacgacaaactgaggaaagagttctctccctatggagtaattaccagtgcgaagaagaggcgacaaaggccgtgacagagatgaacgggcgcatcgtgggcaccaagccactctacgtggcactggcccagcgcaaagaggagcggaaggccatcttgaccaaccagtacatgcagcgcctctccaccatgcggaccctgagcaaccccctcctgggctcctttcagcagccctccagctacttcctgcctgccatgccccaggtgacggcctgcccgcaactcccaccgcagccttcccccctgccccagcaaggcagagcatgaagactagagttctagggaaatggaggtttctaacttgcttctgccgaggactcattaggaagtctttgtttccctctctataaaagggagagatagtgttagtcaaatggcatttcccagtgagagaagctcgtgaatgttgtgctgaaaaagactcttaatgatccagcaagtttgggaaatgctgcgttaagcaagacctacatttttccttccttccttccttcccttccctcccttccctcccttccctccct

SEQ ID NO: 340062 - DNA, 1073 bp, Homo sapiens
tcgaatcgtaaccgttcgtacgagaatcgctgtcctctccttgcggccgccagtgtggtggaattcccgcaaagtctttgtgggtcacttcaagtctcgacgggagcgggaggcggagctgggggcgcgggccctggagttcaccaacatctacgtgaagaacctcccggtggatgtggacgagcaaggcctgcaggacctcttctcccagtttgggaaaatgctgagtgtgaaggtgatgagggacaacagcggccactcgcggtgctttggctttgtcaactttgagaagcatgaggaagcccagaaggccgtggtccatatgaacgggaaggaggtgagcgggcggctgctgtacgcgggccgggcccaaaagcgcgtggagcggcagaatgaactgaagcgcaggtttgagcagatgaagcaggaccggctgaggcgttaccagggtgtgaacttgtatgtgaagaatctggacgactccattgatgacgacaaactgaggaaagagttctctccctatggagtaattaccagtgcgaagaagaggcgacaaaggccgtgacagagatgaacgggcgcatcgtgggcaccaagccactctacgtggcactggcccagcgcaaagaggagcggaaggccatcttgaccaaccagtacatgcagcgcctctccaccatgcggaccctgagcaaccccctcctgggctcctttcagcagccctccagctacttcctgcctgccatgccccaggtgacggcctgcccgcaactcccaccgcagccttcccccctgccccagcaaggcagagcatgaagactagagttctagggaaatggaggtttctaacttgcttctgccgaggactcattaggaagtctttgtttccctctctataaaagggagagatagtgttagtcaaatggcatttcccagtgagagaagctcgtgaatgttgtgctgaaaaagactcttaatgatccagcaagtttgggaaatgctgcgttaagcaagacctacatttttccttccttccttccttcccttccctcccttccctcccttccctccct

SEQ ID NO: 340063 - DNA, 354 bp, Homo sapiens
ccactgccatcagctaagacagggtactcaggcccagtagcccactgagggggctctgggcagccctgctcaggagactgggccagaggatggcagcacctctgtgcacctgtgaattacttaaacaactgtggtccattccatggactcaagtgtgctctaaagtctaatgttcacattttcagaaaagccctaagatcatctagttaccctctaaagcagctcgtgggactctccttcagcagtggcattgaaaggagattgcactgaaatgtgcaggaatggatttggcaagtatcatcttagcagatgaattaattcatttacaatatagtcactattgctggacactat

SEQ ID NO: 340064 - DNA, 681 bp, Homo sapiens
cgtcttatgatcatgaggagatgatgatgaggaatactctgtaaggtctagtgccctggaactagagctctgtcaagtcacctatgtctctgagatctccttgctctaaagttcttattaagtgagtagtgaataaccttaaggttcacactgccgatgagtggattttctgtcacttgcagccaaaagcatttctactgttaaactcactaaggttcagtagcactgttgtacctcttccctggccccttcatcatgcagactccttgttccagagcaacaaaatcttctgtctccatttttttgctcatttctctcaccatgaatgagttagacattttccaatattttatttgaaggtcatcattgatcactttgaaagtgtgcaacgacaaatagaataactaaatgaatgggttgctattgcaaaaattgcccagtacatcaacataacagaaacattctcaataaatcatcatagaagggaagtactaagaattttgcaatagtgcctagtgcaatagtgtagtgagatagtgtaaagttccccactcaaagtttcctttgcagaatgtgcattaataagcaaggaccagaattagatttaaaataatgatctcattaaacatttatagcccagcagtaaatttttgcaaacaaatgcaattttgcaaaccactc

SEQ ID NO: 340065 - DNA, 185 bp, Homo sapiens
tttcctttaaagaacttaacacctttgttggaattgtggccaaatccacacaccatacacacactcccagtgccctggcttttagctgctgcagatgtttgcagctggtagctgtgctgagcctccgcggaatttccaggcagtggagaggagttgttctcagggtcggctctgagcctcacgcc

SEQ ID NO: 340066 - DNA, 181 bp, Homo sapiens
catttgttgaaacgttaaacacagaaaaagcagcaagtattgagagagatgatgatgagttcagtttgggacaatttaaaaaattttgtagttggggcatcctgataggtgtctgtcagaaagtagaattgataggacacacgtgacagaaggatcggggcaagagaactgaagatttggg

SEQ ID NO: 340067 - DNA, 154 bp, Homo sapiens
atatagtaacattctcaggtcccagagagcatctttataccccttcctagtcacagtccccaaaagtaattgctgttctaccttccgttaccctagagctcacttcatataaattttgcctgaatttcatacacatgccgttttcttcgacgaa

SEQ ID NO: 340068 - DNA, 387 bp, Homo sapiens
agcatccagtctcagaatgtatattaagagggaagaaaacctatatgtcatagatccttgactcagtggatccagtcaccaaactccttcttagcctcaagaccctttgtgttaaacatctacacacacaatccttcccatccagatgatgccagcataagctgtcagggaaggctacacaaatacatttgatttctgaagatcctggaaaaggtaagaagtttatcattaaggaaatggaaagtcaaggcactcccacctgccttttactccacatatgcacgcatgaacagtgacagtgagatcatcttgggacctggaagctgtgtggccctgagcaaggaattcccatcactggttgcactttctggttgggttacaacatgt

SEQ ID NO: 340069 - DNA, 247 bp, Homo sapiens
tgtttagggggttttcctgttgtctttctgttatgatttctaatttgattctatataatcagagaagatactccctctgattttagtttttttaaatttgttgaggtttgttttatggcccaggtaatgttctatcttgctgaacgttccacaggcactcaaaaacaacatgtattctgttgttgggtctacctggaggtagacctaacccaaggttgaggcttactagaagtgtgaaaacgtaagc

SEQ ID NO: 340070 - DNA, 625 bp, Homo sapiens
gttctcaatactaagagattacttccaggtggcaacccaatgtagaaaaatcagcgtgtgctctggaatcagacaaacccagatctgaattctggtttttcttccctcttttgtgtcatcttaagcaagttacttagtttccgtgagcatcagtttcttcatctatgtactacaagtgatggatgcatacttctcaaatgtttagggagcttaaatggaaatatacttggagttcctagcacacagtaggtgcttactcgtgagcttgttccttctgcatttcccagctgtttctggaaagtgtgctgtcatcagcaagtgagtgaataatgataattgtatgctaatatttacccacacaaatacttcgcgcaaaactattcgtataatgttaatcagtgaaaaaggttctcatcatgtattatgagttgaattttctttcccgtctattaacaaactttgaatgggaaagctactgaattgaattttttttctctctctgtctctgctatactgtggggacatgcttttatatttgcaaataaagctcacatatatctttttattacattctcaccgtcccaccagaattttaatgagtaggagcggtgagtggagattgaga

SEQ ID NO: 340071 - DNA, 142 bp, Homo sapiens
cagtcattaacattttgtcatatttgctttatctccctccatacttttaagttaacattaaaattttgaaaaatattttgaacatagtgtgatcatggtggctcatgcctataatcccagtgctttgagaggctcaggcaga

SEQ ID NO: 340072 - DNA, 866 bp, Homo sapiens
tctcaatctcctgacctcgtgatctgcccacctcagcctcccaaaatgctgacattacaaccgtgagccattgcctattttttaattttctaaaaactggaaacaggttctcactatgctgtttcccagtctggtcttgaacttttgggctcaaggaatcccccctgactcctcagcttctgtaagtgctgagattacaggcttgagtcactgggcccagcctagacttttagtccaaagaagataatagggggagggatatgtctgtaggtgaatgagtggatctttcccttctctatcctggcattttctctccttcatctcatcgattaaaattctggtctgtgtatgtgttttgtttttgagttattttgtgttggttcatttgtttctgtttcttttttgtcagtacccctattgaaacacaaattctcttttctctgtcctgtgtgcccaccatattgcctggtaggatgacgtgttagagatgcccacacagacctggggagagattgggctgtgttctttctaacaccgccacagcactgataataacatgcagtcacaaccactccatttacaaagacaaagaggggtgttttctgcctccagacagttttagtaatgtatgctcctaaaatttttctttatctagggcaacactgtccagtagaagtccaacgcaaatcccatctgttattttaaattttctagtgtagtcatgtgttaaaatataaaacaaacaggtggagaaaattttcataatgtagtttatttcagtaattcagtacatccacaatattttcatttcaacatacgattcatacaaaaattgagatattttacatgaatttttcctgctcagt

SEQ ID NO: 340073 - DNA, 918 bp, Homo sapiens
ttcatgtatttccatagttaacagtggaggtctgcacactctgttgtcctggactcaaccttcagccaggtctggtacccacagaggccccctgtgtcttgccactcgaagcacggatgtgctaagtcagccctgagtctaaaccccactctctttgtgttgagttccttgactgtgctcactttggtatccagcttttgttaataactgggtattagttcccatttgtttggcagccttggtggaatcatacctttctttgtcagtccttttcgctcacgtacctgtgagcttgtggttctcactgacaggcacccacttggacaaactcagctatgggtaaccaataaaaccagatgaggttctccttctgtctggattttgtgtcttgagagcttgactttgatccatctggattttgtgtcttgagagcttgactttgatccagagacagcattctctctggctttctgcctgctgggtggcattttttgattggtacacctccagataaaattctgacgtacaaagtgcttcactaaaagattcattgactagagctaatgagcaattcgacaattgtaagaaagaacacactagactcatttttctggaaaacctccccctcatgtcccttggttgtctcctaatatccagctctcttttccttttatgctctgatcactgtccttccacacccacaccgcctccctcatcttcccttggtccagacctcctacttttcccaaacaaccctcctaaaactcctctttcaaaccagttatgtggggaaactgtagacttaagccttgggcctgggctgaattaagaggtataattaaagatttccctaatgcttgtaatctcagcacttagggaggttgaggcaggaggattgcttaagcccgggcgtctgag

SEQ ID NO: 340074 - DNA, 299 bp, Homo sapiens
ttgactggcttcatttctggaagattttagggggccaaggctcacctcaggattcctgggctgcatgctctaactctggggaagcagggtcaagaaaggacgctgtgttctctggtccctcaaggttagaaacatgccgaactggaggggcggatgtgttcctgttacgctgcccacagttttcaaatagggggtggtagccatactatttcattgggttggtggcagtgggatccaggctcacttgctcgtgccagtagcctcaacagcatggaagagtgtacatgtgtcagatgggg

SEQ ID NO: 340075 - DNA, 459 bp, Homo sapiens
tagtactctgaggatcccaagaggctgaatggccattgctatccgctaaaaccatcaggagaacctgacaaagaacttcataacaacacccgaatccagtggtccacagaacagcacagaagcaagcagatgtttgcagcctatgcacacagacatacgcaccaactacccagaaagttttcttgccataaaaattgaacccatcagcctctgtgaggctgaagggtagggtctgaggctatatggatgtgatgaggaaggcagagaccagagaaacggaatacacgtcctcagggatcagagacaaattgagaaacacaaatccatggtgagaggtcagcggagtcagagacccgcatgcagatagagggaggctggtggagaaacacagacacaacgaaacacataacgagagagactagcaaagaggggatcagaaactcacaaagggaagtcaat

SEQ ID NO: 340076 - DNA, 225 bp, Homo sapiens
agatctttgcatggatgtgttcttcatttatcatggtacattcctaggagtggaattgctgtgtcatatgagaagaatatatccaggctgatccatcaatcccagaaggagaacaagaaacacatggagcagagctaagttacccagcctagctcagcctagatcagcatcctgtaacaggcccccagccttgtgggctaaataaacatgtgttgttgtatgtta

SEQ ID NO: 340077 - DNA, 251 bp, Homo sapiens
agatctttgcatggatgtgttcttcatttatcatggtacattcctaggagtggaattgctgtgtcattacctgctcctgctttgccttccaccataaataaaagctccctgaggccaccccggaagtggaaggatgatggtgccatgcttgtattccctgcagaaccgatgatgaagaagtatctactctggaattacttcgtacaaaaaaagaaggtggagaactgtcagagaaatcaaaacaaagacct

SEQ ID NO: 340078 - DNA, 350 bp, Homo sapiens
gaatgaatgagggtagcaccttgggagctgtaattagggtagaatttccattcttctttcatttagccttggaaggggtcccgcaaaggcaggatttcggaagtgatttggttcaaccctcagttggctccctgtttcctactgcatcaaattcagatgtttcattctgatcacctgttatctcactaaccttagctgccacagctctttgtcatggagcctttggttagattctcatctgtgaagtatgttttttgcttttttttttttgctttgtggcacaggactggcaggtggatcgagtgtgggggagtatataaaaatattttgtacacttcagagacctaccc

SEQ ID NO: 340079 - DNA, 164 bp, Homo sapiens
ctcatcccacatgcctgggttctggagtcaacactgggctagtgatggggaaattgttttcaccaggaaatcaggatgagcagctgaagtcttcgaggaaacgcagtgaaaacaggaagcagcttctgtcagaggccagctcctggccgaggagccagggtgga

SEQ ID NO: 340080 - DNA, 532 bp, Homo sapiens
ctatttttgtacagacaaagctaagaaaggcttttacagtttttgagagattgattagggaaaaaaactaaaacccaatccacaaacaacaataatcagttgagaccacagtgtcctgcaaaacctgaaatatttactcactggcccgaggcaggggaagcttgtagacccctgggataaatgaatgaggcaggcaggagttggggtctgtggggagtttggccccagccaaaagagaaaccaaaaaatcctcaggccgaatagagcatacttctgaattgtgtgagccccttgtgccaattgtggcgcttactgtatgttaccacttactctgaaaagagttctgtgaggtcagagataccaaccccaatttactggtggaaaaacagaaatgaaagaacttgactggccaaagtgatgtggttggcaggcagcagagatggctttggcattctgggtgactggatgcccaccttaaatgcatatataagtggttcagtgacatttatctgttcatcacaaagacccaaag

SEQ ID NO: 340081 - DNA, 890 bp, Homo sapiens
tggaatgggaaaatgtagtcctgctttgtgctcagaaggaaaatgaagcagatgagcatgtaacagcatctctgccacaatagtattttccccattttacagatgatacagagaggtcctttctgaacaaaaggcataaaactacttggtagagatcatagaacctaggttaccttagatctgcgtattatgtgctcacgcgtctaaggacacattgaagtaattgaaaggtatttagattgtacatctagtagcattgctttctttcacattgggcattaaatgtcttcatctcttcatgtctgttattaatagactttaaatagattattaattgacttacctcataaggaataatcaactttaaaattttttcagtggtaattgccattttaagtaaagatgacacaatagcattataatatctttatggacatatttatggtcacctgtcttttgaatatacaatattgattaacctttgtttgtatgatttttgttttcaatacatgtgatgggttactgtgggccggccatctatccacataatgtttattcttgtgtgatgaatcggagactttgtttagccatgaaagttgttttttaaccttcccaaaaacttaactcttgtggaaagagttgcaccttcaactggaatacttctaatggaatagaattattttctaactgaggttataattggtacagctgtgaatgctgtactaataatgtaaatagcgagagtaggaatgatttacagaaactgttaacttttactggcaagttaaatctgacatctcagcattaacagttaacctttcattgtactttagactccttggagaatgtgttgaaagctgtggatctatcctgtgcctagaatatatata

SEQ ID NO: 340082 - DNA, 541 bp, Homo sapiens
tggaatgggaaaatgtagtcctgctttgtgctcagaaggaaaatgaagcagatgagcatgtaacagcatctctgccacaatagtattttccccattttacagatgatacagagaggtcctttctgaacaaaaggcataaaactacttggtagagatcatagaacctaggttaccttagatctgcgtattatgtgctcacgcgtctaaggacacattgaagtaattgaaaggtatttagattgtacatctagtagcattgctttctttcacattgggcattaaatgtcttcatctcttcatgtctgttattaatagactttaaatagattattaattgacttacctcataaggaataatcaactttaaaattttttcagtggtaattgccattttaagtaaagatgacacaatagcacgtgatccacgtgccattgtgtgtgtgtgtgtgtgtgtgtgtgtgtgtgtctttaaacggagtctagctctgctgcccaggctggagtgcagtggcacgatcttggctcactgcaacctccgcct

SEQ ID NO: 340083 - DNA, 1011 bp, Homo sapiens
gttgtagtgagccaagatcgcgccactgcactccaacctggcgacagagcgggactccatctcaaagaaagaaaaaaaaagacatgtccctgccttccagaagcttacggtcaagtgaagaggatgagcgttaaataatcacccccctcgccaaaaaaccacaaacacaattacatctgtgaccagtggtatcgagaaagtccagggcacagtagaaggacagcaagatcgccgttctggagctctaacaccatctcttcaagcaaacctgggaggaggtggcggaagagttaatgagaccagcaggcaaagggagggatggggacagcagagggaacagtgagtacacaaggcctaaggaaggagggatgtgcccctgagggtggccagatggcagcctggggccctcacagcgacccagccacagggtttgttccagagctcaaatacctcagatctccaggacaaggatgacaaggccagctgggcagtgtcccaggcccttctcctcaggctttaggcttccccaggagacctccggcaccattcagccttgttgcattgtggcacttggaaacaaagacagcggtcttctttgcttgactgtcaatagaatattgggagagcacaggtctccctgggaccctgcctcgccgctgatggcctgcagccctagacaaattcctcaacctctctgagcctcagtttccccacgtgcaaaatgaggttcttggaaggctgaacaaaatcccacatgtagatgtccaggctgtattgctggagacgccttccatgaattactacgcagataccaccacccatacagagctgtgctgtgctcctccacatcacactgcaaaggaagaaggcagaataacaagatctcaaacagcaatgttccgcctaatgaagtacagactggagattgccagctgcacccaaatccactctctcccccattcttgaatacagactccactttcactcagggcaagtccatcaaccaagagg

SEQ ID NO: 340084 - DNA, 265 bp, Homo sapiens
agaccacctgagcaggcttagtgtgagcaacaaggctgtttattcactagggtacaagtgggctgagtttgagaaaggagtcagtgaagatggtgggattatcattggtcttataggtttgggataggcggtggagttaggagcgactttttttgtgggcaggggatggatgttatgaagtacattctcaagagtggggaggatgttacaaagtacattcacaagggcggggaggatgtcttgtcccaaaggcagggaggaatgt

SEQ ID NO: 340085 - DNA, 600 bp, Homo sapiens
actacaagtgtgtgcactctagtcaggttattctgcagcattactgaaacccattccaagggctcctgtcttactttaggacttaatcatgccccagccaggtacttccacagcctctagcagttcatcctccacccactccatacttccgcaccattgcagagtgtttctaaatatgtctagtcatgccactctctgactttaaaacagaatcaagtggaacccccaaccatggctcataaagcccttctctgcctcacctcaatctactttcacagactcgcctttgcagccaacccacccttgtcactgtgactgtccactttatattcctggttctccaagttcatgatgtcctaacacgccaggctcctttctggcctttatgactctggagatgctaattctagtagctaaaattttctcttttctgaacaatacttctgcctctcaccattttctccatcatcttcttaacaattttacaaactcttgttcaacctttcagattgggttttatcacccaataagaaagtttcactgccccccttccccaattaagaaataatctctcttcggaagtatgtagtcgggtaccga

SEQ ID NO: 340086 - DNA, 155 bp, Homo sapiens
tttttagccttgaggttaccctttttcaccttgccaccagcatcagccttcttggcttcaggtttcttctctttagtatctggcttctcaactttttcacccgccatcttgcaagatgggaaagagctcactatgctatacttctaagctgagga

SEQ ID NO: 340087 - DNA, 314 bp, Homo sapiens
caaattaaagaataaatatactaagataaaagtttccccattatattacagagaaaaccatgttctgagctatggacttttatacctggatgtctaatctgaggccatcaaaagaactcactcatagatcagtttgcctcatttcatggtctgccttggattcccccacacccactgatccaaagtctgtggaatagggaggcaccttccagcaaagaaggcagacatgaaagtgtacattgtgatctctctgttacgaagttgaagaactggccaaactgatgtatgttaataggaatcaaaacaggggctgc

SEQ ID NO: 340088 - DNA, 253 bp, Homo sapiens
tctatcaaattatatgctatctacaggcagaatcttgctctgtcgcccaggccagagtgcagtgtggcatactcacagcttgcaatatcctgaattcctaggctcaagcaatccttccatgtcagcttctaagtattatagctaggactacgggtgcactaccacatgtggctaacttctactttttgtagaggtgaggtctcactatatgcctaggctggtctcaaactcctggcctcaagtgatccttcca

SEQ ID NO: 340089 - DNA, 386 bp, Homo sapiens
tgaaagcttgttaccgtaatgaatggactcacacatatcactgctttgcagtgatagcatcagccaaaagggctgcagaacatgaatcgttaacaagttgaaatatgtcaaagatggctgtgtggtgtgaagaagctgcattagctgcacaggctaagcctaaatgatattccaaatggcagagtgttcacctgaataccatcactgtaatcagtaacaataaaagatagggaaaactgaattattttttaggttgaaatgattttagcatggcagtttgttctcttgccactgtacattgaatcatatacttgatatttattgtgtgcctgtgatgtgccagtaacagtactctaaactaggagtccccagactacagcctgtgg

SEQ ID NO: 340090 - DNA, 238 bp, Homo sapiens
aaacaaaaaacaaaaaacaaaaaaacatggtggactttctgaatctttgtcctgaggttgccacaaactggtggtgtgtgggagccagcttggcttctattgactctgagcctgctgcacgtgtctatccaacttcacattcagtaatgtcatgctggcagcttgaaattcaccatggtgggagcatttacaccataggaattggcaaacagtggagatcagggttttttttcttcat

SEQ ID NO: 340091 - DNA, 578 bp, Homo sapiens
tgagaccctgtctttacagaattttttttttaaatttgcagggtgtggcagtacacacctatagtcccagctactcagctactcaggaggctaaggtgggaagatcacttgagcccagggggtcacggctgcagtgagcaaggatcacaccactgccctccagcctggtgacaacaagcaaccctgtctctaaaaaaaataattttatacaaaccacacacactctcataagcattgactagatcaggaatttttgttaaaaatttaaaaattatatacacacacacacacacacacacacacacacacacacatatatatacacacacacatacattcttccaaaaacaaaccaacaatttgccttgagacttcacatttggaactgataataaacattgacgggttcgtttaagatgctgtgagatgaaaacgccaaagccagaggatgtgatcctctcagagaaaaggctaaataatattaaaaatattttgtagtcttttaatatttcctaaattccagagcagtcatgcagaaatgaacatctaacacaatacactaggtacaggtacacaga

SEQ ID NO: 340092 - DNA, 537 bp, Homo sapiens
ccacagcatgaagaaacctggatgcctgaagcacagctttcctgctgaactgtgataacagtacctatgtgagaatagaccttgattgttctgagtcatggggacctggaatatgctgcagttagcctaccctaatgcaaatgtcaaagtaatcagcttcagttataaatgatctagatctgctagctacatctaatattaaatactaacatcaagctatgaatattctacataagcagcatttaccttatttccatttgcctcaaagtatgtgtagtgaaaacaaatagcaagagttatttttagtgctctacatcacaccaaaaacacagagagagttgatctagtggagtgaagagcttctgcctgtttgcatgctaattcctccttcaggcctcccctcacactggcgtcagtctttcctttaggatattttactcttgtacgtatcccttatatatccccgatttcagagcaagtgtccctgggtaacctctaaaatgtggtggctgggatagcaaggatgaacactcgctg

SEQ ID NO: 340093 - DNA, 332 bp, Homo sapiens
tgagaagccctataatgccaaaggaccatatcctagatgtaaaggaggatcaaccctcaaaagtacagtcatgtgtcacctgacaacatggatacattctgaaagacatcattaggcaacttcatcattgtgtgaacatcacagagtgtgtttacacaaacctagatggtatagcctattgctcctaggctacaaacctgtgtagcatgttaccgtacagaatgctgtaggcagcagcaacacaatggtaagtattcgtgtatctaaacacatctaaacatagaaaaagtacagtaaaaatacgatactataatcttatgggaccacaattc

SEQ ID NO: 340094 - DNA, 1053 bp, Homo sapiens
tgtgtgctgttccgggatgatactgggggtctgtggtgcctgcgtgtgctggggtgtggaggttgtagtgtgtgtgtgttgctggagtgagctgtttgtgtgtttatgtgtgtgtcttgcccgagcgtgcgatatgtgtgcttgtgtcttgcctgtgtgtttctgtcttggctgaggccgtctctgtatctccggggcatgtgtcttttgcccagcgtttgtgatgctgcgcctgctaaatgcaaatgtctgttttctgtccaggtgtctgtgtgagttgtcaggtgtgagtgtgtgtgtgtatgtatgtgtgtggtggggggttgtttcagtctgggtttggcttgtgtgtctggcatcagcgtctgggatttgaggacccaggatctgtggggtctatgcagtgtagacggtgggtgttgctggcagcctctggatggggttgtgtctgagcctgtgtgtgtgtgtgtgtgttgggtctgaggggcttgtcactgtgatcggctggctcatgtgtgtcatgtgggctgcgtgtgtgtagtgtttatgtcagtcacgtgagaccagtgttttctgtgggtgcgctaggtgtgtgtgctgctgggctgtgtgggattagagttagctgtagggtgtgtgtgtgtgtgtgttgctgacagttggtgatgatgtttgagggttgcgtgaggagggtgggttggtgtctggtggtgtgttgaggtctgatggcatgtgtctgtgtgtgcctgatctacgtgtgtcctgagagttggtgacatgtgggtgtgttttgggggtgttgatgtatgtgtgtccgtgggtgtctgttttgtgttgatatgtgagtccagaggtgtgcaggtcttatctctggagtgagtgtgtgtgtgtggagaggggcatgtttgggaactgaggcagtgcctagcttgtgtgtgtgtgtttgtgtttgcaaaggctgcattgtgtttgcatgtgcccctgggcatatcaacagtgggtcagtgtgtgagactttgacagtttggatgtgtggggatggattgtgccagc

SEQ ID NO: 340095 - DNA, 1115 bp, Homo sapiens
gaggtgggggctgagatttctttgtactgaatcttccgtggtggatggctctgacctgagacctcaggtagcagaccacagccacatggtatgtctgcccagcgagcaggcctccaatgacgcggtccgtgaccgtgaggttctgcttcagaaccagggactgatcatgggctgaggtgacggtgaggtcataaaaataaggaccggggggctcaggcctctcccagtggggtttggcgccgtctctgtatctccggggcatgtgtcttttgcccagcgtttgtgatgctgcgcctgctaaatgcaaatgtctgttttctgtccaggtgtctgtgtgagttgtcaggtgtgagtgtgtgtgtgtatgtatgtgtgtggtggggggttgtttcagtctgggtttggcttgtgtgtctggcatcagcgtctgggatttgaggacccaggatctgtggggtctatgcagtgtagacggtgggtgttgctggcagcctctggatggggttgtgtctgagcctgtgtgtgtgtgtgtgtgttgggtctgaggggcttgtcactgtgatcggctggctcatgtgtgtcatgtgggctgcgtgtgtgtagtgtttatgtcagtcacgtgagaccagtgttttctgtgggtgcgctaggtgtgtgtgctgctgggctgtgtgggattagagttagctgtagggtgtgtgtgtgtgtgtgttgctgacagttggtgatgatgtttgagggttgcgtgaggagggtgggttggtgtctggtggtgtgttgaggtctgatggcatgtgtctgtgtgtgcctgatctacgtgtgtcctgagagttggtgacatgtgggtgtgttttgggggtgttgatgtatgtgtgtccgtgggtgtctgttttgtgttgatatgtgagtccagaggtgtgcaggtcttatctctggagtgagtgtgtgtgtgtggagaggggcatgtttgggaactgaggcagtgcctagcttgtgtgtgtgtgtttgtgtttgcaaaggctgcattgtgtttgcatgtgcccctgggcatatcaacagtgggtcagtgtgtgagactttgacagtttggatgtgtggggatggattgtgccagc

SEQ ID NO: 340096 - DNA, 1010 bp, Homo sapiens
gaggtgggggctgagatttctttgtactgaatcttccgtggtggatggctctgacctgagacctcaggtagcagaccacagccacatggtatgtctgcccagcgagcaggcctccaatgacgcggtccgtgaccgtgaggttctgcttcagaaccagggactgatcatgggctgaggtgacggtgaggtcataaaaataaggaccggggggctcaggcctctcccagtggggtttggcgccgtctctgtatctccggggcatgtgtcttttgcccagcgtttgtgatgctgcgcctgctaaatgcaaatgtctgttttctgtccaggtgtctgtgtgagttgtcaggtgtgagtgtgtgtgtgtatgtatgtgtgtggtggggggttgtttcagtctgggtttggcttgtgtgtctggcatcagcgtctgggatttgaggacccaggatctgtggggtctatgcagtgtagacggtgggtgttgctggcagcctctggatggggttgtgtctgagcctgtgtgtgtgtgtgtgtgttgggtctgaggggcttgtcactgtgatcggctggctcatgtgtgtcatgtggggtgtgtgtgtgtgtgtgttgctgacagttggtgatgatgtttgagggttgcgtgaggagggtgggttggtgtctggtggtgtgttgaggtctgatggcatgtgtctgtgtgtgcctgatctacgtgtgtcctgagagttggtgacatgtgggtgtgttttgggggtgttgatgtatgtgtgtccgtgggtgtctgttttgtgttgatatgtgagtccagaggtgtgcaggtcttatctctggagtgagtgtgtgtgtgtggagaggggcatgtttgggaactgaggcagtgcctagcttgtgtgtgtgtgtttgtgtttgcaaaggctgcattgtgtttgcatgtgcccctgggcatatcaacagtgggtcagtgtgtgagactttgacagtttggatgtgtggggatggattgtgccagc

SEQ ID NO: 340097 - DNA, 337 bp, Homo sapiens
tgcctgggtcattcatcagttacatacatcttcaactttaatagctattgccatattgttctccaaagtggttgtaactatttacactaccaccagcagtgtagaaaatgtctctcgttctacattctagccaaaattggaactgtcagacttggtgattttttgcaaatttgataggcatgaaatgttaacttggtggtattaacttgtattttccagattactagtaagaatgataatctttttatgtttattagtcattcatgtttcttcttctacgaactgcttattcaaatcatttttataatgggtgtcttttataaaaaatggtttgaga

SEQ ID NO: 340098 - DNA, 323 bp, Homo sapiens
tggcagtatcaattggctgggaaggaggtgtttatgtacaaacctgtggtcacacattacatatagattgtcataaatcttacatggaatcattacggaatgaccaggttcttcagggcttctcggtggacaaaggagaattcacgtgtccactctgtaggcagtttgctaacagtgttcttccatgttatcctggaagcaatgtggaaaataacccttggcaacgtcctagcaacaaaagcatacaagatctcataaaggaagtggaggagctgcagggacgaccgggagctttcccagtaagcatcagtgtaaggcataaa

SEQ ID NO: 340099 - DNA, 128 bp, Homo sapiens
atacattagaaaatcaaaccatgaaataccatttgacactcattagaagggctaatttgaaaggtcaaatgttgatgaggctgtaaaacaactggaactccagtatgttgctgatgggagtgtaaaat

SEQ ID NO: 340100 - DNA, 174 bp, Homo sapiens
aatcttttacctcccaccatgaagaagaaatcctaacacctgataggtagatctggaggcaacatatttcatagctaggaatactgctccaaccccatatgccaatgccatgaaaggctgccaaggcccagagcaagaaaggattctgcaaaagtgtcaggctgctagagccat

SEQ ID NO: 340101 - DNA, 128 bp, Homo sapiens
taagagaaagacctctcccagaaagtgcgacgtatgctggagtcttcagtggcaaggagaggctttgcaaagcacagagggcagagcagagagacggctctaaaagtgcacaggcttggcagattccc

SEQ ID NO: 340102 - DNA, 565 bp, Homo sapiens
agtctatggatgatcacacatctaactgtgcttactggtaggactgcacacttcttatattttagcatgttttctctctgcgggttcactgcactttttggacataaaaccacaaagaatatgctactccacaaaatgttcactcacatgtttatgtatcgcgttagtgacaatggtaatgatcccttgcataaattactttcatctggcttcctagagctaattagtaccatgaccagtcagttaatggaataaatattaactcaggtttctatatgactttaattcatttatttattctatagatatttactagatatctattgtaggttggttctgtagcattctataggataaaatgttggatgagatcaagtcatcatcctcaagaagcttacatttaaaagagcttcgcacctaataaagccgtttacagggatacttttctctctgctatggttaagacctgctggagttgttaggcagccctggacgtggcctgtgtagaggacgcgtggtgttctccagtctggggggtttatcaccttctcaagaagtctgggca

SEQ ID NO: 340103 - DNA, 741 bp, Homo sapiens
agccaccatggcaattccttaaaaagttaaactaaggtttcccatgtgactcagcagttccacctgttgtgtatgcccaaaagaattgaaaacagatactcaaatacatgtatatgcatattcatagcagctctattcataaaagccaaaaggtggaatttaacagctctattcataaaagccaaaaggtggaaacaatttagatttccatcaggagatgattggatagacaaattatggtgtacgcatacagtggagtattattcagtcataaaaacggtatactaatatgtgctgcataatacggacggaccttaaacatactaagtgaaagaagccagacacaaaagctaacatgttgtttgcttctatttcatgaagtatccaaaataggtaaatccactgagacagaatacagatgagtggtttccagggactggaggggaggggagaatgggaagctgctgaatggatatggggtcgttttgaggtgatgaaaacatgttgcaaatatttagaggtggaggttacacaacattatgaattgttcactttattttttctttttttttgttcgctttaaagtggtcagtttactgtgaattttacctcaaaaaataaaaatgaacagaacttagtgtaggttaaaagcatgcatggtatgaatcagacatggtactgaatactggttctgccatctgttaatcctgcaactttaagtaaattaccttgaactccctg

SEQ ID NO: 340104 - DNA, 484 bp, Homo sapiens
catcaggctggaaccccagtgctgattcctgtccccgatgcctcactcaagcacacgtggggctccttggtgctctgccgctcactcagagctttgaaacatcagagggagcatcttcccttccctgtttcacctttgtggttcctgggcctgtggctgtgacctcccttgcctgggtggagccttggagtttaattctcttacccatgagggagttggggccataagcagagccatgccatgttccactcagcccctctcacaggtccaccctgttccctgctcagaaccagctattttcatcacagagtaaccagtctaagggacaggcctagatagaggatttgctgtgtagaattagtcccagagacactttttttgctaaccaaatcaaaatatcaccacgacttgccctatacaagcaattctttcttgtaaggagatttgatcaatgacattggcctgtgtaatactgttaggtaat

SEQ ID NO: 340105 - DNA, 272 bp, Homo sapiens
ggttaaaaaaaaattgacagcatttataccaccttcttcacttccactcttcttcctttttaaaccattgctagtcattttagaacatatgaaattcagtttattccgggcagaagcaggttcctgcttctgccccaggggctctgtgcctcttcttacaccctaccgagaggggctggtaacaaggttattttctgttcttccatcttcactcacgctctccagagcatgtctgctgcttcctgcttctgcccttgctggggctggtggtc

SEQ ID NO: 340106 - DNA, 180 bp, Homo sapiens
  misc_feature (8)..(8): n is a, c, g, or t
taccttcngcttctgcctgcttctgctgcttctgcttctgccccaggggctctgtgcctcttcttacaccctaccgagaggggctggtaacaaggttattttctgttcttccatcttcactcacgctctccagagcatgtctgctgcttcctgcttctgcccttgctggggctggtggtc

SEQ ID NO: 340107 - DNA, 375 bp, Homo sapiens
tccaacaatatgataggacttcttacacacatcacacatacgtgcactgcctgtgccacagtcagacacagttgctgctttctgatccatcagacaatgctgtagcacacacagcacattctaaccacatattcatatcagtgtctcagacacatgatgctactgagttcaagaaatttcaagtacattaacaacaaatatatattataggcatcttttgtaacagcaagagaaaggacctcataatctattaatacttttcatctactatcattacaatttgatagatactaaaaattgacttcagagttgctattcaaacataattcttaaaacatgctttcataagtcatgtagactaattcacaaagagac

SEQ ID NO: 340108 - DNA, 171 bp, Homo sapiens
tcatttgaggttttgcctcaaggtaaacctcactggcaaggtggctgtgataacagttagtttcttaaaggtaactggaacctaggccagaggagaggctgtggtaggaaagcactggagcgtctttctttctctacctgaaacagggccaactttccagaacagcatatg

SEQ ID NO: 340109 - DNA, 567 bp, Homo sapiens
ggccagcgacgtggtttttgtttgcttacaaaaaaaaaagaagactacacaaaagaaaaaaatgtacaactaattcaagggctgccttaattattcctcactctttaccctcggcccacatcatttccctacaggctgatccttgcccagtccactcctgattcatggctggtgaataggtgagggaggaaaatggagagagcgaatacacagagtgacagagggaggagaagtgaaaggtcataggcattcgctgcagccatgcctgtagtacgtccatcaccaggcttcaatttatagcagctacatgactgcgtgtgtcaatctctaactggctcatgtgccagaccagaagctactattggaaaatgcccctctctcgtcatgtcgtttgcacagtaattcacttagatctgaactgagtacaaatgagtggtgctctaagatcaaagcaccagggtctttaaaatgatcttcactctccccgcaacctgccccgaacacgtgcatgctcctttcactttcaattccaaactgcacccttctaacgctggcctacagcacatg

SEQ ID NO: 340110 - DNA, 990 bp, Homo sapiens
catcaaaacagaacatttttaagcacaaattacacaggacctataaaacaaaaatacaagttaaaaagcaaaaacaaaaaacaaaaaaccaaagtactcagacaacaaagaacatgatgaatgtaaccatacctcacatttcaatactaacactgaatgtcaaaggcctaaatgctccacttaaaagatacagaactgcagaatgggtaagaactcaccaaccaatcatctgctgccttcagaagactcacctagcacataaggactcaaataaacttaaagtaaaggggtggaaaaaggcatttcatgcaaatggacaccaaaagtgagcaggggtagctatccttacatcagacaagcaaactttaaagcaacagcagttaaaagagacaaagaaggacattatacaatgctaaaggccttatccaacaggaaaatatcacaattctaaacatatatgtgcctaacactggagctcccaaatttacaaaacaattactaatagacctaagaaatgaggtggagagcaacacaataatagtgggggacttcaatactccactgacagcactagacagttcatcaagatagaaagtcaacaaagaaacaatggacttaaactataccttggaacaaatggacttaacagatgtatgcagaacatttcatccaataactgcagaagacacattctattcacagctcatggaattttctccaagatagaccatatgataggccataaagcgagcctcaataaatttaagaaaattgaaattatatcaagcactctctctggccacaatggaataaaactggaaatcaactccaaaagggaccttcaaaaccatgcaaatacaagaaaatttgaataacctgctcctgaatgagcattgggtcaaaaatgaaatcaagatggaaattttaaaattctttgaactgaatgaccataatgacacaacctatcaaaacctctgggatacagcaaag

SEQ ID NO: 340111 - DNA, 406 bp, Homo sapiens
acacaggaaaagaacttttgagcttccgggcacagcaaattgtgggaagataaatatattgggcaactagtggaagataagggctggctcataaggtttgttatatagattcccctcctgccatctgtgggctgataagagtctagagattgtattggctattaagaaatcatcctgcccttcttggtagagaaggggagggcagagttctttcatgtgtctgctttttctcaactgtcttcagctcaaaataatgcttatgctggggtggcaaatttgaggtaacacactctcaaccccttcacccatcaatctaaggtgaccaggaactaacttgtagtctaacaaagccaggttcactgacccatttcaatgagggagaatgcacaccagaaccatggggcat

SEQ ID NO: 340112 - DNA, 419 bp, Homo sapiens
tcgcttagtttagatatatcaaagaaacaaaagcatagaggcggctgggggtggtggctcacacctgtaatcccagcaactagtggaagataagggctggctcataaggtttgttatatagattcccctcctgccatctgtgggctgataagagtctagagattgtattggctattaagaaatcatcctgcccttcttggtagagaaggggagggcagagttctttcatgtgtctgctttttctcaactgtcttcagctcaaaataatgcttatgctggggtggcaaatttgaggtaacacactctcaaccccttcacccatcaatctaaggtgaccaggaactaacttgtagtctaacaaagccaggttcactgacccatttcaatgagggagaatgcacaccagaaccatggggcat

SEQ ID NO: 340113 - DNA, 535 bp, Homo sapiens
aaataggcgggttgggaagcaagaactttccatcggggcaaactgtgaccgaatagcaacagttcaacacgagttcctccacgctctgggattctggcatgagcagtcgcgttctgaccgggatgactatgtcaggataatgtgggacagaattctgtcaggcagagagcacaattttaacacctatagtgacgatatatcagattccctgaatgttccctatgattacacttcagtaatgcactacagtaaaactgcattccaaaatggaacagagccgacaattgtcacaagaatctcagactttgaggatgtgatcggccaacgaatggatttcagtgactctgatctcctaaagttgaatcaactgtataactgctcctcttccttgagttttatggactcgtgcagttttgaactggaaaatgtgtgtggcatgatccaaagttcaggagataatgctgactggcaacgggtttcacaggttcccagggggccagagagtgatcactccaacatgggccagtgccaaggt

SEQ ID NO: 340114 - DNA, 326 bp, Homo sapiens
gctttaaattccaatttgatttcattcattttggatttttcttgggaaaaagaaatgtagcccttatgtacaatctttctgagccaaggttttctaatttatggaccagtattaattgaatttcgaactgtctttctgtttcatactgagatctgcaattcattttccaaagcagggtccttggttactaatccattgcaataattaagccccaccaatcttcttgccagtcgagctgtgagctgctcttgctttgtgctgtggatgtgaacagtactgcaccccaagccagctcacataaaggctgttgcatttcaccatccact

SEQ ID NO: 340115 - DNA, 336 bp, Homo sapiens
tgagactctgacttgctgaaggttaccagactaatagcaattccagtattaattgcttatcttgtcacttcagatcttttctcaacctcacgctattctctcaggactcttccttttaagattatgcaatttctattggatcaagaatttggagacattgttttttcttttcctgaacagaatgtgtttcagaaatcagaatattaaatttaaagcaattgtctaaaataatgtacatctaggtaatgctattactatcaatgataagagttcattttagtgcagataattattttttgatgaacaagatgtaaatatgcatggctaaaggggtag

SEQ ID NO: 340116 - DNA, 1981 bp, Homo sapiens
tctgtatgaattctcctatgttttgcatagaatgaagcttgactgagaccttgtcacaatcatgacatttgtaaggtttctctccagtacgagttcgccgatgaactgcaagttatgaacaatgtctgaaaattttgccaaatttattaaactagtatgatctctcttcattatggattctccaatgattcgcaatggttgtagtgtaactgaagactttgtgacaatcattacataagtaaagtttacagtcgcaaatcaagcctccaaagacaggagaattcatactggagagaaagcttacatatgtgaagaatgtcaccaagttttcagtcacactcaaaccttgaaagacacaggagaattcctactggagagatagcataaaaatgtaagagtttgtgacaaggctttcaggcataattcgcacctggcacaacatcctagaattcacattggagagaaagcttacaagtataatgaatgtgacaggtctttagtgggcagtcaacacttgtttaccatcaggcaatccatggtgtagggaaactttacttatgtaatgattgtcacaaagtcttcagttacactacaaccattgcgaatcattggagaatccataatgaagagagatcatactagtttaataaatttggcaaatttttcagacattgttcataacttgcagttcatcggcgaactcgtactggagagaaaccttacaaatgtcatgattgtgacaaggtctcagtcaagcttcattctatgcaaaacataggagaattcatacaggagagaaacctcacaagtgtgatgattgtggcaaagcctttaattcacattcacacctcactagacatcagagaatgcatactggacagaaatcttataaatgtcatcagtgtgccaaagtcttcagtctgagctcactccttgcaggatatcagaaaattcattttggagatagttgttccaaatacaatgtgtatagcaaaccatcaagcattaattgacactagagtcagttcagcattgacttgagtttgacttaacattgagttgaagccttaattgacattaaagtgtttatgttaagaggactggccaggcacagtggctcacacctgtaatctgagagctttgggaggccagcaccggtagatcacttgagttcaggagtttgaggtcagcctggccaacagacgtgagccattttcccagcctgttttttgtttctttaacaaaaactgatagggatttttttttttttttttgagatggagtttcactcttgttgcccaggctggactgcaatggagcgatcccagctcactacaacctccgcctcccaggttcaagcaattctcctgcctcagcctccagagtagctaggattacaggcatgagccaccacgcccagctaattttgtatttttagtagagatggggtttctccatgttggttaggctggtcttgaactcccagcctcagatgatccacccacctcggcctcccaaagtgctgggattacaggcgtgagccactgcgcccagccccagtgataaggatttttatgggtaccgtgttgaatctaaatcacattgggttatataatcatttaacaatattaatttttccaaaccataagtatgggttgtagctctatgtttctaatcattttgatcaatgtttgtagatttcaaggtaaaaacctctgacctttttacgtttatttctaagtatttcttactttaagttctccagccaatggaagtgttttaaaattttcttttaaagttgtttattgttaaaagtatggaaattcaactaatttttggtgctgatactgtattgtgcaaatccactgaatatgttacttagttccagtagtattttggttgactctttgtgattttctgcacagaagatcatgtcgtctacaaacaaatataattttacttctttctttctgatttcgat

SEQ ID NO: 340117 - DNA, 2110 bp, Homo sapiens
agcattttacaaatgtaatgattgtcaccaagtcttgagtaatgctacaactattgcaaatcattggagaatccataatgaagagagatcctacaagtgtgataaatgcagaataaatgcagaaaatttttcagacatccttcatacctttgcagttcatgggtgaagtcgtattagaaaccttacaaatgtgaagaatgtgatgaagctttcagattcaaatcaaaccttgatagtcatagaattcatactagagagaaaccttagcagtgtaatgaacgtggcaaggttttaaatcaaaaagcaaagcttgcacatcatcatagaattcatactggagataaacgttacaaatgtgaagcatgtgacaaagtttacagtcgcaaatcaagcctccaaagacaggagaattcatactggagagaaagcttacatatgtgaagaatgtcaccaagttttcagtcacactcaaaccttgaaagacacaggagaattcctactggagagatagcataaaaatgtaagagtttgtgacaaggctttcaggcataattcgcacctggcacaacatcctagaattcacattggagagaaagcttacaagtataatgaatgtgacaggtctttagtgggcagtcaacacttgtttaccatcaggcaatccatggtgtagggaaactttacttatgtaatgattgtcacaaagtcttcagttacactacaaccattgcgaatcattggagaatccataatgaagagagatcatactagtttaataaatttggcaaatttttcagacattgttcataacttgcagttcatcggcgaactcgtactggagagaaaccttacaaatgtcatgattgtgacaaggtctcagtcaagcttcattctatgcaaaacataggagaattcatacaggagagaaacctcacaagtgtgatgattgtggcaaagcctttaattcacattcacacctcactagacatcagagaatgcatactggacagaaatcttataaatgtcatcagtgtgccaaagtcttcagtctgagctcactccttgcaggatatcagaaaattcattttggagatagttgttccaaatacaatgtgtatagcaaaccatcaagcattaattgacactagagtcagttcagcattgacttgagtttgacttaacattgagttgaagccttaattgacattaaagtgtttatgttaagaggactggccaggcacagtggctcacacctgtaatctgagagctttgggaggccagcaccggtagatcacttgagttcaggagtttgaggtcagcctggccaacagacgtgagccattttcccagcctgttttttgtttctttaacaaaaactgatagggatttttttttttttttttgagatggagtttcactcttgttgcccaggctggactgcaatggagcgatcccagctcactacaacctccgcctcccaggttcaagcaattctcctgcctcagcctccagagtagctaggattacaggcatgagccaccacgcccagctaattttgtatttttagtagagatggggtttctccatgttggttaggctggtcttgaactcccagcctcagatgatccacccacctcggcctcccaaagtgctgggattacaggcgtgagccactgcgcccagccccagtgataaggatttttatgggtaccgtgttgaatctaaatcacattgggttatataatcatttaacaatattaatttttccaaaccataagtatgggttgtagctctatgtttctaatcattttgatcaatgtttgtagatttcaaggtaaaaacctctgacctttttacgtttatttctaagtatttcttactttaagttctccagccaatggaagtgttttaaaattttcttttaaagttgtttattgttaaaagtatggaaattcaactaatttttggtgctgatactgtattgtgcaaatccactgaatatgttacttagttccagtagtattttggttgactctttgtgattttctgcacagaagatcatgtcgtctacaaacaaatataattttacttctttctttctgatttcgat

SEQ ID NO: 340118 - DNA, 1624 bp, Homo sapiens
acgcgtagctatctctcatatggtcgactgcaggcggacgcgaatcactagtgattgtgagctgagatcgcacctggcacaacatcctagaattcacattggagagaaagcttacaagtataatgaatgtgacaggtctttagtgggcagtcaacacttgtttaccatcaggcaatccatggtgtagggaaactttacttatgtaatgattgtcacaaagtcttcagttacactacaaccattgcgaatcattggagaatccataatgaagagagatcatactagtttaataaatttggcaaatttttcagacattgttcataacttgcagttcatcggcgaactcgtactggagagaaaccttacaaatgtcatgattgtgacaaggtctcagtcaagcttcattctatgcaaaacataggagaattcatacaggagagaaacctcacaagtgtgatgattgtggcaaagcctttaattcacattcacacctcactagacatcagagaatgcatactggacagaaatcttataaatgtcatcagtgtgccaaagtcttcagtctgagctcactccttgcaggatatcagaaaattcattttggagatagttgttccaaatacaatgtgtatagcaaaccatcaagcattaattgacactagagtcagttcagcattgacttgagtttgacttaacattgagttgaagccttaattgacattaaagtgtttatgttaagaggactggccaggcacagtggctcacacctgtaatctgagagctttgggaggccagcaccggtagatcacttgagttcaggagtttgaggtcagcctggccaacagacgtgagccattttcccagcctgttttttgtttctttaacaaaaactgatagggatttttttttttttttttgagatggagtttcactcttgttgcccaggctggactgcaatggagcgatcccagctcactacaacctccgcctcccaggttcaagcaattctcctgcctcagcctccagagtagctaggattacaggcatgagccaccacgcccagctaattttgtatttttagtagagatggggtttctccatgttggttaggctggtcttgaactcccagcctcagatgatccacccacctcggcctcccaaagtgctgggattacaggcgtgagccactgcgcccagccccagtgataaggatttttatgggtaccgtgttgaatctaaatcacattgggttatataatcatttaacaatattaatttttccaaaccataagtatgggttgtagctctatgtttctaatcattttgatcaatgtttgtagatttcaaggtaaaaacctctgacctttttacgtttatttctaagtatttcttactttaagttctccagccaatggaagtgttttaaaattttcttttaaagttgtttattgttaaaagtatggaaattcaactaatttttggtgctgatactgtattgtgcaaatccactgaatatgttacttagttccagtagtattttggttgactctttgtgattttctgcacagaagatcatgtcgtctacaaacaaatataattttacttctttctttctgatttcgat

SEQ ID NO: 340119 - DNA, 526 bp, Homo sapiens
agcattttacaaatgtaatgattgtcaccaagtcttgagtaatgctacaactattgcaaatcattggagaatccataatgaagagagatcctacaagtgtgataaatgcagaataaatgcagaaaatttttcagacatccttcatacctttgcagttcatgggtgaagtcgtattagaaaccttacaaatgtgaagaatgtgatgaagctttcagattcaaatcaaaccttgatagtcatagaattcatactagagagaaaccttagcagtgtaatgaacgtggcaaggttttaaatcaaaaagcaaagcttgcacatcatcatagaattcatactggagataaacgttacaaatgtgaagcatgtgacaaagtttacagtcgcaaatcaagcctccaaagacaggagaattcatactggagagaaagcttacatatgtgaattatgcctgaaagccttgtcacaaactcttacatttttatgctatctctccagtaggaattctcctgtgtctttcaaggtttga

SEQ ID NO: 340120 - DNA, 556 bp, Homo sapiens
aggaaacagtgtgattggaggcgggggtggggaggttgtctgctggcttgtagccaaggtatgaacggctggggtagtgtcgtggatctccaacttgggcaggtgtcagaattgcgtggagggctttgaaaaaacaacattgggccccaacccacattttcagattcagaaggtcttgggtatcgtccaagaatttgaatttctaacaaatttccaggcaatgctgtttctgcggccccagggactctgctttgagaaccactggtctaatgtaatcccctcccagtggatattcatgaagcagaaacctccagggagtgggagctgggggctccaggacacgcagagccctgcctctggggtcattccgtgcacatctgttttacacagtgagcagccttggaaaactttcacttgaaaaaaatgtgggtagaaaaaaatgtttgaaaacctctgaagcaaaggcaagacttttaatcatgggaatggtgaatgttcattctttaattgaggggcaaagcaggcaggatccttggtccctcttgttgccagatgt

SEQ ID NO: 340121 - DNA, 294 bp, Homo sapiens
ccaatgctttccacgagtaatcagattcaggcccttgtgcctgaagactccttgtgaagactagatgacaccttctccaagagcagctaaggaatcaccttggctcctcaggctgagtatacatgttctgtatggaacttcagaaagaaatggtcaacattcattcctcactttaccagagaaagaagaaaatgtcacgtgcctttgattccctctttttaccaagactccactgagataaaactcctaacacagaaaccaacacatattctcaacactgggtacctgctggag

SEQ ID NO: 340122 - DNA, 248 bp, Homo sapiens
aggaaagaaccctagaactctctaatttcaatggaaacaatttaggaactcttctctgctgtgctatattacatttctttaaagttgttatcattttcatgtgagtttacatgttgtacatttcaatcaggggtatatcagctatttcttctggagccagctatggtgtccttggctcacaacaactcttcaatgcatgttcttgatggaatgaaaggcaattactgtgacgtaaagaggactatgaa

SEQ ID NO: 340123 - DNA, 377 bp, Homo sapiens
tgggaactataaaaaaatagacatactgaccaatgaaatagaatagagagcccagaaataaacgtacacacctacaaccgtctgatcttttacaaaattgacaggattttgcaatgaggaaagaacatcctattcaataaatgatgcagggatagctggctagctatatcaaaagaactggacccctacctctcaccacatataaaaatcaatgcaatagggattaaatacttaaatataagacctcaaactataaaaatcctagaagaaaagcttcttgatatttgctttggcaaataatttgtgaataagtccccaaaagtaattgtaacagaaacaaaagttgacaagtgggacctaataaaactaaagagctt

SEQ ID NO: 340124 - DNA, 353 bp, Homo sapiens
acggcagtgcaccgtgtatagggtgatggtcgttctagagtatccaccagcccaaagtgaaaaggcaatactccaacctccaaagcctcacaggtgatacacaagcattggatgcagttatgatcgatctctctccaatttcatcttgggtaaataagcgcattttattaaaaattttctggttatttctcaaatgggctattttataaaagagaaaaatgtcaaaattctgtatgttaaatcccattatatcaagcaagcaacatggctcattgtttttctttcatttatattttccatctcgataaacaaaaacaaaacaaaacaaaatacctgatttttcactttgggct

SEQ ID NO: 340125 - DNA, 175 bp, Homo sapiens
gctggcacacaaagatgctcaaaacatgtttgtgaaataaatctgagctattcttactttctactgctcacgtgtatctacgtaaattttcttaagtcttttaagtaagagtcatttctttaaaacatttcattgcttttctattttgtttgattcttttttttttttttttttt

SEQ ID NO: 340126 - DNA, 267 bp, Homo sapiens
tgtggtgaacgtgctctgatgcctggtgcttagaggcttagaatggggtcaggctctcctcccactcaaagaggtccctggtgagtggggtaaaccaggaagagaggagggctgctgcagctctcaaatacccaaggccacctctttgaggaggattcttagttcctggggaatgggggaggggctagttcccagctcaccccacagaatcactcctaccctccagctaagcatctgctttgcccctcttctccccatatgggtgca

SEQ ID NO: 340127 - DNA, 186 bp, Homo sapiens
tctgtcctccccttcaaagcccaaattctctaaatgattaagtacccatggtcatttcctcatgcccacaggctcctcaacccattaccattgggctcatgtgcctacctgctttctaaagctgccttcaccaatgttaccaggagcctcctcattgataaaactcattggatactttccattcct

SEQ ID NO: 340128 - DNA, 705 bp, Homo sapiens
gtttggatttatctctcaacaaacataaatgacattctagactattctcagaattggatagctcctttttattaatatgcctttaggagtcttcatctttaaagtcaacactcttcagctaatcacagatctaagcttacatgaaatctgaaaataaactttactgtgttttcagggtttggccttaaagtaacggtggatggcagatgtagttgtttgactgttgtgttaaacaaacaaacaaataaaagggaagaggaagagaatgaaagaccatttccttaccaagcaatcacacagtttattgtctaggaaataaaaaagaagaagaagaaagaaaggaaaagaaagaaaaaaagaaaagagccagttttgtgtactgttgagcacacagatgttcctcttggcagccatacagtactagtcaggattggggtttctgcagacgtagaatgtgaggcttctttgttggggacaaagtgttgcctgtggtgggaattgctgcagtgatgggaaagtatcgtaatgtattgttggattactgtgattttcaatagagacagtacattaaagtagctttgtgggcagtggattgtttcagccaagcctggctaataacacactcattttggcaaagtctatttaaaaggtagagctggcatagttttgtggtcatggagcctgtcccatacttgggcattagaa

SEQ ID NO: 340129 - DNA, 292 bp, Homo sapiens
tgggtctggggtgagttcctttcttctccagtggagttgttcttctctagagtctgctcgcttctcccagtgtaggatgagttcaaagctgttgcatatctccagtggagcacttcttttctttcttttactctatgtcacatttatttctgctctgatattttggctgtattttcattccccatggcctctaaagctgcttctgcaaaagggttgaatttactctgtatgggaagtcttgtactctttgggtaactttagtcgaacagtctcttgtacttttctagaccag

SEQ ID NO: 340130 - DNA, 504 bp, Homo sapiens
acttcagggcagtaggtgaagtgtgctgcttcttttcaggttcaggttcctatgaagtttaatatatatcattgaagaatttactagaccacattagtgcccctacttatcaagagagcctgcagaaacctgagccagtcatgaagcaggtgttacaagcatctgcactccatatttgctactgagatctctcatctcagccttattgagtattgattggtgataattcctaacaagtttggaaatatcatcacctagacccttgaagcaagagcaaaacagggtgggatgggagtagacttgtttgggtcatggaatcagtagctgttaaaatcaccccaatgttggggcacagtggctcacacctgcaatccccgccctatgggaggctgaggcaggctgatcacttgagctcaggaattcaagaccagcacagacaacatggagaaacctcatctctacaaaaaaaaaaatacaaaacttagccaggcgtggtggcatgtg

SEQ ID NO: 340131 - DNA, 268 bp, Homo sapiens
gtctctcctcatgctattcctcagctgtaagaccagttcttctcttccctaattcattgtccatatctccatcacaagtcaactctaaactcaacatttttgagttttccttaagccagttccctgactcttcagcacagcctctttcttatggactcaatttaaactacaataatgtgtgtttgttgacattttctatgttagagaagtttacctcagtattttacttcccatcaaaataataaatttctccactgttttttttttt

SEQ ID NO: 340132 - DNA, 675 bp, Homo sapiens
gcaaaagataatttgggctaaacaggatagatgaataaaccaaagggcaaattttagggctgatgaagacagaggtgcagtaagcgtttgctgtagttgtttgactaaattttgccatgaatactctctaacttacacacagtgggtatacaatacttgtcaagtgcctgaaaaggtacaattatcctaagatgaccatggaataagagtatcattcgtggtgcctagatttttcatgtgctcctcccacagaaaaagctacaatcattttcttattgatacgcaagttcatataggaacttagatgtgctccttcactacttttcacatatttgtcacatgtcagtatacttggaattatttgctcagtgttgattttcagattcaaagttttatgaagatgggggcatgttcgacttttttgtttatatagcacctgttaatcagcaatatctgctgtgaaatgaataaactgatgatttcaaaacccactcgactgcaggaactttgatctctaatagataaggatctatcattagttctttataagaagatgtgcgcttaagaaaagctttcttgaaactaatctcggtagtgtaaattaattccttttttttttttcgagacggagtctcgctctgtcgccctggctggagtgcagtggcgcgatctcgg

SEQ ID NO: 340133 - DNA, 362 bp, Homo sapiens
gtggaaaaatatagcacctacacctctcctactgaaagaaagccatgccactattttggtggggttccctctaaatcttttttcctctgcctgctggttgcattatagagtaaaccaagccaggggagagggttttccaaagtaagtgttagggtggtacccaggagggatggaggttccatgttgtgatgaactctatgccctggcagaggccacctccaggggttccttggtcctgccacctgcacccaggagatcctgagcccctctgacccgagcactcacacctgggtctctcatgcggcttctccacgcactggctcttgttcccattcacactgagatggcttttcaacgtaaaa

SEQ ID NO: 340134 - DNA, 147 bp, Homo sapiens
cggtcctcccttcaccagctccttccaccaggccagacattttgaagccacccattccacaaccactgcagcaaagaaccatgaaatgggtggcttcaaacaatgtctgggcctggtgctgtggctcacacctaaataatctcagca

SEQ ID NO: 340135 - DNA, 616 bp, Homo sapiens
atagaacaaaaatgtgtctctgccaagctggttctattccagcaggggaggaaggcagcgggccagatcagtgagtgcatgtctgatggtgactgctgagaaaatttaatcggaaatagggaattacgaagtgccggaccgtggaaggtgctgcagtttccagggaaggcctccccaaaagttgacatttgagtacagacttgagtggcagcaccagagcgagagccgtgtgtgccggtatctgggggaagagtgtcacaggcctagggaacagccagcacggaagcccgaggcaggtgcatgcctgtgtgccccaggattggcctctggttggctggggaggcctgctcctcaaagggctggtatatcacatccatcacaggctaagagtaaccgcctcgtggttcctcctcatagaggccaggtgcggtgtgtcatctgcttccagctctcagcatctctgctgggaggcaggattcctgttcccattttacagatgagaaaactgaggttaaaagaaggcaggtgatgtgtcccggggcatgtggctgggcaagcagtgccactgggctcctccacttccaggtccctgtgatgctgggaaactgagtcacgg

SEQ ID NO: 340136 - DNA, 189 bp, Homo sapiens
aaggtgctttgaacacagccagcccgccagcccctggctgctaggagctgctgccgtgttgccaataccatcactgtgtgtattgatttctcacccaactggtgtccttaacttcatatttatggcttgccctgacatttcccttctcttacatgttccaaattattaaaaacagctgctttataatta

SEQ ID NO: 340137 - DNA, 184 bp, Homo sapiens
ctgctgggggttgacaaggcttcttgggtctgtggatttatagcatttgttacatttgggaatctctggccactcttttctcagatcccccgcctgccctcaggactccagttacttgcacgtgggatcccctgctgtcgtccgcaggtcaccgaggtggtgttcgtttcctgtaggcttctta

SEQ ID NO: 340138 - DNA, 166 bp, Homo sapiens
ggcacagatgccacataatgaccattgtttactgggtttggggacacactggtttttaatatttatttagttaaaatctatcaaaagtatttctttattgcttctgctctagtcatttccttattcttcttccttattcaaagcagttccaaccccacccatgcaa

SEQ ID NO: 340139 - DNA, 92 bp, Homo sapiens
tttgcatgctgctgcagcctttaaagtattgaagtaactggagaattgccaatacagccagagagaaagggactacagctttttagagaagt

SEQ ID NO: 340140 - DNA, 197 bp, Homo sapiens
gggatttggtttctgaagcttagaagacctgaaaaaggaaggattcagcaagtttatagagcagttggtgagggatagattatattcctattagtgtgtttagaatgttaaaatctagtgtaataacagaaatctcaagtgagaatgtctccaaaaggcatgtgctgggagtgttgttatgaaagtatctttgtttt

SEQ ID NO: 340141 - DNA, 159 bp, Homo sapiens
tactataaaatgcaaatattccaaaaaaaatctgaaatctgaaacatttctggtcctaagcaagcattttgcaaagggatacgcaacctgtagtacgttctttatcattgttttaagtagttaatatattgtggtacagattctgaggtggtatagcaa

SEQ ID NO: 340142 - DNA, 409 bp, Homo sapiens
agttagactttgaacttaaaaaggaaaatccatgagggttatcctgtgtccctactaccaaatatttctattccattctattctagacatcaaaaatgtgccaagtatccactaagctaagtgctggacacatggtgtctcaggaacaggcatagccttgctagtcatagtgagggtgtttcatttaactcatagaacaaagtgtcatctgataatttcttattttgcttacttttattgtctgcctctccccatgaaaatatattctcattaaagttggaaacttctttgtgctttcttcctgtgtacctctagcagttggactaaagcctggcaaatgttaagtgctcttaaactttttgttgaatgaatgtgtgactgaatgattgagttctcctttaaaaaaaaa

SEQ ID NO: 340143 - DNA, 478 bp, Homo sapiens
tgactcagaggatcccgagggtgaccttcgtgggaagaggaaaatgaatgatcgtgtgttctgttatcctgtgagaagagtgagcctttaaaaagtgaataaacaccattccagttgtcgcaaaatctctactaataataagcaaaatgccttaaaagcacagtatgctctcgatgacctatgttttggattattcctatttaatggaggtgggggtggggagttaaagagcaacacatgatcgggtgcagtggctaaggcctgtaatcccagcactttgggaggccgaggcgggcagatcgcctgaggtcaggagttcgagaccagcctggccaacatggtgaaacactgtctctactaaaaatacaaaaattagcggggcgtggtggcacacgtctgtagtcccagctatggaggctgaggcagaagaattatttgaacccgggatggggaggttgcagtgagctgagatcgtgcc

SEQ ID NO: 340144 - DNA, 502 bp, Homo sapiens
gcggtagtcacacacacactatgcttctcacgcccactgctgcaaacaccttcgtgggaagaggaaaatgaatgatcgtgtgttctgttatcctgtgagaagagtgagcctttaaaaagtgaataaacaccattccagttgtcgcaaaatctctactaataataagcaaaatgccttaaaagcacagtatgctctcgatgacctatgttttggattattcctatttaatggaggtgggggtggggagttaaagagcaacacatgatcgggtgcagtggctaaggcctgtaatcccagcactttgggaggccgaggcgggcagatcgcctgaggtcaggagttcgagaccagcctggccaacatggtgaaacactgtctctactaaaaatacaaaaattagcggggcgtggtggcacacgtctgtagtcccagctatggaggctgaggcagaagaattatttgaacccgggatggggaggttgcagtgagctgagatcgtgcc

SEQ ID NO: 340145 - DNA, 301 bp, Homo sapiens
atgtgaatttgaacagcaatgtttagcacgtaacttggaaacgttttaaatgaaaacagatggcaaaatgtctagcccacagtaaacactcagtatgtatttgttaactcaataaatgacaaaactgcattaaaattctctgtgttcagttcttcaaatattcatttagtatagtattaaactgcttgggcaaatgcaaaaatcaaaaaagatgtctagagtaagtatagaaatctaaccacagtataaagatcctgatgctctcagcacccaatttcctttggagaatctaccactacga

SEQ ID NO: 340146 - DNA, 754 bp, Homo sapiens
atcaaagttaaggaggaactagtcaaacattagtaaaatgcaaaaacattttaagttaattgttggaactggtggaagacttccttaaaggaacatttccttttaaattttttattttatattttagggggggctgcatacttctctatgtaattgttagatacaaaaggagaacccaatgtgtatgaagtaatttctttttatcattaatttttgtaccaatgaatttttaaattcctcataaaatattactctttcaaaaatattttatttaaaatctagcaaataaataaaatattgtattatataacaccttccactttttaaaagaatttgcatgtaacatttcactgatttgaattttgcaggaatgtaatatcttaacactctcctcctatccttttgccagaatttcagaatagttacagttgacctaaatttcattaaaaaaaaaaagtcaaacttgtgtgtgatttcaaagctgcaaaatgacagctttgattcctgtgtctcatccctatggcaaagcaaaattctatgtgtgacatcacaaactagccaatagcaactttatccccagagacaccatgcctgacttttcctattgctgaggtctgctagagcttaggcaagtgctgagcagccgacagccatgatgtgtgggaattcgcagaacttcccagagtccttgtattcctctatactgaacccatgagtgcttcgtgtcctctccgccacttacctctgtatatcc

SEQ ID NO: 340147 - DNA, 137 bp, Homo sapiens
tgtgttgttaggtgattttggggaagtgtcaaggttttgctctggattggatgctggcaggaaacaggtgatcctataacttaatattttaatatttgctatctagaaggcaggaagaatggatcaaggctaagcct

SEQ ID NO: 340148 - DNA, 318 bp, Homo sapiens
ctgccagtagtcctcccaatcgccacgacaaggagctgagaccactgacgcgcaccaccacgcccagctagttttttgtatttttttttgagatgaggttttgccatgttgcgcaggctgatctcaaacttctgggctaaagcaatctgcctacctcagcctcccagaatgctggggttacaggtttgagccactgcccctagcctaagttttgctaagttcctgtttactacattctaaaattttaaattgaatttctgtttttgggtactaagggtttttggtttgttggtttgttttggttttggttttagctcc

SEQ ID NO: 340149 - DNA, 148 bp, Homo sapiens
ctgggaaatgaacctgccctgaaatacatacacaggcccttgactctctgccctcagccttgtctcatggctcagccgtcagtagtgttcattgtgcattgattgggaggaaaacataagccaaacctttttttccttgaaggagcag

SEQ ID NO: 340150 - DNA, 1491 bp, Homo sapiens
aaaatgggtaaataaggtgaatagacatccctcaaaaggagacatacaaatggccaagtatatgaaaaaatgctcaacatcactaatcagggaaatgcaaatcaaaaccacaatgagatataatttcacctcagttaggatggctattaccaaagataaaaaataaaaaatgctgctgagaacatggaaaagggggaactcttatatatggctggtaggaatgctaattagtatagccatatggaaaacagtatgaatgttcctcaaaaatctaaaactatagccaggcacggtggtgtgtgcctgtagtcccagctactcaggaggctgaggtgcaggactgcttgagcccaggagtctgagaccagcctgaataacacagcaagaccccattttaaaaaatgaaaaataaacaaaagttaaaaatacaactaccatatgatccactggtaatgatctataccactactgggcatatatgcaaaaacaaatatatctatacgtcaaagagagatctacactcctatgtttattgaagcactattcataatagctaagaaatcagtctaagtgtccattatcagatgaatgaagaaagaaaacatggcatatatacacaatggaatactactcagccatgaaaaataaacctgtcattcacagcaacatgaatgagcttgaaagacattaagtgaaataagctagacacagaaagagaaatactccatgtttctactcatatgcaagcataaaaggttgagaatggtggtaaccagaggctgggaaggacagcagagaggcagatagagattggttaacaaatacaaaattacagcaagtaagattccatttgaataagttgtagtgttctgtggcactgcagaatgagtacaattggcaataatacattttatattttcaaatagctagaaaagcagactgtgaatgtttctaaacacaaagaaatgataaatgattgagatggatatgctaattaccctgatttgatcattactcttagcacacatgtattgaaatatcacaccaaaccccataaacattgtcaattaaaaacaataaaagaaacaaaaagaataccaaaagagaaattccaaaatattctgattaaacatattaattactacgactggactcaatccatggtgacaactacctgcatatacatatgcaggttcacctgttaaaattccagtcactttatgtatagtcagccttcacacaatcttctgtaagactgaaaaatgagattccttctctgtgtttattttctgagtttatcataatcttttaacttactttagctacatgtcttatttcatttttggttccaaattgacctctagaaaattgttgaggtgaattttgaactatttactctctctaaagagcagtaaaaaagctgagaaaccacaatcagagggaagaattaggactccctggattacattatgtacaaacagctacaatatc

SEQ ID NO: 340151 - DNA, 315 bp, Homo sapiens
  misc_feature (22)..(22): n is a, c, g, or t
acttagaggacccctttatatnggctcaaacaatcctcccacctcagcttcccgaatagtaggactacgggcacaggccaacacgcctggctgatttttctattttttatagagacaaggtttcactatgttgcccaggctaatctcaaactctcaggctaagtgatccacccatcttggcctccaaattgtcactttctaattcatattttctgtagaaggctgtaagtcccttgaggacatggtcagtgaaatcagtgattaatatttgtagccctctggggtgtagtgccttaccctagcactgtctgtttg

SEQ ID NO: 340152 - DNA, 324 bp, Homo sapiens
gatcatggctcactgcagcctcaacttcctggcctcaaacaatcctcccacctcagcttcccgaatagtaggactacgggcacaggccaacacgcctggctgatttttctattttttatagagacaaggtttcactatgttgcccaggctaatctcaaactctcaggctaagtgatccacccatcttggcctccaaattgtcactttctaattcatattttctgtagaaggctgtaagtcccttgaggacatggtcagtgaaatcagtgattaatatttgtagccctctggggtgtagtgccttaccctagcactgtctgtttg

SEQ ID NO: 340153 - DNA, 568 bp, Homo sapiens
attcatcccagtaaggtgaaacacaactctgtataccaagatatatccatggtacctcgatatacatatttgcaggtttcttttttgggaggtgtttgctataaccagttggaaatttcctcttttaaaaatttgctttcaaatctaggctttcctatccatatccttgaaatgaccttaacaaatctgttgcccaggctggagtgcagtggtacgatcatggctcactgcagcctcaacttcctggcctcaaacaatcctcccacctcagcttcccgaatagtaggactacgggcacaggccaacacgcctggctgatttttctattttttatagagacaaggtttcactatgttgcccaggctaatctcaaactctcaggctaagtgatccacccatcttggcctccaaattgtcactttctaattcatattttctgtagaaggctgtaagtcccttgaggacatggtcagtgaaatcagtgattaatatttgtagccctctggggtgtagtgccttaccctagcactgtctgtttgatgaaagaatataatttacttacaaccaa

SEQ ID NO: 340154 - DNA, 346 bp, Homo sapiens
aaaaggcacattattttatccaaattaatacaggtctcctatggagcaaaggcaacatttacaaaaacttttaaatgaaaatatcaaacttaaaattgttttttcttgcaatagatcacttgtatactaccttgagactcatagcctcactccaggaagacacagcactctcttgcaccaatgaggaatgcttacatgaaatggtttgaaaatggatacatttaaggcagaagattagatacgttaaaatagatttttaaatgtaatcaatgttttcagtttggaaatggatagatttaaggcagaggattaggcccgctaaaatagatttttaaatgtaatcaaa

SEQ ID NO: 340155 - DNA, 404 bp, Homo sapiens
cctgatgattaatgatgttaagctccttttcaaatacctgttagccatttgcatgtctgctttggagaaatgtctatgcaggtcctttgcccatttttgggtcatttcttttttcgctattgtttgaggtcctcatatattttagatgttaatcccttaacagatacatggttcgcaaacagtttctcccaatccataggctgcctttttgtttctcctttgctgcgcagaagctttttagtttgaggtagtcccacttgtttttgcttttgctgcctgtgcttttggtgtcctatccaaaaaaatcactgccgagaccaaggtcaagaagcttttcctttgttttcttttagatcttctcatttaaataccaatattaaaatccataataaaaattattcaag

SEQ ID NO: 340156 - DNA, 726 bp, Homo sapiens
ctcctgctcctccctcctcccttgcttgctctgcctcatggggagcctcttcacctcttgcattcagtgcctgggttaagggatgagaacagttttcttcctgggctataaagtatccctgaaattgactcttcccaagagtgatccagaaaggctttaagccatggagcctcgcagggaactccagtgaaggggtcgcaccagtgggagtggattcgtttattctgctgagctggctaagcaaacagtcctgttattttccaacctcaataagaatatcatcagagccaagcttatttgccaagcaaagtatatatattctacatatgtgagccttcagggtggggcttggcccttaatttccctgctacagagactgtggctgagctgggttttggtgggtactaagtaaatactagttaacttgttgggtgtgtgttgataatgtgatagccggctatcacattatctttgggctgaaatgtatgtgtggaggtatgtaggagagaggaggaggagataagagaggagagggagaaaagcaggagagagcgcgagagagcagagaggagagagattggtctttgttgctgaatgatgcttggggtgtccttttctctttgtggttgtgtatcgactgtaacgaagagcagcgcctacgcgcctggtggggattgtttcggttcgcctccttttctttctacacagcggggataatgtatagcc

SEQ ID NO: 340157 - DNA, 903 bp, Homo sapiens
ctggctaatttttgtagttttagtagagacagggtttcaccatgttggccaggctgctcttgaactcctgacctcaaatgatcctcccgcctcagcctcctaaagtgctgggattacaggcatgagccactgcgcccagccatattttttaataaagccaccatagaaccatagccattctttgtaatagattttctttcatgaagtctattttttttggagttgaggccagtagaaaaaggaagatgatattagattttctggggagaaaatggttgttaggaatagactgcaaagaaatttatgaccccttttaaacaccagaatgtttttaagctatatattattgtataattattatatagtaatattacttaattttgagccctataacttaaagtattagtgtagaagtattagaagagagactttcttgaaatcatagtatgttaaagcttataagagactgtggggatcatatagtaagcaatactgaaattctacagaataacagatggaggtttgttcattcatttattagtttatttacttacccatttattcaacaaatattgagtttttactgttcagaatacttggggatattcctgcccttatggagcttatagtaaatagataacaaacatcccaagtaagttaaatagtatgttagaaggtgatacaagtgaaccgagatggaggaggggtagtgcttaaggattagtgctggtttgcagtttaaaatatgatagtttccattgaaaacatgacacttgagcagagaagagaagaaaatgagagtagactgtgtgactatctgagggaagagtatctcagggagaaggaagagctggggcaaaggccaataggtgggagcatgcctagtataccatgcaaggaata

SEQ ID NO: 340158 - DNA, 476 bp, Homo sapiens
agaatgaggaaaggaagctacctggattaaatgatcagaataggtctatctaaagagaaaatatttaagacataatttgaagactaatcatgtgccactcatgcttagcattctggtcagaggaaacagcatgggcacagacccaaaggcaatgtaatgaaaacaggtggttgtggtttctgcccagtatcaacttacccttcttctagcaactttacattttttctctacacaaacatttctgctctaatttccagccaggtacttccatttaaggtgactccacaccttgcaccagatctcaggtctggctaatcagaacactgcatctctcaggtcagggtttagacctctgactcagtaggacctgtgagatataatttaattttactgagactggcaaatgggtggggggctcttatccaatatacttgaatttggggtgaaaagaaggccaacagaaaaaaagtggagga

SEQ ID NO: 340159 - DNA, 414 bp, Homo sapiens
cacctgcgctgccagggtttgctgagtgtggagactgaagttctttggtgtcaccccacagtcatccagagcgcagtggctctcaaattacactgagcaatctctccatgtttttaattaccccccaattatccactaagtggctcctcactttccaacaccgcatgcttgcctcagtttgccaaacctgcaatgtgcttctcccttgtagcagcctcctccttgcccaagagaagtggcccctctcagccttgaaattcctgagtcctttgtctatggcatacttgggacacacatcacaggctgcctttgtatttcactggttctgccactttccccttgaggactgtaaactccccaagggcagaggcagggccccggggatttcacagggcagtctggctcccttctccc

SEQ ID NO: 340160 - DNA, 447 bp, Homo sapiens
tttgaccttcaggaaattccactccaccagctgcacatgtttaaatgccaataataggccaagctcaagttctctaccacagagcttctgggtagcttgcaaaccagagtggacatatgtctttagcagtcttattttacctagagccctcagagaacctttctttgagaagagtgttgcctcattctatcagggagggtttcaacagagctcctgttctgcccagccaagaaacattgccacactaggcatgtgactttcagcaaatcatctacattcattgagccttgatttccacattcctaaaatgcgaataataatgtctacccgacagagttgtttcaagaactaggaagaacgaatatgaaaagagtctggtacaggggatgtggaacgtggaaacccttgtacactgctgatgagcatacaaataggcacaatcacttt

SEQ ID NO: 340161 - DNA, 388 bp, Homo sapiens
gggtgttgtgactgaaggccaggagacaaagcaaatgaggccagagacagtgcctgctgctgaagtgctggtccatttctccacccgcatttgaatttgtcttttctctggctaactgcttttctgccctgatgaggagtcactcggggagactgaagctggaatttgtacaacctctttcagtccccttgattttaatcagaaatacacaattattcttttcctccaaatagagaaactcaatccccattttaaattcaattattgtaattgcagcattcagaaaaatagcacattcattttctaataagagattgtggataccaaattactgcatatagtatgtcaaaacaggaaacttgagactggcaaaccagtgggtgttttt

SEQ ID NO: 340162 - DNA, 796 bp, Homo sapiens
ctccggagttccagaggagcctgggcaacatggtgaaaccctgtctctaccaaaaatacaaaaacattgcccagatgtggtggcatgcacctgtggtcccagctatttgagaagctaaggtgaagcccagggagcaaaaagagggagttgccagattatttctacctccacgccctccctgcctgtcaaggactgagtcccaggaagatgccagctccagtgctttcccgctcttgccgtctcaggccactctggctggccgctgggtccctcaacatcccctgttggttcctttagcccagcctacaccgctggaaataggccctttatgagattctcttctaaatcctagaagagtgtaccctccatttcctgaagaatcctgacaagtatgtaaacattacttaataattgttaggtaaaaatactataaatattaaatttataagtaaataaaaatatttaattttacataagacaaagctaaaaatttcagtttataatttttaaacatagacaataaatttcccagaaagaaattgctgactaccaaccaaattttcatttttattttttaaatgttggaaaaattttgtcagaaagattcttatcaaccaatcaaattgtgttagcagttgtgttagtagtcacaaggaaaataatcagtcatattagttttcttactattgttcatattttgtctttcaaaaataggtgtaatgtacaaatacttcttaattagatatgcttaaataaaacatttcatattgtattgatttgggtatattgtagaaaa

SEQ ID NO: 340163 - DNA, 1043 bp, Homo sapiens
ctccggagttccagaggagcctgggcaacatggtgaaaccctgtctctaccaaaaatacaaaaacattgcccagatgtggtggcatgcacctgtggtcccagctatttgagaagctaaggtgaagcccagggagcaaaaagagggagttgccagattatttctacctccacgccctccctgcctgtcaaggactgagtcccaggaagatgccagctccagtgctttcccgctcttgccgtctcaggccactctggctggccgctgggtccctcaacatcccctgttggttcctttagcccagcctacaccgctggaaataggccctttatgagattctcttctaaatcctagaagagtgtaccctccatttcctgaagaatcctgacaaccaaaaatcaggagcagactatgtatacaagtctggaatggaggactttccattctagaagaaagagtggccattttcaactcttcttccttttgagacctcactaaaattagaggaacagaatttaaaaatacattacatctccatgataaagagaacaggaaaggaaatatcaacagacaaggggatttgacagatatttttggagggaagaaacggtggagcagaggtaattaagccgattggagagaggctgtcctgcagaccgagtgagacaaggtcctggcactggagaggctgctgcctggatccctcccccaacacaagaaatcaggaaatcaccactcctcttgccccaggccagagactaggtttctgtagacatggaaggtagaggctgcggacctggaccccagacacaggtgagaggagaggctttgcgctaaagagagagagagagagaaaaggaggtggggaagaagaaaggaaagaaaggaggaagagagaaggccaggcgcggtggctcacgtctgtaatcccagcactttgggaggccgaggcgggcggatcacgaggtcaggagatcgagaccatcctggctaacacggtgaaaccccgtctctactaaaaacacaaaaaattagccgggcgtgg

SEQ ID NO: 340164 - DNA, 494 bp, Homo sapiens
tggctcacgcctgtaatcccagcactttgggaggctgaggtgggtggatcacctgaggttaggagttcaagaccagcctggccaacatggcgaaaccccatgtctactaaaaatacaaaaaaaaattagctgggtgtggtggcgggcacctgtaatcccaggtacttgggaggctgaggcaggagcatctcttgaacctgggaggtggaggttgcagtgagccgagattgcgccactgcattcattccagcctgggcgacaaaagtgaaactccatctcaaataaataaataaataaataaataaataaataaataaagcaggatgataactgtacgcagcctatgaggttgtttaggatcattaataagattatgtagccatagaatactatgaagaaattaaaaagaataagatagtatggcagttcctcaaaaattaaacatagaacaatcatatgatccagcaatctcacttctaggtatatcccaaaag

SEQ ID NO: 340165 - DNA, 289 bp, Homo sapiens
tgtgccgagatcgtgccactgcactccagcctgggcaacagagagcaagactctgtctcaaataaataaataaatatctataaataaaatgtgacataaaacctatttcacattgttttatttctgtcatatattacctaaattcccaagatataattattatttaatagatgttctatgtttcaaattaccttactatcaaaaattaccttgagcttgactctcaagcatatctttaggacataagaggctgtgaaagtcacagaataaatattttcagagcatgatg

SEQ ID NO: 340166 - DNA, 930 bp, Homo sapiens
tccctacactttgggaggccaaagtgggaggatcaccagaggtcaggagagaccagcctggccaacatggtgaaaccctatctctactaacaatacaaaaaattagccaggcgtggtggtgagcacctgtaatcacagctactcaggaggctgagacaggagaatcgcctgaatggtgtgggggcggaggctgcagtgagccaagatcacaccattccactccagtctgggcaacaagagcgaaactccatctcaaaaaaacaaacaaacaaaaaactaagctctcctaagctttccatttcaacttgctctttcaaataaccttattttgaacaccttattggcaatatttaaacaaatacaccccagaggaattcagcacacagccatcatacatttctcagctgtacccatctcaaatttcatgcacttgataaaagaggcaaaacgtctgaattataaaaattaataataacgaagcttttgggctgggcacggtggctcacccctgtaatcccagtaatttggaaggctgaggtgggtggatcacctgcgttcaggagttccagaccagcctgatcaacatggagaaaccctgtctctactataaatacaaaaaattagccaggcatggtggcgcatgcctgtaatcccagctacttaggaggatgaggcaggaaaattgcttgaacccaggaggcagaggttgcggtgagcccagatcacgccattgcactccagcgtgggcaacaagagtgagacaatgtctcaaaaaaaaaagttccttattctcatcaaaatcctacattatgctatctaggtcctctgttaagactctgaaaaggcaaaactggataaactgaagaaaaatagatgtatttctgtgctagattattatcttacttatcgtacttctgagattaagtcaat

SEQ ID NO: 340167 - DNA, 753 bp, Homo sapiens
tccctacactttgggaggccaaagtgggaggatcaccagaggtcaggagagaccagcctggccaacatggtgaaaccctatctctactaacaatacaaaaaattagccaggcgtggtggtgagcacctgtaatcacagctactcaggaggctgagacaggagaatcgcctgaatggtgtgggggcggaggctgcagtgagccaagatcacaccattccactccagtctgggcaacaagagcgaaactccatctcaaaaaaacaaacaaacaaaaaactaagctctcctaagctttccatttcaacttgctctttcaaataaccttattttgaacaccttattggcaatatttaaacaaatacaccccagaggaattcagcacacagccatcatacatttctcagctgtacccatctcaaatttcatgcacttgataaaagaggcaaaacgtctgaattataaaaattaataataacgaagcttttgggctgggcacggtggctcacgcctgtaatccctgcactttgggaggctgagacaggtgtatcacctgaggtcgggagctcaagaccagcctggccaaaatggtgaaaccctgtctctactaaaaatacaaaaaattagccaggctataatcccagcattttgggaggctgaggcgcgagaattgcctgaacctgggaggtggagctacagtgagccgagatcgtgccactgcactccagcctgggcgacagagtgagacttggtctc

SEQ ID NO: 340168 - DNA, 228 bp, Homo sapiens
tctcaattcttaatttattactcaattcactactcttaaattgcagtcatggaaagaacctgtcttaagtcttaaacagctaagaaagaattttgctataaaacaaacatcagttggctgggcacggtggctcacccctgtaatcccagtaatttggaaggctgaggtgggtggatcacctgcgttcaggagttccagaccagcctgatcaacatggagaaaccctgt

SEQ ID NO: 340169 - DNA, 303 bp, Homo sapiens
catgtgattgcaaattagctgagctggctttagcagagcctctgggcagctaaaatcatccttgaaatcgtggtacatctttatccaagcagaaaacaagtggcttcaatggataagaaaagaaactacccctctccagaaataacccaaagggtatgcatgactcaaagtgtaacagcatttcctccacagtcaaagggatcagtcacttctgattgatacagaaaaaggtgggaagaacagagataattacagagagagggagaaacaagtctgaaacaaacagctcggagcccttaaaat

SEQ ID NO: 340170 - DNA, 479 bp, Homo sapiens
taagcaggcctgtggtgagaggagagaggaaaccagcaatgctgaactgacacctgatttcggatggttagatctatgtagaactttcatcttccccatcccttatgtattttgaatcttttaaatgtttctattagacttaactcttccaagctgccttccaggaaaattacagagaaactagggatgtaggagttcagagccagggctgctccatgctgatgtgaaggttactctttctttgccaaaccataaagcctctgggagcctgcacaggcctgcattaggctggaggaggaaggacctttgctgaatttgtatgccagctgaggcactttttctaatgtgtgcaaaggctcagtgtgtgcaaatgtcagccccagaccagaagcattttaagaagtattctaaagaggagaaataaccatcatttatttgagtacctattgaagcactttacatgcattatgtcacttatt

SEQ ID NO: 340171 - DNA, 517 bp, Homo sapiens
aatccaggtggtagaagatgaattgggaaagggcaaaggagtaaaggtagaggggatattgacaagggggtctccatgagtgagtctgtgggatatgggtgagaagagtgagtctggggagagaccctgagaaagcaccaaaatcccataactctggggttgggagaagagtccagtgacttctgatgtccataccaggaaatcccactctgtggccacccagattctgaaaacaccctattgtcctacaactctctaccatgaccacacctttggtcccaaggaccgcagttcataatcctgatcagagtcttaccttcccatcattaagtacacacacacacacacacacacacacagtaaaaacaaagaaaaaagtgcttgagctttttctaacttccccttgcagtctgttgtgtgagcagcctgtttatttctctggatattatgtcagtttattctctttaatggactgtaaaagaatgtaatcacaagagtgccaaatatcttggaacat

SEQ ID NO: 340172 - DNA, 447 bp, Homo sapiens
ctttagttttctgaagctcagtaagataagtaacttgcttagactcataattccattgaatcctggagttagaacccagcctgtttaatttatatccttaactaatatacaatatttctttgttggaataatgtacggaataatgtacaaattaatagtgagggtacaaatgaggagtggtttgttgttccaggaagctagaaaatcataaagaagatggtatcatttgtgttttaaaagacaaggttgagcagggatgcatggtaaatatcacctaaaaaggcatagactgtaaaactgggttctacatgtgtttgggtataggacactgagcaagaggagatgagactagagagcaaggtcacattagagcaaacctcctatgtcagagtagataataggcaatggatagaatttttagcagaagagtaatattatcggattcgc

SEQ ID NO: 340173 - DNA, 534 bp, Homo sapiens
cgggaggtggttgcctcctgtctccgtctctgtctcggtctctgtcagttgttggagggccaggattctgtcttatctccgcatcttgaagacccagcacaatgcctggcatttacaaggatcagtaaatgactgtggggaattaacccgaatgctcagaaacgcaggtggaattttctgggggtttcttacctcagttccacacttcgctttaacaattatctaaccaggccgggcacagtacctcatgcctgtgatccctgggcgtgggaggcccaggctggagaattgtttgagctcaggagttcaagaccagcctgggtaacatgacaaaaccccgtccctgtccctgagaaaaataaaatgggatggcgtggggaggagagtggcctgcacctataatctcaactactcaggaggctgaggtgggaggattgcttgagcccaggagggcaaggctgcagtgagctatgatcacaacaccccactccagcctgggtgacagaatgagaccctggctcaaaagaaaaaaaa

SEQ ID NO: 340174 - DNA, 133 bp, Homo sapiens
acagagaaggagcagagctgaaggcagcatggcagccccagccctctgggtcatctcaccagcatggaagtcccttgtggcagcagggtctgaggctctttttccttctcacatctctcgtttccttctctgg

SEQ ID NO: 340175 - DNA, 176 bp, Homo sapiens
atgcagattcagaagtgggtaacgaccagacgctgcacagtttggagggcttggaagaagacagaaagatgagggaaagtttagactattgtagagacgtgctaaatagttacaattaaaagagtgactatagagacttattaaatagttacaattaaaatggtgactgaaggttg

SEQ ID NO: 340176 - DNA, 149 bp, Homo sapiens
agttctgcaggctgggcctatgccaggttgaagggcccagaatatgggagccaaggtaccagcatttttagccagctctccaagtgagggaaagcatgatgctggcatctgcttggggaggcctcaggaaacttacaatcatgtggcag

SEQ ID NO: 340177 - DNA, 216 bp, Homo sapiens
atagacatgggttcctttcagccctgagttcatgccagggttttctttccctctagctggactgaggtaggaggagaggttgaagtccaccaataagaccatgagtgaagaagactaaagtacttgaaagagcagcagacctacgcttaaaatactagggtttgtgtccagactttgtgggttactatctgtataattttgggcaagtcaacagtt

SEQ ID NO: 340178 - DNA, 189 bp, Homo sapiens
cgacagatagcagaaataacccaagtggcaagcggcattccaggcatgattggataagagcaaaaagctctcatccacactgtgacagagggtagggtggccagaaccacatgaccgcgctctccccctccaatgccagcttctggacttagaggagttttcccctactcgctcttttttttttttttt

SEQ ID NO: 340179 - DNA, 488 bp, Homo sapiens
agatgggcctctttctgtcgcccaggctggagtgcaatggtgtgatcatagctcactgcagcctcaacctcctgagctcaaatagtcctcctgcctcagcttcctgagttgcgactacagccatgaaccactgcatccagttcagccctcagagcctgcagaggtggctcatccttccctgttatgatctgaaactacccatatgggccaacaccacagagttctgtccccacgggccaaggagggcttctcaggatcctcaacttcttgcctggttgccagaccaatcactagaggtaagcctagaattgtacgattggaactcaatgacgttcacgctattcttagaaacagttgagccagtggcggtggagtctgaaggctctggaatcttttccttcgtgtggcagcaacttatttttcctgcggaggctcggtggtgcttttcttgggctcaggattgcggcttggatggctcattccctggg

SEQ ID NO: 340180 - DNA, 624 bp, Homo sapiens
cccaacacccttctctaaggcctaatctgcctgctcctcacctggactctacctctcgctcttccctggcatggtctcataaaataccaagactcgggaaatagaactcgggcgtagctggatgccaggcagagtgagccggtctgtaaccaacacaatgccagctctcatggcggtggggagaatatgcaaattgggggctgaacagcaccccgctcctcaagtccgtgggtgggaaaatcataatgtgtgcgtaactgtgttgggcgataacatactgatgttatcgcccaacacagtaaacaagatttcacctattcatcacaaagcactcagggctgccattataggtcatcaagatcaaagaacttaaacgcaaggacaaatctaaattaaccttaccttgttgtaaagcctcacggaacacaaacaagaccttgtggtactaaaaacattccaaatatctttgaatcactcaaactactcaggagcacattcctcttatcatctacttttcaagcctagaagtcaatgcaacttaataagcttagttctactgtccatatattcgaccatgtcgaatcatctgccacatctcttcctaatacctaagaacgtaaaaac

SEQ ID NO: 340181 - DNA, 557 bp, Homo sapiens
agtaagtttccaaatggaatcctcatctcacaatatctaactataacctacagggctactacagaccctggccagctttctcactcttcagccacaactttgctatttctctgattccatccaggaattctcttccccacagaatctatgctgtaacctctattaagttcataagccaaatttaagtatggctttcttctctgacctcaacatctagcacatatacctcttttaacctgctttttttcaaataatgcacattattatgtattgctgctctatcagcatataaattcaattgagaagttttcattcactacagaattctgcatctggcatacagaactcaagtatttgtacaattgttatccacaagtggtagaacagtactttccaaacttggattgcgtaggggctcttgttcaaatgtacaccaattcaggaggcacagggtataccctaacaacacatttctaataggcttccagatgacaacgtgtcaaatcccaagaattttcacctaccttcatttattccatctcacgtcagccacctgc

SEQ ID NO: 340182 - DNA, 340 bp, Homo sapiens
ccccggctaattcttttaactgctatagtttgtagccattgttatgaacctgccattatggaagataaagatccaacattcacttactcaaatatcccctcacttcccatgacaaatattttcccctgtccccacagagttttaactctgtgttcactgttgactttatcatgactttctaagtgctataggggcagctgagttccttgtgtacttggaatccttttcctttcctgcacacatttttgttattcctggagtaactgtctttgtttggttgggtttttgtgtatttatcaccaatgatccatcattctcccgtcggtctgtaattgccact

SEQ ID NO: 340183 - DNA, 337 bp, Homo sapiens
gtgggggcggagaagggtccattgaatcccatccaactgcatctgtgcccttcagatcaggattacacggggatgctaaatctcctagcccaatggcctcactttacagacaaggaagtggaggccagacaggggaaataaatttccaagtgagtaaatagagggacttcctgactcctagtccagtgctctttcccacaccacactcagcccctcagtggcactgccacttttcaagagctcgattgccacacgtggcaagcagctaccatgccagactgcacagatatttccatcatcacagaaagtgcagttgtatgaatgatactgacccttg

SEQ ID NO: 340184 - DNA, 875 bp, Homo sapiens
atggggtctcactatgttgcctaggctggtcttaaacctctggtctcaggtgatactcccgcttcggcttcccaaagtgttgagattataggcatgagccactgtgccccaccaagaatgcaatttgagaaagtcacatccacttctgatttaattttgcaaaaaaagtagccatgttataatgtccaaaggtcatccaactttacccactgaactgtgtaattttttaagggcaggaggaaagggaagaagaaatggataataaactcttctttggctgggtgcagtagtttacacctataatcccggcactttgggaggctgaggtaggaggatcacttgagccatgagaccagccggggcaacagagagagacccccatctctaaaaaagatttttaaaaaattagctgagtatggtggtgcacgcctgtagtcacagctactcaggaggctgagcccaggaggtcaaggctacagtgagctctgattgtaccactacactccagctgagggaacaaagcaagatcccattttgaaaataactggtcttgaattcgtgggctcaatcgatcaccttccttggccttccaaagtgttaggattacaggcatgacccactgtgcctggcagtaggttttaaaagttaataccaagtccctataatggggtttgaatgaaaaccccaaataatgacttccctgaaaacccatggtggtcttcatttgacagcttcataagaatcacttaggacttttgttaaaacatatagttttcagtcccactgtagaactactgagactttctagatgttagggaacctagtttataaatacaccaggtgatctactcttttaaccaggtttggaagccatt

SEQ ID NO: 340185 - DNA, 615 bp, Homo sapiens
tgaatgaaaatgaaaataccacatatcaaaatttgtgggacacagctacagcagtgctcacagcaaaagtaatagcaataaatgtataaactagaaaagaggaaaagtctcaaatctataatcaaaggtctaatatcaaaaaacaagagtaagaagagcaaaatcagcctaaagcagaagagaaagaaaataagagcacaagtacgcaaaaatgaaaacagcacaacagggagaaatcgatgaacaacatgcgtatttgaaaagattaataaaatcggcatcccctcagcaagactgagaaataagaatatacaaattatcaatatcagaaatgaaacagggcatatcacacagcaaaacataataagggaacactgcaaactacactaaacacataaattgaatatcttagatgaaatgaaccaattatttaaaaacacatattaccacaactcactcaacatgaattagatcacttgactgatccctataatgaaatgagtcctataactattaagaaaactgaaggccaggcatggtggctcatgtctgtgatcccagtgctttgggaggctaaggcaggaggatcacttgaggccaggagtttgagaccag

SEQ ID NO: 340186 - DNA, 454 bp, Homo sapiens
cggatcccgtaaccatctatagatcagtgtgaagaataaaattattagagtaaaatttggccatatgtgacatgggcattaatgatccaatgatttatatatgccagtaatagaatttacaaaggacagccaatggtgagatgctgttctctggtggcattctggtaataaccagctctcgtatggtgcttgatagtttccaaagtacttttgcataccttatgttatttgtgcctccaaggtatgtaaaggaggtttatttcaattcagtgatcgtttattgagcatgttttgtgccaagttttgtactagatcttgggaaaccagcaatgaggcaaagaacttgactccaagttaacatagacaggtaacactgggatacacgcacaaccaggagtttaagtttggaaacaataattaaggagggagactgatctataggatgtggtaatgg

SEQ ID NO: 340187 - DNA, 713 bp, Homo sapiens
tacacatacccttaagcaaattttatcttgtacagtttgagtatggggtttatgttttcttaaaattcagcaagcctttaacaggaatgtactcagtattaagtgtggtgtcagattggctgcagtgtaggaaagcttttattccatgggaaagaagtccatgatttttggagctatctattatgcagttatgttgctatagatttagttatttggatctcatgattgaaatagtattttaaattggggacatcttttgtttgggagaggttgtttagaaatgacaggtgaagaataaaattattagagtaaaatttggccatatgtgacatgggcattaatgatccaatgatttatatatgccagtaatagaatttacaaaggacagccaatggtgagatgctgttctctggtggcattctggtaataaccagctctcgtatggtgcttgatagtttccaaagtacttttgcataccttatgttatttgtgcctccaaggtatgtaaaggaggtttatttcaattcagtgatcgtttattgagcatgttttgtgccaagttttgtactagatcttgggaaaccagcaatgaggcaaagaacttgactccaagttaacatagacaggtaacactgggatacacgcacaaccaggagtttaagtttggaaacaataattaaggagggagactgatctataggatgtggtaatgg

SEQ ID NO: 340188 - DNA, 281 bp, Homo sapiens
aagaatgtgagacttacccttatagagaccgcaattaaccataaagccatagatgttctcaagcctagtatagcgcctgacacacagtagttaatgaatgtttgctcagtagactgatgggtggaacaatgagttgcttgggggtcaggattaactctggaagtggtagttgtgggaagggttgaacctgaagattagggcgactcagaactgcaaagaccagggaagttgggttctgagaaggggcaggacagagagctgactaatttgtttcatttgtc

SEQ ID NO: 340189 - DNA, 466 bp, Homo sapiens
atcgtctatctatctacctattacctattttctatctatctatcatctatctatctatctatctatctatctagatatataagaacctgatctccaagtgttgaggactgaaaatcagatatctatatgtctatgtctgcgtctatctctatctctgtatgtatgttaagcttcatttctaaatctatttctgtatctatataccaatatttacatttatacctatatcactatctgtgtatatctatacattaatattaatgtctataacaataacacatgtacactgtagtcatgtgccacaatatgatgtcattgtcagtgatggatcacatatacagagtggcccatacaattataatgacatatttctactgtaccttttctatgtttcaatacacaagtacttaccatcgtgtcatgactgcctacagtatttaatacagcaacaagctacataggtttg

SEQ ID NO: 340190 - DNA, 179 bp, Homo sapiens
gaatgggaaggaaagagggtgtaggtctgtgtaaaacccccaacgaaaagtcacagtaacatgaagaaaggcaggaattctccacttcgtttggatggcagaaaatcaacgggctctttgtagaataaacatacacacatgcacacacacatacatatccattcagttgcaaattcaag

SEQ ID NO: 340191 - DNA, 319 bp, Homo sapiens
taagttctttagtggtgatttatgagatattggtgcaccttttgtttagcttttgtttagttttgatatggctatacctgcactcatatgctatgataaacctctacagccatttccctgtttatgatctgcataaattgctataaaatctaagttttcatttattcaatgtatgtttctggtatgctcatacatacatatgtaataagcaatgaagacaaaagccctagtgtttatgtagccaccttacgtatgttaacatttagtctgtcacagttattattctaccattgaagaggctaagacagattcaataatt

SEQ ID NO: 340192 - DNA, 301 bp, Homo sapiens
aataggacgatttctattatagaagcagtggcaatttaaatgcatttctaaatataacgtgttcaaggcagtgactattaaaaattcacatctgaaaccatatcactttaatccttcctttttacactcaaggcagttcatgaattgcaaaagacatttttcccaattcattttcattgtttttttccccctgaatcttataaattgtgcattgatttatgagatgtaaattttttgttggcttttgccctgaaaagttgatgttgtatcttttccttaatttttctctcaattcaagaag

SEQ ID NO: 340193 - DNA, 1658 bp, Homo sapiens
cctagtcgaaggccgggtgtgaatcggcacgaggcacttccagtcgccaccacctgtgcctggggaggtgttgaagttggatgatgtcattgacaacattatgcgtctggacgatgtccttggctacatcaatcctgaaatgcagatgcccaacacgctacccctgtccagcagccacctgaatgtgtacagcagcgacccccaggtcacagcctccctggtgggcgtcaccagcagctcctgccctgcggacctgacccagaagcgagagctcacagatgctgagagcagggccctggccaaggagcggcagaagaaagacaatcacaacttaattgaaaggagacgaaggttcaacatcaatgaccgcatcaaggagttgggaatgctgatccccaaggccaatgacctggacgtgcgctggaacaagggcaccatcctcaaggcctctgtggattacatccggaggatgcagaaggacctgcaaaagtccagggagctggagaaccactctcgccgcctggagatgaccaacaagcagctctggctccgtatccaggagctggagatgcaggctcgagtgcacggcctccctaccacctccccgtccggcatgaacatggctgagctggcccagcaggtggtgaagcaggagctgcctagcgaagagggcccaggggaggccctgatgctgggggctgaggtccctgaccctgagccactgccagctctgcccccgcaagccccgctgcccctgcccacccagccaccgtccccattccatcacctggacttcagccacagcctgagctttgggggcagggaggacgagggtcccccgggctaccccgaacccctggcgccggggcatggctccccattccccagcctgtccaagaaggatctggacctcatgctcctggacgactcactgctaccgctggcctctgatccacttctgtccaccatgtcccccgaggcctccaaggccagcagccgccggagcagcttcagcatggaggagggcgatgtgctgtgaccctggctgcccctgtgccagggaacaggggccggcctgggggctgggagggccaggggcacctccctcccacccttcaggctgcactgtgtgtgaagtagccacctgccctgcctccctcctccccgttggcccctgtttggacttagtgcctgtctggcagcctgtggggtcaggagaagcacccccagggcagccctcttgactggcgcagtgggaagaggccttcagcccctctcccggagatggaatcgcggggcagggaggggcagggtgttctagaggtgagaagagggcctggtggagattccctgtcttctgagcccgagcccctcattaccagtgaaggacatgcttgaggggttcgggaagctcctcatctgaggcaactggtcctgggggtgctcaggcctgcctttttgggactcagatggcaggaggtccaccccgcagcctggtcctcggctctcccacaggtgggcaccccccactttggtgctaatagctctccaccaggtggtgtgagcgcgggggctgccagaagcgggaggggtcactgccggaagagcagctgccctccgacccctcactttgtgcctttagtaaacactgtgctttg

SEQ ID NO: 340194 - DNA, 2325 bp, Homo sapiens
gatggagggcagtcagcacttggggcctggcttggggctgccctggagatgaccatggaaattgggttggcctcctctgatcggagggtgggagttcagggttcccagagctgccagaaatgttcacgtcccaggacgcagtgaacatatatgcatgtacagtgtggatcctcatctgagaggagggagatgaaaacacacccacctcacaggctgttgtgaggactaagggtgcggcagtgcctggtacatgggagccagcgccggcagccaccatggcgtcacgcatagggttgcgcatgcagctcatgcgggagcaggcgcagcaggaggagcagcgggagcgcatgcagcaacaggctgtcatgcattacatgcagcagcagcagcagcagcaacagcagcagctcggagggccgcccaccccggccatcaatacccccgtccacttccagtcgccaccacctgtgcctggggaggtgttgaaggtgcagtcctacctggagaatcccacatcctaccatctgcagcagtcgcagcatcagaaggtgcgggagtacctgtccgagacctatgggaacaagtttgctgcccacatcagcccagcccagggctctccgaaacccccaccagccgcctccccaggggtgcgagctggacacgtgctgtcctcctccgctggcaacagtgctcccaatagccccatggccatgctgcacattggctccaaccctgagagggagttggatgatgtcattgacaacattatgcgtctggacgatgtccttggctacatcaatcctgaaatgcagatgcccaacacgctacccctgtccagcagccacctgaatgtgtacagcagcgacccccaggtcacagcctccctggtgggcgtcaccagcagctcctgccctgcggacctgacccagaagcgagagctcacagatgctgagagcagggccctggccaaggagcggcagaagaaagacaatcacaacttaattgaaaggagacgaaggttcaacatcaatgaccgcatcaaggagttgggaatgctgatccccaaggccaatgacctggacgtgcgctggaacaagggcaccatcctcaaggcctctgtggattacatccggaggatgcagaaggacctgcaaaagtccagggagctggagaaccactctcgccgcctggagatgaccaacaagcagctctggctccgtatccaggagctggagatgcaggctcgagtgcacggcctccctaccacctccccgtccggcatgaacatggctgagctggcccagcaggtggtgaagcaggagctgcctagcgaagagggcccaggggaggccctgatgctgggggctgaggtccctgaccctgagccactgccagctctgcccccgcaagccccgctgcccctgcccacccagccaccgtccccattccatcacctggacttcagccacagcctgagctttgggggcagggaggacgagggtcccccgggctaccccgaacccctggcgccggggcatggctccccattccccagcctgtccaagaaggatctggacctcatgctcctggacgactcactgctaccgctggcctctgatccacttctgtccaccatgtcccccgaggcctccaaggccagcagccgccggagcagcttcagcatggaggagggcgatgtgctgtgaccctggctgcccctgtgccagggaacaggggccggcctgggggctgggagggccaggggcacctccctcccacccttcaggctgcactgtgtgtgaagtagccacctgccctgcctccctcctccccgttggcccctgtttggacttagtgcctgtctggcagcctgtggggtcaggagaagcacccccagggcagccctcttgactggcgcagtgggaagaggccttcagcccctctcccggagatggaatcgcggggcagggaggggcagggtgttctagaggtgagaagagggcctggtggagattccctgtcttctgagcccgagcccctcattaccagtgaaggacatgcttgaggggttcgggaagctcctcatctgaggcaactggtcctgggggtgctcaggcctgcctttttgggactcagatggcaggaggtccaccccgcagcctggtcctcggctctcccacaggtgggcaccccccactttggtgctaatagctctccaccaggtggtgtgagcgcgggggctgccagaagcgggaggggtcactgccggaagagcagctgccctccgacccctcactttgtgcctttagtaaacactgtgctttg

SEQ ID NO: 340195 - DNA, 2352 bp, Homo sapiens
ggccgggcgggcatgggccttcccggcccggagctgggagtcgaaggggcgggaggcgtgatggtgaactcgcaagaagtttgagggacgcgcgggccccgcgcccactccccctccaccggacacggctggggccggcgatgcctgagagggggtcggaggacgcagtgaacatatatgcatgtacagtgtggatcctcatctgagaggagggagatgaaaacacacccacctcacaggctgttgtgaggactaagggtgcggcagtgcctggtacatgggagccagcgccggcagccaccatggcgtcacgcatagggttgcgcatgcagctcatgcgggagcaggcgcagcaggaggagcagcgggagcgcatgcagcaacaggctgtcatgcattacatgcagcagcagcagcagcagcaacagcagcagctcggagggccgcccaccccggccatcaatacccccgtccacttccagtcgccaccacctgtgcctggggaggtgttgaaggtgcagtcctacctggagaatcccacatcctaccatctgcagcagtcgcagcatcagaaggtgcgggagtacctgtccgagacctatgggaacaagtttgctgcccacatcagcccagcccagggctctccgaaacccccaccagccgcctccccaggggtgcgagctggacacgtgctgtcctcctccgctggcaacagtgctcccaatagccccatggccatgctgcacattggctccaaccctgagagggagttggatgatgtcattgacaacattatgcgtctggacgatgtccttggctacatcaatcctgaaatgcagatgcccaacacgctacccctgtccagcagccacctgaatgtgtacagcagcgacccccaggtcacagcctccctggtgggcgtcaccagcagctcctgccctgcggacctgacccagaagcgagagctcacagatgctgagagcagggccctggccaaggagcggcagaagaaagacaatcacaacttaattgaaaggagacgaaggttcaacatcaatgaccgcatcaaggagttgggaatgctgatccccaaggccaatgacctggacgtgcgctggaacaagggcaccatcctcaaggcctctgtggattacatccggaggatgcagaaggacctgcaaaagtccagggagctggagaaccactctcgccgcctggagatgaccaacaagcagctctggctccgtatccaggagctggagatgcaggctcgagtgcacggcctccctaccacctccccgtccggcatgaacatggctgagctggcccagcaggtggtgaagcaggagctgcctagcgaagagggcccaggggaggccctgatgctgggggctgaggtccctgaccctgagccactgccagctctgcccccgcaagccccgctgcccctgcccacccagccaccgtccccattccatcacctggacttcagccacagcctgagctttgggggcagggaggacgagggtcccccgggctaccccgaacccctggcgccggggcatggctccccattccccagcctgtccaagaaggatctggacctcatgctcctggacgactcactgctaccgctggcctctgatccacttctgtccaccatgtcccccgaggcctccaaggccagcagccgccggagcagcttcagcatggaggagggcgatgtgctgtgaccctggctgcccctgtgccagggaacaggggccggcctgggggctgggagggccaggggcacctccctcccacccttcaggctgcactgtgtgtgaagtagccacctgccctgcctccctcctccccgttggcccctgtttggacttagtgcctgtctggcagcctgtggggtcaggagaagcacccccagggcagccctcttgactggcgcagtgggaagaggccttcagcccctctcccggagatggaatcgcggggcagggaggggcagggtgttctagaggtgagaagagggcctggtggagattccctgtcttctgagcccgagcccctcattaccagtgaaggacatgcttgaggggttcgggaagctcctcatctgaggcaactggtcctgggggtgctcaggcctgcctttttgggactcagatggcaggaggtccaccccgcagcctggtcctcggctctcccacaggtgggcaccccccactttggtgctaatagctctccaccaggtggtgtgagcgcgggggctgccagaagcgggaggggtcactgccggaagagcagctgccctccgacccctcactttgtgcctttagtaaacactgtgctttg

SEQ ID NO: 340196 - DNA, 1776 bp, Homo sapiens
ataatagctctggactctgcagaccttcaggttgaattgctgggtgaaagggcccaaggtgaattttgacactccaggtgtccccaggaaggactgctcctgggatgataggccctagagggggctccccgtggagagggggatactcatgggtctccctcaccccctaccccacagctacccctgtccagcagccacctgaatgtgtacagcagcgacccccaggtcacagcctccctggtgggcgtcaccagcagctcctgccctgcggacctgacccagaagcgagagctcacaggtactgcctccctctacccctgtgcctttgaatacccgactcctccctccttttctccctccctcccagctcctctctccttctcttttggcctccagatgctgagagcagggccctggccaaggagcggcagaagaaagacaatcacaacttaattgaaaggagacgaaggttcaacatcaatgaccgcatcaaggagttgggaatgctgatccccaaggccaatgacctggacgtgcgctggaacaagggcaccatcctcaaggcctctgtggattacatccggaggatgcagaaggacctgcaaaagtccagggagctggagaaccactctcgccgcctggagatgaccaacaagcagctctggctccgtatccaggagctggagatgcaggctcgagtgcacggcctccctaccacctccccgtccggcatgaacatggctgagctggcccagcaggtggtgaagcaggagctgcctagcgaagagggcccaggggaggccctgatgctgggggctgaggtccctgaccctgagccactgccagctctgcccccgcaagccccgctgcccctgcccacccagccaccgtccccattccatcacctggacttcagccacagcctgagctttgggggcagggaggacgagggtcccccgggctaccccgaacccctggcgccggggcatggctccccattccccagcctgtccaagaaggatctggacctcatgctcctggacgactcactgctaccgctggcctctgatccacttctgtccaccatgtcccccgaggcctccaaggccagcagccgccggagcagcttcagcatggaggagggcgatgtgctgtgaccctggctgcccctgtgccagggaacaggggccggcctgggggctgggagggccaggggcacctccctcccacccttcaggctgcactgtgtgtgaagtagccacctgccctgcctccctcctccccgttggcccctgtttggacttagtgcctgtctggcagcctgtggggtcaggagaagcacccccagggcagccctcttgactggcgcagtgggaagaggccttcagcccctctcccggagatggaatcgcggggcagggaggggcagggtgttctagaggtgagaagagggcctggtggagattccctgtcttctgagcccgagcccctcattaccagtgaaggacatgcttgaggggttcgggaagctcctcatctgaggcaactggtcctgggggtgctcaggcctgcctttttgggactcagatggcaggaggtccaccccgcagcctggtcctcggctctcccacaggtgggcaccccccactttggtgctaatagctctccaccaggtggtgtgagcgcgggggctgccagaagcgggaggggtcactgccggaagagcagctgccctccgacccctcactttgtgcctttagtaaacactgtgctttg

SEQ ID NO: 340197 - DNA, 1048 bp, Homo sapiens
  misc_feature (46)..(46): n is a, c, g, or t
caacggggggagacagtcaaatcaacgggctaggtacgaggcctgngtgtttgcgaagagggcccaggggaggccctgatgctgggggctgaggtccctgaccctgagccactgccagctctgcccccgcaagccccgctgcccctgcccacccagccaccgtccccattccatcacctggacttcagccacagcctgagctttgggggcagggaggacgagggtcccccgggctaccccgaacccctggcgccggggcatggctccccattccccagcctgtccaagaaggatctggacctcatgctcctggacgactcactgctaccgctggcctctgatccacttctgtccaccatgtcccccgaggcctccaaggccagcagccgccggagcagcttcagcatggaggagggcgatgtgctgtgaccctggctgcccctgtgccagggaacaggggccggcctgggggctgggagggccaggggcacctccctcccacccttcaggctgcactgtgtgtgaagtagccacctgccctgcctccctcctccccgttggcccctgtttggacttagtgcctgtctggcagcctgtggggtcaggagaagcacccccagggcagccctcttgactggcgcagtgggaagaggccttcagcccctctcccggagatggaatcgcggggcagggaggggcagggtgttctagaggtgagaagagggcctggtggagattccctgtcttctgagcccgagcccctcattaccagtgaaggacatgcttgaggggttcgggaagctcctcatctgaggcaactggtcctgggggtgctcaggcctgcctttttgggactcagatggcaggaggtccaccccgcagcctggtcctcggctctcccacaggtgggcaccccccactttggtgctaatagctctccaccaggtggtgtgagcgcgggggctgccagaagcgggaggggtcactgccggaagagcagctgccctccgacccctcactttgtgcctttagtaaacactgtgctttg

SEQ ID NO: 340198 - DNA, 2331 bp, Homo sapiens
ggtggagtgacagccggagcccgggcgccggcgcggggctcggtgacagcggaggcggcggcccgggcgggacgagggagcggccgcggcgccgacggcgggcgggaagggcggacggggcgggcctccctggtggcacggggccggagcaggccgggagcaggtggcgggcacagcttgcgggccaggcacccgaacttgcgacaagttgccggagccgcggggcgcgggcggcggacagattgaccttcagagcgagggagccagcgccggcagccaccatggcgtcacgcatagggttgcgcatgcagctcatgcgggagcaggcgcagcaggaggagcagcgggagcgcatgcagcaacaggctgtcatgcattacatgcagcagcagcagcagcagcaacagcagcagctcggagggccgcccaccccggccatcaatacccccgtccacttccagtcgccaccacctgtgcctggggaggtgttgaaggtgcagtcctacctggagaatcccacatcctaccatctgcagcagtcgcagcatcagaaggtgcgggagtacctgtccgagacctatgggaacaagtttgctgcccacatcagcccagcccagggctctccgaaacccccaccagccgcctccccaggggtgcgagctggacacgtgctgtcctcctccgctggcaacagtgctcccaatagccccatggccatgctgcacattggctccaaccctgagagggagttggatgatgtcattgacaacattatgcgtctggacgatgtccttggctacatcaatcctgaaatgcagatgcccaacacgctacccctgtccagcagccacctgaatgtgtacagcagcgacccccaggtcacagcctccctggtgggcgtcaccagcagctcctgccctgcggacctgacccagaagcgagagctcacagatgctgagagcagggccctggccaaggagcggcagaagaaagacaatcacaacttaattgaaaggagacgaaggttcaacatcaatgaccgcatcaaggagttgggaatgctgatccccaaggccaatgacctggacgtgcgctggaacaagggcaccatcctcaaggcctctgtggattacatccggaggatgcagaaggacctgcaaaagtccagggagctggagaaccactctcgccgcctggagatgaccaacaagcagctctggctccgtatccaggagctggagatgcaggctcgagtgcacggcctccctaccacctccccgtccggcatgaacatggctgagctggcccagcaggtggtgaagcaggagctgcctagcgaagagggcccaggggaggccctgatgctgggggctgaggtccctgaccctgagccactgccagctctgcccccgcaagccccgctgcccctgcccacccagccaccgtccccattccatcacctggacttcagccacagcctgagctttgggggcagggaggacgagggtcccccgggctaccccgaacccctggcgccggggcatggctccccattccccagcctgtccaagaaggatctggacctcatgctcctggacgactcactgctaccgctggcctctgatccacttctgtccaccatgtcccccgaggcctccaaggccagcagccgccggagcagcttcagcatggaggagggcgatgtgctgtgaccctggctgcccctgtgccagggaacaggggccggcctgggggctgggagggccaggggcacctccctcccacccttcaggctgcactgtgtgtgaagtagccacctgccctgcctccctcctccccgttggcccctgtttggacttagtgcctgtctggcagcctgtggggtcaggagaagcacccccagggcagccctcttgactggcgcagtgggaagaggccttcagcccctctcccggagatggaatcgcggggcagggaggggcagggtgttctagaggtgagaagagggcctggtggagattccctgtcttctgagcccgagcccctcattaccagtgaaggacatgcttgaggggttcgggaagctcctcatctgaggcaactggtcctgggggtgctcaggcctgcctttttgggactcagatggcaggaggtccaccccgcagcctggtcctcggctctcccacaggtgggcaccccccactttggtgctaatagctctccaccaggtggtgtgagcgcgggggctgccagaagcgggaggggtcactgccggaagagcagctgccctccgacccctcactttgtgcctttagtaaacactgtgctttg

SEQ ID NO: 340199 - DNA, 2158 bp, Homo sapiens
ctggggctggggtgcggccctgggctccggcccctggaggagctgagcattccaggggcctccttccaggggctgccctctcgaagggagccagcgccggcagccaccatggcgtcacgcatagggttgcgcatgcagctcatgcgggagcaggcgcagcaggaggagcagcgggagcgcatgcagcaacaggctgtcatgcattacatgcagcagcagcagcagcagcaacagcagcagctcggagggccgcccaccccggccatcaatacccccgtccacttccagtcgccaccacctgtgcctggggaggtgttgaaggtgcagtcctacctggagaatcccacatcctaccatctgcagcagtcgcagcatcagaaggtgcgggagtacctgtccgagacctatgggaacaagtttgctgcccacatcagcccagcccagggctctccgaaacccccaccagccgcctccccaggggtgcgagctggacacgtgctgtcctcctccgctggcaacagtgctcccaatagccccatggccatgctgcacattggctccaaccctgagagggagttggatgatgtcattgacaacattatgcgtctggacgatgtccttggctacatcaatcctgaaatgcagatgcccaacacgctacccctgtccagcagccacctgaatgtgtacagcagcgacccccaggtcacagcctccctggtgggcgtcaccagcagctcctgccctgcggacctgacccagaagcgagagctcacagatgctgagagcagggccctggccaaggagcggcagaagaaagacaatcacaacttaattgaaaggagacgaaggttcaacatcaatgaccgcatcaaggagttgggaatgctgatccccaaggccaatgacctggacgtgcgctggaacaagggcaccatcctcaaggcctctgtggattacatccggaggatgcagaaggacctgcaaaagtccagggagctggagaaccactctcgccgcctggagatgaccaacaagcagctctggctccgtatccaggagctggagatgcaggctcgagtgcacggcctccctaccacctccccgtccggcatgaacatggctgagctggcccagcaggtggtgaagcaggagctgcctagcgaagagggcccaggggaggccctgatgctgggggctgaggtccctgaccctgagccactgccagctctgcccccgcaagccccgctgcccctgcccacccagccaccgtccccattccatcacctggacttcagccacagcctgagctttgggggcagggaggacgagggtcccccgggctaccccgaacccctggcgccggggcatggctccccattccccagcctgtccaagaaggatctggacctcatgctcctggacgactcactgctaccgctggcctctgatccacttctgtccaccatgtcccccgaggcctccaaggccagcagccgccggagcagcttcagcatggaggagggcgatgtgctgtgaccctggctgcccctgtgccagggaacaggggccggcctgggggctgggagggccaggggcacctccctcccacccttcaggctgcactgtgtgtgaagtagccacctgccctgcctccctcctccccgttggcccctgtttggacttagtgcctgtctggcagcctgtggggtcaggagaagcacccccagggcagccctcttgactggcgcagtgggaagaggccttcagcccctctcccggagatggaatcgcggggcagggaggggcagggtgttctagaggtgagaagagggcctggtggagattccctgtcttctgagcccgagcccctcattaccagtgaaggacatgcttgaggggttcgggaagctcctcatctgaggcaactggtcctgggggtgctcaggcctgcctttttgggactcagatggcaggaggtccaccccgcagcctggtcctcggctctcccacaggtgggcaccccccactttggtgctaatagctctccaccaggtggtgtgagcgcgggggctgccagaagcgggaggggtcactgccggaagagcagctgccctccgacccctcactttgtgcctttagtaaacactgtgctttg

SEQ ID NO: 340200 - DNA, 2052 bp, Homo sapiens
ctggggctggggtgcggccctgggctccggcccctggaggagctgagcattccaggggcctccttccaggggctgccctctcgaagggagccagcgccggcagccaccatggcgtcacgcatagggttgcgcatgcagctcatgcgggagcaggcgcagcaggaggagcagcgggagcgcatgcagcaacaggctgtcatgcattacatgcagcagcagcagcagcagcaacagcagcagctcggagggccgcccaccccggccatcaatacccccgtccacttccagtcgccaccacctgtgcctggggaggtgttgaaggtgcagtcctacctggagaatcccacatcctaccatctgcagcagtcgcagcatcagaaggtgcgggagtactgtcctcctccgctggcaacagtgctcccaatagccccatggccatgctgcacattggctccaaccctgagagggagttggatgatgtcattgacaacattatgcgtctggacgatgtccttggctacatcaatcctgaaatgcagatgcccaacacgctacccctgtccagcagccacctgaatgtgtacagcagcgacccccaggtcacagcctccctggtgggcgtcaccagcagctcctgccctgcggacctgacccagaagcgagagctcacagatgctgagagcagggccctggccaaggagcggcagaagaaagacaatcacaacttaattgaaaggagacgaaggttcaacatcaatgaccgcatcaaggagttgggaatgctgatccccaaggccaatgacctggacgtgcgctggaacaagggcaccatcctcaaggcctctgtggattacatccggaggatgcagaaggacctgcaaaagtccagggagctggagaaccactctcgccgcctggagatgaccaacaagcagctctggctccgtatccaggagctggagatgcaggctcgagtgcacggcctccctaccacctccccgtccggcatgaacatggctgagctggcccagcaggtggtgaagcaggagctgcctagcgaagagggcccaggggaggccctgatgctgggggctgaggtccctgaccctgagccactgccagctctgcccccgcaagccccgctgcccctgcccacccagccaccgtccccattccatcacctggacttcagccacagcctgagctttgggggcagggaggacgagggtcccccgggctaccccgaacccctggcgccggggcatggctccccattccccagcctgtccaagaaggatctggacctcatgctcctggacgactcactgctaccgctggcctctgatccacttctgtccaccatgtcccccgaggcctccaaggccagcagccgccggagcagcttcagcatggaggagggcgatgtgctgtgaccctggctgcccctgtgccagggaacaggggccggcctgggggctgggagggccaggggcacctccctcccacccttcaggctgcactgtgtgtgaagtagccacctgccctgcctccctcctccccgttggcccctgtttggacttagtgcctgtctggcagcctgtggggtcaggagaagcacccccagggcagccctcttgactggcgcagtgggaagaggccttcagcccctctcccggagatggaatcgcggggcagggaggggcagggtgttctagaggtgagaagagggcctggtggagattccctgtcttctgagcccgagcccctcattaccagtgaaggacatgcttgaggggttcgggaagctcctcatctgaggcaactggtcctgggggtgctcaggcctgcctttttgggactcagatggcaggaggtccaccccgcagcctggtcctcggctctcccacaggtgggcaccccccactttggtgctaatagctctccaccaggtggtgtgagcgcgggggctgccagaagcgggaggggtcactgccggaagagcagctgccctccgacccctcactttgtgcctttagtaaacactgtgctttg

SEQ ID NO: 340201 - DNA, 121 bp, Homo sapiens
taggaaataaagcattactgttttttactcataaagagatgaaaataaaataaattattggtcaattctttatgagatttaaattatcttagcatttatttgtttgtttttgagacagggt

SEQ ID NO: 340202 - DNA, 780 bp, Homo sapiens
gggagaagaaggaggaatggctcataaatgacaaggacagtaattaataagtaaatacggtgtcaaatcatcctttcttttgaagactaatgacctcaaagggatcaaacccagaaacagtttttatattttttctgggatcaaatacatgggtatctggcctactatatttgtattctagactgtttagtaaaataatacaggaatttgagaaaacctttgcaaaagtgttagtgaaaattacttagggtgagaggaagtgagggatattttattaggggaggtcacaagggcagtgagcaatcagatttttagtaatctgacttaagcagtttctttttgttttaatgaagcttgttatctttataaaagtaattagagaaaatttggaaaataaaggaaagaaagaaaagttctttagtgttttatcacgcaaatacaagctcattcgtttttaacatcttgttccaaactccaaagtcttgctttctcttcaattaaaactttaatgggtggatgcttttcctgcttccagtatgttatcttaataactaacaatggtatattagctaatgtttacaaatgtactccagatgttccttaagttactttggtttatcattaccaatttatattgtttcttttagaaatttataatctttgttaatgggttctgctaaatttggtagtgaaaatgggatcttgagaaaaaagattctgaagcaacagaatttttagatttatattggtttacataagagttggtagctgtattacttt

SEQ ID NO: 340203 - DNA, 265 bp, Homo sapiens
caccattgtcgccgataattatggttccagaggagccacttcacccctctggactctagtttacttactctccaagcagggcatcgtccccttgtggggttaacgggaaaattaaagttgacaccatgcatgaaatgctgtccaaatcttgaccatacaattacagtgggtgttctggaagtaacagtcgtaagaatcctaatgacggtagctatccctgacttgtccatagcatttacagtttacaaagggcttcacacacccg

SEQ ID NO: 340204 - DNA, 195 bp, Homo sapiens
ggactaattcataaacacaacaaataagtatgctcaagggatcttagtgattttcccatttagtaataggagtagtttagatagaactagtgactaattttttattagcttagtagcaccactacccaagaacatttgcatcagggatataggctgaaatgtaagaactaagaagcccatgtacctaggacacac

SEQ ID NO: 340205 - DNA, 443 bp, Homo sapiens
tagttgtcccctccagtgatctgacgagtctaatatgtagcagaagctgggaaccactaactgttccttttgttcccccagctccaaagacacctcctcatctccttgtagaaaggagatcaagactccttattcgtccattgcagagctaaggaaaccagggctcaggaaggttaagtggtttgctgctaagaggaagggccagaaacagaatccaaaactccggacccggggagcattcaaccctggcttaatgtgcttctactgcatgccagccactgagctatccattaaccaagaatagaaaagacgcaggaaattatgccattctattacggcacaggatgctatggagcctgggctggggaggtggggaaggtgtttctaaacttcatttgtaagctgaatcttaatgccaagaagacgtgaggcgatggtgaggg

SEQ ID NO: 340206 - DNA, 610 bp, Homo sapiens
tatctcatctggaggtgtgtgatgtttagtgatattaattttgattacctgatcaaggacttgtcctatttctccactgtatagttactatttttttctttgacactaatgagcagtgagtggggagatagtgtgagaccatgcacatcctcctcatcagatttcccctagccaattctaattttatctaaactttattagatcatcttaagataaaaataattttctcttgaggccttaattggcaagcagatttaactactctcttttgaaattgtttctctagcaaggtgagcagtaattaacaaacataaaattactatacattgaagctgcactaaaaaaaatgccataatggttaagcttttttccactctaagctgtgcttctctctatttgtatccggttacctccccattagaaaagccatcaccattttattataggaaaaacaatcagttctttctcctcaggcagtttctaatgaaaacggtatcaggtatcagagatactaaacatttaccaaaagcttaaatattgatgaaaatttttactaagcaagtgaaattttttttaatttggtttttgtaaacactggcaggaaggtgga

SEQ ID NO: 340207 - DNA, 304 bp, Homo sapiens
ctgaggtcaggagtttgagaccaggctggccagcacggcgaaaccccatctctactaaaaatataaaaaattagccaggtgtggtggccagtgcctgcagtcccagcttctctggaagctgaggcaggagaatcacttgaacccagaaggcagaggttgcagtgagctgagattgtgccactgcacttcagcctgggtgacagaatgagactctgtctcaaaaaacaaaaacaaaaacaaaatgcttacagtatcagagctcacaaaggcagagtattgctttattccaactcagggcccttca

SEQ ID NO: 340208 - DNA, 540 bp, Homo sapiens
tgtttcaagaagcaaggacatttaaatgaaaaaagaagaggaagaaagccctctgttaatttgaagctgagcatctgatccactaaaattgacaaaataaatagcataatcgtatacctggggattcatgccgaaacttctgaatcagacaccctggggctgggaactagtcagccagggtgtcttctggatcacacaccctggagaatgtggactttaacatttcttctgagtaattttggcctccagcctgagtaaggatagttctagacctatagttcttaaacctagatgagtaattataagaattacctaggggaggagccaagatggccgaataggaacagctccggtctacagctcccagcgtgagcgacgcagaagacgggtgatttctgcatttccatctgaggtaccgggttcatctcactagggagtgccagacagtgagcgcaggtcattgggtgcatgcaccgtgcacgagccgaagcagggcgaggcattgcctcacttgggaagtgcaaggggtcagggagttcc

SEQ ID NO: 340209 - DNA, 136 bp, Homo sapiens
atggtgttctctctttgagctggcctccgcatctgcattctccctctttatgagggagtcaggacccaccctactccagtgtgacctggtctaaacctagctcatcacatcttcaacaacccttatttccaaataa

SEQ ID NO: 340210 - DNA, 513 bp, Homo sapiens
gtccactaatcagggcagtgtggtgtgctattcacaagctcataactggcagtaaaacagaaaggcccatgtctgctctgctgagtaatttccacactgaggccctgagcagagatgtcgtgtcatttgtaacatctgccttggcatccaggagccaaagtaagctagttagggagttgcactacttctttttccctcttcctgtgacaagcctaaaggactcaaagttatctgcaaggaaaactagtctgagctcttcagagaattgtcagttcaatgaaggtaaggcagaagagtgtattggaggctaaggagatactctggcttctgatttacctagaagagagggcagaagtagcatcagatgtggaaggagaaaccaagtatcaaagcagaaacagacactctggaggggagatcttcacagctgcacaggaaggaagactcagtctttatgcttcattaatttttttttcatataagactatgccacaatgatagttatagaactca

SEQ ID NO: 340211 - DNA, 685 bp, Homo sapiens
cttctagtcaacagtaagttattaataaagtttttgaggagtcaaaagttataagtggactttcaactgtgcagggggttgtcatccctaacccccacattgtttaagggtcaaccgtactatatacacctatagctgctggtatactggggctatactatctaatacaaaactgattctgaaatttacaacttttaaaaagacaaatatatttccctggtgtttgataagcatcatgagaactattttgcctaaaaattaataagtattagttgcaacatggacatttatactaataaggagggcagaggcgaatatgtgagaaggtccaccacctcagagcttgaatcagcttcacgatgatggaaaggtaagctttatcactgatctcaacagcagactggtggcaaagagccagccgtaacaaagtactacaatcagaaaaataactctagaccatctcatggaatctcaatctaaattatcatttgacctttcggcattatagcaaaataaggtctgtatacactggatactcccatgtcctatttctaaccattatgactatgtgtcccagaatggtgcacgccaccacatttaggaagaactggaaatgcaaatgattatctatgatgaagactcacatagtcctgaaaagcatcatttaattagaccttgaaatggt

SEQ ID NO: 340212 - DNA, 647 bp, Homo sapiens
cgtactatatacacctatagctgctggtatactggggctatactatctaatacaaaactgattctgaaatttacaacttttaaaaagacaaatatatttccctggtgtttgataagcatcatgagaactattttgcctaaaaattaataagtattagttgcaacatggacatttatactaataaggagggcagaggcgaatatgtgagaaggtccaccacctcagagcttgaatcagcttcacgatgatggaaaggtaagctttatcactgatctcaacagcagactggtggcaaagagccagccgtaacaaagtactacaatcagaaaaataactctagaccatctcatggaatctcaatctaaattatcatttgacctttcggcattatagcaaaataaggtctgtatacactggatactcccatgtcctatttctaaccattatgactatgtgtcccagaatggtgcacgccaccacatttaggaagaactggaaatgcaaatgattatctatgatgaagactcacatagtcctgaaaagcatcatttaattagaccttgaaatggtaactctcatatcttaaccataagaccgtaaatgaaaattaaactgtactacaaaggttatcaattataatttctaaa

SEQ ID NO: 340213 - DNA, 303 bp, Homo sapiens
tgatgagacagattatgagaggatgctgaagaatcggggggattgtgtgttcccttaaggcattgaagagcagtcttggtatatgtgatagagagtgttgtaggataaaaacgtgaataggaaaatcagcagtagaacaaaactaaatgggactaaatgtaactaaaaatgaatattctattcgaactgcatggtagagataagaccctttgaatgatagattccgagaacattagtggtggggtagagaattggggatgggatagaatcccaaataacttcagttattaattagctgctaat

SEQ ID NO: 340214 - DNA, 225 bp, Homo sapiens
ctaatataaaaatacccaaaggatataagaagccacttaacaaaagagaatacagagcaacaagacctcttctgcagtgctgagtggaaagtaagtggtgctacaacttggaaaaacagtttagcattattcagtttcattcctacgtttcttccatgaggaagcataactatgtttataaaaacaagtgcacaaaattgtacagagttgcactttccctaatag

SEQ ID NO: 340215 - DNA, 327 bp, Homo sapiens
aatgtaggtctcatggaagattttcatgtggacaaatttagtaaattttttgcaggtagtttcctgacatatttaacatttgtgatatagtaaacaataagaaggtactaaagtgctgggattacaggtatgatccactgcgcccggcctccaagccccctatttttattttgcactgaccctacaagttacgtagctaggcttagttatgcttttagcaaggaaagtgtataatctcatgtaccttttgaaagattactcaggtctctgcatgtgaaatggaatttagggaatgcaagagagggagtaaaaataacagcgaggaag

SEQ ID NO: 340216 - DNA, 217 bp, Homo sapiens
aatcaggagcactggcagtgggctgcagtgggaagggcatggagctagaggaaggccaccttccctcaggtacgtggttgtcccattaggccagagagcaccagaacgaaaagtaggtggacatgtttagtggggaggctgggagaagtgtgggttgcaggagggaattcttacttgacagtaacctttgaggtttgagatgcctggtgggaaccca

SEQ ID NO: 340217 - DNA, 147 bp, Homo sapiens
aaattcaatgcaattcccattaaaataccactatccttcttcatagaaaaaaatcctaaaattcatatgaaatcaaaaagtgattgagagggcctaaaatgggacagcagttttggaaaggaaaagatggatttaggagcctccccc

SEQ ID NO: 340218 - DNA, 1278 bp, Homo sapiens
cgcaacctccgccttccaggttcaagtgattctcctgcctcagcctcccgagtagctgggattacatgcatgtgccaccatgcccagctaattttgttttttttagtagagacagggtttctccatattggtgaggctggtctcgaactcctgacctcaggtgatctgcccacctcggcctcccaaagtgctgggattataggcatgagccaccacacttggcctacctctctactctgccctaagatgcttttgtgggtaaagtgaaaatcacataacagtgcagcttcatcatcatatgccctcaatgttcatcactgttgataaacatgcactgtattatgtttctgtgtgcctttttcttgtgtgccaagtaagacccatggcaggcaccttcattttcaggaagcgaaaatacagatacagtaatatggaaaataggacaaagtgtggacttcaggatgaaaatattgtaacaatcttgctgttgacctcgtagcgctcagtgacataatttgaaaaaatattaatgttcagaaatgttctcttgaggatgaacacacagattgggaatttcgttttgctttggtagattaactagaaacttcacattttcacccttataacctttttggtaatttgaacttttgatcattcttctggaactgctttgacatccacctgaagtttggtttgggtattgagaatgatgatgccattcactaatgtgatctcaaaatgtttactccataatgaggctttctggggagagcagggtagacttccccggttggtccaaatatgactagggaatcggcataggtgactggcttggggtatgatgattgttaagggatagggcttgggcaggggtgcccacttgtggtttgaactttcagctggtgccaaaggagtgggcactgaggatttttcagttgaccagatgggcagaataggaagagggagtgcagaggtgtaaaaggcgttggtgttcagacatcacaaaatgcagtcaactctaggacaactctagcttcctctggaagctcctgccatcttggttaggaaagactctgattttcttcatgataatatcttacgttccttttatagttacagatacaggtctcattgcacaatatgattgttgaaaacacttgtgaaatttttttagtaaaattgcctaagatactttttatagtagacaatgaaaattagtgtgtgggtttataataaatataatgtattatataatatgattaaaatatatttgttata

SEQ ID NO: 340219 - DNA, 355 bp, Homo sapiens
tatgtgtacatatagatatggatataacataagtaactaaattaaaacaaatgtccataatttggcccaattagaaatccagaatgtatataccaaagaatttatattacaaaaagataaaaggacattgattagattttttgtctctacaacataaggtctaaattaactttagcatttgctaaaatataccagctgacatacttcatggactcaatcaatactggggctccaattatacttggagtgggccgtggtggcttacacctgtaatccaagcactttgggaagccgaggcgagtggatcacctgaggtcaggagttcaaaaccagcctggccaacatggtgaaaccc

SEQ ID NO: 340220 - DNA, 409 bp, Homo sapiens
aaggtccatgcgagaggaatagtaaactgaagccacacggctgccgtgtatgcaaagggagcctgcagggtgagtttcgtaaattaaagcacctctcggtgtagacacacacagactgacttctgcttggtcacagcttccaagcctcagggtaggtgcaggctgagggacaccaggtgcgagcattttctgtttcttgtcatggcaccagtgtcgttcctgtcacccacggcactgagctctgccctggtaacgtccctccctccctcttaggctttggccacctgcattgttgtgctactgggtctccctgctaaaggttctgcttcctggttcctgcaagagcagatctcagtttttctgttgtgttgttttgttttgttttgttttgttttttgttttgaaacag

SEQ ID NO: 340221 - DNA, 136 bp, Homo sapiens
gattgcatccccattgcatcatctgggctcatctcatccccacctctggactgtaacatcatcccagggactgccggacactcatctgtgctcccccacagagagtataatgccatttggtaattcagtacaacct

SEQ ID NO: 340222 - DNA, 281 bp, Homo sapiens
tgagttatatctcaaattattcctttaagcagtaaatgcaattgaaaatttttggaagtttcaaaaaagtctaataaaatctcacaataagtttatccatttactagatgaaaaaatatatacactctggatgtgaatttgtacattataaaaccaaccaaatggagaacagaaaagaaaaatggaaccaagcagctgacttgtataaacaatatcatacaagaccctatagctgaatcaaacgcaattatacaaaagccaggaggggctgggcatggtgg

SEQ ID NO: 340223 - DNA, 258 bp, Homo sapiens
tataatgaaacataatgtaaaaatacctcgagtgtatttgtattttggtaatatctgaataagacataaaatataacgcacacatctttatatcgttttatccatatctctctttctttaaatccttctggttaaaatttgtcattgcctcctgactatgtatttattttttcttttctggaagaaagctcacctaggccttactcaaatgcatgttctcaatctttacctaccacccctcctgcctttttgttccag

SEQ ID NO: 340224 - DNA, 263 bp, Homo sapiens
aagactccatctccaaaaaaaaaaaagaaatctatctatctatcagtcagaatcactgaggaaaccgttgaaaaatgcggagtgcctgcttgtagctcacattactgaatccagatagctaggagtgacttgcatgtctgcatttttctatagcacccaggtttctcaaatcagccaagttaggggaaagtactgtcataggaaagggaagcccatttcccaggtcaaagcctttgctactcgttgtttatgtttattttatt

SEQ ID NO: 340225 - DNA, 241 bp, Homo sapiens
atcccatcttgaatattaaacaacaacaacaaaccaagatctgggaattaggtgtgctggtggctgttggtgtgttgcttctaggccgtctcagctgacagagcaagtaaatatatgtgtggatgctaacccatgtgtgtatacatatctgtagatatttccatatgcaactgcttgtatcttccttaaaccaaaaacttaggtcattctagcttcctcctcttgcttacctggaaacttc

SEQ ID NO: 340226 - DNA, 334 bp, Homo sapiens
caacactaacgacagctgacgcgcttaaaaaatagtcgcaaaaaaatctcataaagttggctgggcgtggtggctcatgcctataatcccagcactttggggggccaaggtgggtggatcatgatgtcaggagttcaagaccagcctggccaagatggtgaaaccccatctctactaaaaaatacaaaaattagccgggcgcagtggcaggcgcctgtaatcgcagctacttgggaggctgaggcagaacaatcgcttgaacccgggtggcagagtctgcagtgagccgagatcacaccactgcacactagcctgggcaacagagcaagactct

SEQ ID NO: 340227 - DNA, 290 bp, Homo sapiens
gtagatcatctcaggatgacctgctcatcatccttctggacaaaccattttctggaggatccgcggttgcagatgaatgcaatgtgttgaaaggtcagtcttcaggactttggtgaaattgataagaccgtggcttagatagatcacgctagccatttaccacaagggaaaacatccaagctacaaatcaattgcttcagttctgctttcccaagatattaccatggcatgatgactggattgggggcataatcatagtctgttggcacccctgcacatttgcctcctcc

SEQ ID NO: 340228 - DNA, 677 bp, Homo sapiens
gggctctgtatatttctctttcggaaccacctccattgacccttattacacaaaccctgactgagccaaggagcccaaacagtgcagatctaagaactttcgaagactacctgccctgacagctatttcaatgctagcggggaatttcagcaacaaccaatttaactgagcacaaatgatgtgctgactgaagtttggtaaaaagcatgtagttgagattcaaaagtaaatgctgtctcctctctgagttgcttgtgattgttaatagactgaaaactgaccaaattggcaagaaagcaaatagttttacttatatggctatacaattatcctcaattactaaattcagttggtgagcaccataattactttgtaatataaagggcaacctggggagaagagatttttttttttgttgtttggaggtaagtggccataaataactaaatcagaaaggatacagcacggatatacagtttttgttgttgttgttgtttttaagtatcagaaaaataaatacaacctttcaggatgctttgcaaatgtagggattttgtcactaatagaagtctttgaaatacatatctggaatgacagcaatagtcagtcagtgtgtgcttcaggatgaatttatgacctgaatttggtttcccatgctttctttaacactgtgctac

SEQ ID NO: 340229 - DNA, 439 bp, Homo sapiens
tgacattcccataacagtgtataagaatcccttttttctgcatccacaccagcatttttttattttttgtctgttagtaatagccattctgagtgaattgttacttttaagctcttatctctaacaatcaaattactataacagatttttgtttcactttcatttgtttagattagtagttctcaatgtggaaggacctgatttaatctcccaaagaatatttggcagtgtctggagacatttttggttgtcttaacccaccaaaaacagttgtcagtgctactgacatctagtgttacccactactgggttgctgtgaaaattagttttcagaacagagccccataaaaatgaattatctagcttaaaatgtcaacagtgccaaggttgagagtagtgttttttaaagaatgggtaggttgtttatgtttgatggaag

SEQ ID NO: 340230 - DNA, 347 bp, Homo sapiens
gcttcctgaaagatatcaaaccccaactttgtttttgcagatattcatatgtattcttgggcaagatttctttccctgggctagatgtcccaaggaccacactcctctgtccctttcaaagaaaagacagacctcactgggaagtcctggattgtgtccactgctgctgtcaccggagtctgaccccagccctgcccatctccagggatcgcagaacctgccagccaacttcctttgagtcagccggtcagggctgcatcttagaagccaagctgctttggtgtgatttctgaagtctgtgcatttgccttaactgtcaggccactggcttccctgagactggtttc

SEQ ID NO: 340231 - DNA, 325 bp, Homo sapiens
acccccaacacaaacacacagacacacatcggcactacagagattggtctgtgcactgtcagccttagagcccagctgcccaaacccttacttccctattctctcctgtagcttcctgtcaccatggtctctcagtaagttttgtagttaattttagctgctttacatgtatccaacaatttcattctattttcattaaaattaactatctatgaaaggctttggaggaaatttgtgaattttttctctttttgctcctcttctcacttttcaaacctgtttattgccctttgctaataataatggtaaagactacgatttgtgt

SEQ ID NO: 340232 - DNA, 1080 bp, Homo sapiens
tggctatgccctgcccccagaggtggagtcttcagaggcaggcaggcctccttgagctgcggtgggctccacccagtttgagcttccgaacctatcttcttaaaatggtggttgggaaccaagagaccaaagccactctggtccattaggtttttctgccttcacatgtaaatatctttagtggagaataagttacataaccctcagatatgagggaagaaaattcactcctggagaaatcctctagaatacatcaagcactttctcttattgggtcaaaataatgttactaactggctagccaacctgttttctatgagatgcatcagaaccctgcctgactctggagctctggccacatcaataggtaagattccataaaatgtgctatttgatagcatttgatacaatatttaatccttttattatcaagaaaagtctgataatcttattaaaactcttacttcaaaacacacaagattcaaatttataattttttttattcctactacataatcagtttagtattcctcccttcccagccctgattttcttccatgcccacttcatcaaattattttcaaactgcccagtaattttccatgtgactttaacttcttttttcactccctccctttctcttctctccctctctctttctcacacacacaggcacacaaacacaaaaatgcactctctcacacacacacaattaggaaattactataaactcgatctagaagttggcaagtttaagtcagttttcacatggaatggttagatggtagaaaaataggaaagaatttgtctgaaatctgcaaaacactaaataataatcacctgaaagggaaaaatgagtctatacagttataaactatcctccacagtctttttacatactgtactaaaacccagaagagaaaaaaaggattttcttagtaacttattttttgttggataatccttctaaagaaaactgtttatatcaattatactttattctattttctctacaacttgactgacaagccacgaagtggccaaatgaaccatgcaaacaaaaattctaacaaggtagag

SEQ ID NO: 340233 - DNA, 598 bp, Homo sapiens
ctccttgagttgtaggactgaggtcttcatttccttgcttctgtttgtggagggttgctcagctcctacaggctgcttttccatccttgcacatgacctcttccattttcaaagccagaaatggtacatcaaatctttctcacactttgaatctctatgacttccccttctgccatcagccagaaaatgttctctgcttttatgggctcatgagaccagatggtgtctacccagataatctccctattttaaggtcaactgtgctgtataccttaacataatcatgggagtactacctcataacattcaaaggttccagggattcaggtggaacatttttggaggcacatcctagaacttctgcctactaccagtgggtatccaggtctcctaggataggggaggccagaaacattcagcacattggacactttaacaagaactaggctacttcagtctgcagaacagaagaaaggggtaacaggttctacattcttcaaagactgcatgtagaagaaatgcttatacacgcattcactccacaaacaagattgggttcctgtcaggtgccaacacatgtgtcagatgttggaaatac

SEQ ID NO: 340234 - DNA, 753 bp, Homo sapiens
gaagttgtctttgctagatgacatgatcacctagaaaatatgaaagaatgaccaaaaaaaaaaaaactggatctaaagtgattatataacatggttgcaggaaacaagtttaatatacaaaagttgatcacttttctgcataccagcaatgtacaagcagaatctgagataaaaatacattaccattagcacccccccaaatgaaatatttatgtataaatctaatatgtacatggtctatatggggaaaatgcaaaattctaatgaaggatatccaagaaagagatgttccatgttcatggataggaagatgtgtattgtcaagatggcagtatttctaactcaatctagaaatgcagtgcaatctatcaaaattcctgcaagattttgaggatactgacaaagtaattttaaagtttatatcaagaggcaaaagaccaataaatgactgtatatatagccttttcagactgctttttttacttagtaataggcaaaagaatagccaactcaatactgaaggagaaaaacaatgtcagaggactgacactacatgattgcaagacttactctaaagcctaagttaacaagatagtgtggtattggtgaaagtctagacaaatatatcaatggaacagaataaagagtccagaaacagaccacttaattataatcaactgatctttgacaaagtagcaaaggtaatacaataaagcaaagatagtctttaagaaatggtacgggaacaactgg

SEQ ID NO: 340235 - DNA, 206 bp, Homo sapiens
atggggtgcaagcttcacaattgtgacgacaattctcccaaattgatctcttataaattcaacacataccaataaaaataccataaagattgttcagtgtgtaaattgacaacgtgattctaaaatttagaaagcatgtagaattatcaaagcagttttaaaaataacaatattgttggactaacagtacctgatcttattactta

SEQ ID NO: 340236 - DNA, 288 bp, Homo sapiens
gagtgtcctggcatgagggcagcctcactgaggtgaggcagggtatttcccgtttcccatctgcctggccgtcttcccactggcccttggaagagagagggcatgaactcctggctgcgtgagtttccttcttactagcaactttgtttaggagttgggatgggcgtagggccgctattgacgggggagcctctgtggtttccagggcgtctgcatccacgccctcctaggcccactcacagctgcagttgactcattggatttcttcttaagtgacaaatgaagcca

SEQ ID NO: 340237 - DNA, 399 bp, Homo sapiens
gagaaaaaacacaagaggatggtaactagaacctgggagaagaaaggtattctagaagaaggaaatgatggactctctaatgctacctggtaggtcaagttaaagaaagtttaggaattcatcattgattttagcaaatgtagtgactttaacaaaaacaggagaaattcatcatttgaaacacagtagaggctgcagcagtcagggacatttctgaagtgaggatctttgatgcctaggtgctacccaagccatatatgaagctaccttaatatgtgagttgtgccattcacagcaaagtagttagaaatcaatctcatgaaggctgctaggactgaatacccacacctccatttcgacctgcaggcgttgccccatgactcccactaaaacccgtta

SEQ ID NO: 340238 - DNA, 268 bp, Homo sapiens
caaccgcatggacagaatgatagatttttatcagatcttttcctgttctgaagaaaaaaagagtatttgttcactttaacatgtactttacaccttctggctagtagatcacatatgccatctggttgggtggcagaaagtgatcataaaatgatgaaagattcagtcatcttttgcaacctatttatatgttttatatttaagcacattatcaggctgtatttatggatattatttttaacccggacacatgcttgtgttaagcttg

SEQ ID NO: 340239 - DNA, 436 bp, Homo sapiens
ggaaaacatgctgcttcttcaaagactccaatttcagatggcaaaatgcatggaagctgagatggaccttctggagttttcgataaaccactgtagctcagtcagaggtccaattatgatgatacccacacagcccggtcctcccacagcctacatccaatcctctgaggaagctgagtggcactgcctttattcaccacagatgctacagaatcagcaggaaggaagactgtgaaaaggaaaaatgcactcttttaagagatggagtctgctatatttcccaagatggacttgaactcctgggctcaagcagtcctcccacctcagccttccaagttgctggaactatataggtgcacaccactgtgtccggctaaatttgtgtatttccatggatgtataatatatttacatatctactatctttcatcaaatt

SEQ ID NO: 340240 - DNA, 236 bp, Homo sapiens
ttttatttggaggtagtttccaaccatcaccaacaggataaatctacagaactcaagggggcagaaacaacgggtaagaaaaatgactgtactgaactgggaaatttttcaaggataacctgtagaaaaccagcctaggaaaaggcactttttttttttttttttttttttaagaaattaccgtgtaacttcttggcaacgtgacattgcttaacctgttattttctcctctatag

SEQ ID NO: 340241 - DNA, 610 bp, Homo sapiens
cagacactgaatccactggcagaagaacaggaattctcaaaccagagattatcacttttacaaactagaaaaactacaagggaaataaacactacaaaaatgagaaactaaatatctgaagaaagagttgcaggaataaacagaatcaaaaatattctcagaggtaaaatcataactcatccataaaaaaagctaccatagagaaaaatcaaaaattaaaaaacgattgccagatgtgtgtggctgcaaaaattaacacgataaaattatatacaactaaataaacaacgtacaaaagaatccatgcaaaactgtttctatttatttttcaccttttatttttatttttagagacagcgtgttgctctgtttcccaggctggagtgcaatcacaactcaatcacaactgactgtaaccttgaactcctgggctcaagcaatcctcctgcctcatcatcccaagtaactacgactacaggaacacaaccatgccagctattttggagagacaaggtctcactgtgttgtccaggctggtctccaactcctggcctccagcaatcctcccactttggcctcccaaagtgctgggattacaggcctgagtcat

SEQ ID NO: 340242 - DNA, 301 bp, Homo sapiens
tttcaaatacacatggactgcactaacaactttcagactaaaccacatttcactgttaagcgttatgaaaaggagttaatacatatataccatttggtagaacctatcaaatagtaagcactatcaatgttgttattactattattaatatgtatcaaattacagccttttatttaaagcctaacagggtatacttgagacaggcccaatgggactttaccttactttatctaatggggctgttgtgtgaggattaaataatatacacagggcacttagaataatgctgacttgttaggtc

SEQ ID NO: 340243 - DNA, 346 bp, Homo sapiens
actgcgcccgccctagcatggcatttctaagcataaagatgtgaaagatttatctgttcctcttcaaaatgacaatctcaaaaatcataacagtctaaagtaatcccaacccctttttcccctatgtgttgactaaatcacttatcaaacacacataaagaataagtcaacaatgtgaaaaaatttaatgcataaataaaagattgaaagggaacaaaaagaaaatgtttagacaaattactgagattcaggaagacatttctcttttaattacaattaacttacaattagttttgttttactgaactacaaaaaaagattctaaagagcctaaattacatctatt

SEQ ID NO: 340244 - DNA, 499 bp, Homo sapiens
aacagccaaaaacggggagcagtccaggtgtccattaatacaagaatactctggctggtattcacacagcaataccactcaccatacaaaacaccatgggcgcctctcaaaaccatgtccaccggacacggggctcacgcctgtaatcccagcaccttgggaggccaaggcgggcagtcacttgaggccaggagtttgagaccagcctggcctacacagcaaaaccctgtctctactaaaaatacaaaagatgagctggacatggtggcgtgcccctgtagtcccaactacttgagaggctaaggcattagaatcgcttgaacccaggagacagaggttgcagtaagctgagatggaaccatactgcactcagcctgggcgacagggcaagacttcatctcgggaaaaaaaaaaaatttcgaacacctgcaaagttgaagtgaatggtggagtcccctcgctcacacctgtggtccgctccccaaagctatgctgccct

SEQ ID NO: 340245 - DNA, 374 bp, Homo sapiens
aggatcgatgaaaggtggtaagtgattcttcaaagttctcaaggaaggagaaacaacgggatcaaaggctcaagggaagggaaagcacgagccgcgtacagaaagaaggacttctcttcggtgtagtcagaaggaattagagaagtatgtgtctttacatacactagtgcagttttctgaaatggctgtggggagcagggcctgggaaaagctatttccagttgcagagatgcctttggtgtatggagtctctgtcaacagtggttctcaaacttgactcagccttggactccctgggaagcttttaaaaattctgatctccgttatgccccatgccaattaaatcagtatctctgtggtggaacacaggcatc

SEQ ID NO: 340246 - DNA, 214 bp, Homo sapiens
ttatgtaaaaatatacatgcttttattcacagaaataatacactaaaaagaaaatgtttaaagtgatcaatgtctattttttaaaaagaaaaaaatcatttctttttttttttttttaaagaaacaaggtctcactctgtcacctaggctggaccgcagtgatgtgattacggctcagagcagcctcaacctccaagctcaagcaatctttctg

SEQ ID NO: 340247 - DNA, 2637 bp, Homo sapiens
  misc_feature (1)..(1): n is a, c, g, or t
  misc_feature (3)..(6): n is a, c, g, or t
ntnnnngcaagctcggccctcccctggaatctaaagcctcctcagccttctgagtcagcctgaaaggaacaggccgaactgctgtatgggctctactgccagtgtgacctcaccctctccagtcacccctcctcagttccagctatgagttcctgcaacttcacacatgccacctttgtgcttattggtatcccaggattagagaaagcccatttctgggttggcttccccctcctttccatgtatgtagtggcaatgtttggaaactgcatcgtggtcttcatcgtaaggacggaacgcagcctgcacgctccgatgtacctctttctctgcatgcttgcagccattgacctggccttatccacatccaccatgcctaagatccttgcccttttctggtttgattcccgagagattagctttgaggcctgtcttacccagatgttctttattcatgccctctcagccattgaatccaccatcctgctggccatggcctttgaccgttatgtggccatctgccacccactgcgccatgctgcagtgctcaacaatacagtaacagcccagattggcatcgtggctgtggtccgcggatccctcttttttttcccactgcctctgctgatcaagcggctggccttctgccactccaatgtcctctcgcactcctattgtgtccaccaggatgtaatgaagttggcctatgcagacactttgcccaatgtggtatatggtcttactgccattctgctggtcatgggcgtggacgtaatgttcatctccttgtcctattttctgataatacgaacggttctgcaactgccttccaagtcagagcgggccaaggcctttggaacctgtgtgtcacacattggtgtggtactcgccttctatgtgccacttattggcctctcagttgtacaccgctttggaaacagccttcatcccattgtgcgtgttgtcatgggtgacatctacctgctgctgcctcctgtcatcaatcccatcatctatggtgccaaaaccaaacagatcagaacacgggtgctggctatgttcaagatcagctgtgacaaggacttgcaggctgtgggaggcaagtgacccttaacactacacttctccttatctttattggcttgataaacataattatttctaacactagcttatttccagttgcccataagcacatcagtacttttctctggctggaatagtaaactaaagtatggtacatctacctaaaggactattatgtggaataatacatactaatgaagtattacatgatttaaagactacaataaaaccaaacatgcttataacattaagaaaaacaataaagatacatgattgaaaccaagttgaaaaatagcatatgccttggaggaaatgtgctcaaattactaatgatttagtgttgtccctactttctctctcttttttctttcttttttttttattatggttagcctgtctcaaagcataaaatggaataacatatcaaatgaaacagggaaaatgaagctgacaatttatggaagccagggcttgtcacagtctctactgttattatgcattacctgggaatttatataagcccttaataataatgccaatgaacatctcatgtgtgctcacaatgttctggcactattataagtgcttcacaggttttatgtgttcttcgtaactttatggagtaggtaccatttgtgtctctttattataagtgagagaaatgaagtttatattatcaaggggactaaagtcacacggcttgtgggcactgtgccaagatttaaaattaaatttgatggttgaatacagttacttaatgaccatgttatattgcttcctgtgtaacatctgccatttatttcctcagctgtacaaatcctctgttttctctctgttacacactaacatcaatggctttgtacttgtgatgagagataaccttgccctagttgtgggcaacacatgcagaataatcctgttttacagctgcctttcgtgatcttattgcttgcttttttccagattcagggagaatgttgttgtctatttgtctcttacatctccttgatcatgtcttcattttttaatgtgctctgtacctgtcaaaaattttgaatgtacaccacatgctattgtctgaacttgagtataagataaaataaaattttattttaaattttgctgagtgttatgcctattgattttacatttatagaatcctataaatcagaattggagatgtgagtgatttcctagtcttctttctcaccagtgcaggaatcctgactggaatggttcacacgttagtaaggatgctgaatgcatcttatttcaaggtagggtattcccactgtacttttgagcagatccagtgagcagctgagatctgaatacaatcattgggcctatatgttccctctgtagcttcactaaacaagtcttgggtgcaggacttgggtagataaaccatgagggagactctatactgtaggctctctcttaggaggagggaaccacagatacttgatgtgtactgatgacagattctgctagcatatagatctgtgagcattcaactgtgcttcattgttcagaggcagtaaagtggct

SEQ ID NO: 340248 - DNA, 408 bp, Homo sapiens
aaaagtaaaactacaagctacaaacttggagaaaatatttgaaacacatatagctaacaaaagattagttttaaaaatatataaagcacttctaaaataagaaaaaactcaatagaaaaaataggcaaaagccacaaagaagcatttcatagaacaagaaacacatacaactaataaatctataattagatgctcacctcaccaataatcatgaagaggcatttcatcaccatgaaatgcaagtttacacccatttaacaaatccaagaggtttgacaaaaccaaatgttggaaatcaacagggtctcaaacatattgctggggggaaactggaaaacaatttggcattatctattaaagctgaacgctggcatacacacgaaatctatttgatgtattccctatttc

SEQ ID NO: 340249 - DNA, 378 bp, Homo sapiens
ttgtatccggggaggatttctaaagaagcagtcatttgtcaatctgaaatttttttttaaaggaagaatacttgggttgggcttacaagaaaaataaattgcagtaagtgttaaaacttgccagtcaattacaggaatatattagtgttccatcgtagtttctaaaaccagacaaaatcatttcttgcaagcaggtaattccacagaagtttccaaacccatgagtttcactctcaggttccctctaggagcagaagtgcaggtttgcttgggctcctagcctctccctcagctccctcttttccctctaatggatccctagatgctactgatggctcccctaactgacggcaaattgcttgtgggcagggtctgtgc

SEQ ID NO: 340250 - DNA, 739 bp, Homo sapiens
ccaactgttgaccaggtgtcatttccaccttgcagtccaacttctgtgggaggtggacacggggaaagaagaccaccacggaggggatggctgtatgtgtgtagaggaagtattggtagtagaactaaagattctgccagcattttgtgtccaacacagttgctacatgtactataattatctcatttgtgtgaaaattcaaggatctgcattctgctattttcatcaggctgagcggagatgctgaggaatatggcaagaagttggggttcaaagtctgatgccaaagctagcaacccgagaaataaaaccgctgatcaccagctccccactcaggcccagcccccttttagagcccccagactccccacgcagggccctagccccctagtcttccccgtcaatgccctgttggcaatacagccatcaggttctatcagagtgagctgtttttatatgattattttcccccctgggaagacggctttgtctgtgaaagtccccccaaccaggcgccttataaacgcctaaaacagacagagttgaggagaacaggaggggaaaggaggagggagcaaacccggaggggggccctgaggttcgcagcgggcaggatgggggtatgaggccggagtcggcggctcccaggcccccagccccgtcagggcgcccccgtccccaggcgccagagccggggtccgcagccccctagcactccctggacggccgcgggcctccc

SEQ ID NO: 340251 - DNA, 264 bp, Homo sapiens
ctttgcgaacgcagaaatcaaagctactccccgcacccatactggggacccagatttgaagacgcccctcttttaaaaacccagaaacggcacccctcccggacccttcctcttcgacagcccaggaatctagacctccgagccccctcttccagcgaggatccaggaacccagaatgctcaaatatttgaactaatgaatgaaaattaagtcagtatttcaaagatctggaacacacttttagcatagagaaaactgaagtac

SEQ ID NO: 340252 - DNA, 224 bp, Homo sapiens
aggacccatgtctgtcttacttaccaatgaatcccccattcccagcatggtgccagacacatagtagatgctagatgacatggtttggctgtgttgccatccaaatctcaccttgaattgtaataatcccgacgtcaagggtggagccagggggagataactgaatcatggcggaggtggttttccccatactgttctcgtggtaatgaataagtctcacgaga

SEQ ID NO: 340253 - DNA, 221 bp, Homo sapiens
cagaaatttgaatcatgtggggaaagcatccactgtaagtttagtaacagtttggcaaagcctgaaaattatgtgtaaaatagtgctttaggagttctagaaactgaataacagactcattttctggtatcttgactttcagaaggcaaatgaatcattcttaaaacagtttagtttaaaaacaaatgtcaacaagcatttgttgagtgtccgccatgaag

SEQ ID NO: 340254 - DNA, 340 bp, Homo sapiens
gtttgagattatgcagtgatttcatttgttgccaagtcaatattattatggcgtggaatgggtgctaaaagccttctcaaattattaggaagtttgaaggcagaacaggtaagaaggaaaaacaagaatggagaaatgagaggatgaggaagggaaggatgtacagagccttgtctctatatctccttaagactgttttggcaatggcaagccctagcatagtcaggccccttgccaccagcggtgtgtgtagctgtgaacaacaatcactagggaatttctgccaaaccccacttttctgtattcagatgggctcagtaatatactcattcaacaaatc

SEQ ID NO: 340255 - DNA, 245 bp, Homo sapiens
agaatagtaagagaaactgggatggaaaggagaaagataaaatttaccaaacagaaacaaagagttaaaaggatctgacagaaaataataaagacagtggagaagatccaagccctctgagtcccagaagaaaaacaaagcactggaaaagaaatgctatcaactacagctcaaaactttcctgaagtgaatgaagagttcggcccacatattgaaaggacacaccacacacctgggaaaactga

SEQ ID NO: 340256 - DNA, 100 bp, Homo sapiens
taaggtagaacaatgtgtatgaactaataaggcaagagtccagcaggacttgttttctggtcacaacactgctgaacaaagtaggatctgttccagatgg

SEQ ID NO: 340257 - DNA, 157 bp, Homo sapiens
ttatcagaatagagagttagttgaattctttggatccatttgagtgatgaagcatgggttccaatttgaatagtgcataattaattgcatgatgattggagatacaatttagtatcataaataagttacttttgttaacttgttcaacaattacttc

SEQ ID NO: 340258 - DNA, 968 bp, Homo sapiens
gttttaattggcttttaaggggatagtgattatgcttttcttggtaaaataccaacatgaatagtcttgacctgtttgtaatagccaagcttcagtttagtttccaatgtgttccttcatgtgcaatgctcctcacatgactatttgtaagtaatttctgctggagggagttgataatagaaaccttgtttttggttttggatgttgggtgaacacagagaaaacacactgaggttggtcaagttcatgagaaagggcacatgagcccagattctcttcagtaacaaagtcctcttctttgagggctgagacctgttattttctcaagtgagcccagctttgctcatgctcacatttgattttccccatgcactccagcacgatagcgcttcttgtctctttgttaaagggttatataattatgcagatcaacgttgtgggtctttttccccttggacagtactttctggaactgctagatttccagatgagagctgtttattctggatcagacttaatttggtcagctgaattctcttgggtatgaagagtttttcttacccttggcctagtttttgtggttctaaatatctttttacagtttcaacaagtactctgtaaaacaggaatagttgaaagcactgctttcttttgccttcttagttcctgtgctgtttaatgatctcagtatgtcagttacattgccttctttgaaagccataacaactgagccctgcattgcaaaggaatgctttgttattctcaccatattcatcgagtgcccactacatgccaggctcctctcagcttgttacaaaaccagatggttaccccagtgcattcaggaaggtgatggagatatattcagggcccagtgggaaaaaaaaaggcactggtctagctgagatggcccaggaagctccgcgctgcttttacccacacacagcatcttctctaccttttattgc

SEQ ID NO: 340259 - DNA, 301 bp, Homo sapiens
cttagaggatcagaattcattagtgttgattggatgatctgtgcagcaaaccaccatggcacacatttacctatgtaacaaacctgcacatcccgcatatgtaccccagaagttaaaataacagttgaggggggaaaagaaagaattgattaggtgttcagaatacatcattgaacaaaacacaaaattctcctggggagaggcaaataagctgtaaagagaataattagctaaattatgcaatatttattattttttattatttattttttggtgttttttgggagatggcaccccactc

SEQ ID NO: 340260 - DNA, 331 bp, Homo sapiens
gttaacaacttgcccaaagtcacactgctacttcaagtatgtacaaaatgttatgagaacatggagaaagggttcctcacctagaggaggcaaagatattttcccagagaaaatgaactttcaatttcatctttgaaattatcttccttgtaaaaaggccccagtcagagagaacaaaatatgccaaggcagaaaaaaataatatgactctcttcagaaatcaagcagttcaatatcagtggggcacagagatgcaaaagataaaactggagaagtcaaaggagttagatcaatttggtctaacctgcatagcctatgaggggatttttct

SEQ ID NO: 340261 - DNA, 461 bp, Homo sapiens
gatgaaacaataagatctacctttttgaaaatagccctgaagcagctgtaggcggggaccgaggcgctggacctcacaaccctgcagagaccaccttaagtttctctgccatcgctgtgtggcccgtgtgtgctattaatattacctcctagagatgacctccaggcattttgcattttgtttccaagtggagactgagcaactggcctgattttctgctttgtcgtatagattctgattttgtctcatggatttttttgaagtctgatcacatcattatttgactttctcaaatacatgtgcggcaggagggacgtcagataatttttccgagggcctgtgcctgctctctcagtcaaacattctttctttgcaaccaactgatttgcatggcgatgacatttgttgctccagtaatttcatctgataatggccgggcttgcaaagcggatctgaaaaca

SEQ ID NO: 340262 - DNA, 311 bp, Homo sapiens
aagtataagtggacccgcatagttcaaacccatgttgttcaagggtcgactgtatagatggggagattaaataccccgtttgctaactctcagttgttaggtaacttgatggttcttttaaaccaaggtatctgtactcatatatacatatgtacataaaatatttgaagcagtcagatgagtattcaatctaaaaaaaacctttgtccatgttttcttaaactttgtatttgagtattgtcactgatatctatttgataagtttgtatacatttgagcaaagggtttttttttttttctttgagacagag

SEQ ID NO: 340263 - DNA, 643 bp, Homo sapiens
taattttccacaggtatactagggcaacaccacaaagattaatcctaacccactgtaaaaataattcactttgtgtgcttgaattactcatgagaagatctctgtctttgaaaactaacgtaattgtttagcactgcaattactgttcagaaatacaaatacaaagattcaaacagaatggaatgctaactaaagagcatacaatttatgagtcagaattaaaatgaatgtactgaatgattaaaaataatatttgagacaataacaagttcttaaaacattcaaacattttagtttactattttggagactacataattgggctgatcctatttatcctctatctgatcagcgtagggatacaattttcaatctgcacagtaattctgaaagtgtgttgtttcatttagactttatcttgttttctggctacattagtaacatccacacacggttctgaaaatatccagaccaagcaccttcaagaatctatttttcttaatcccagaagaaaaatgttttatgatgaagaagaatcagctcattaaggaaaacttctactatctacccgactatctctttctttgctctctcactttgattaattccgtcattaccacatcactcctgcccctgtactgtg

SEQ ID NO: 340264 - DNA, 173 bp, Homo sapiens
caaaaaagatagaaatttaaccagtttctaatttgaccaatgaaaaactttacattaacatgactgcaataaataattatctggtaaacgttaactgaatgctttcattttcatctaacttctagtcactcaagaactaaacagtactgatactcaattggcacatacccaag

SEQ ID NO: 340265 - DNA, 223 bp, Homo sapiens
tgtacttcgttttcctgcccatttctccccagagttctgaagggtcaacaacaacagctggaacgaaggtggaggccaagtgaggatgggagatggcccattatcatgtccagccatgctgggggacgaacactagagggtacacagaggacaaaagctgacgcccaaagccattatgatttttctcttctaaactattttgctccagaaatcagccttttat

SEQ ID NO: 340266 - DNA, 393 bp, Homo sapiens
ctgaggtcaggagttcgagaccagccccaccaacatgttgaaaccctatctctactaaaaatacaaaaaattagctgggcgtggtggcaggtgcctgtaatcccagctactcagaaggctgaggcaggagaatcgcctgaacccgggagacagcggttgcagtgagccgagatcgtgccactacactccagcctgggcgacagagcgagactccatctcaaaaaacaaaacaaaacaaaaacaaaaacaaaatgtgctctgctacgacggatgggattcctttaagcatctttcccctaaagcattctcactagagggcgcaaaggggacactgcagggtgaaggggctctccaaatgcttctgtgggtcaatggtggtgttggggaggcaga

SEQ ID NO: 340267 - DNA, 601 bp, Homo sapiens
cgacacggtttgtaggtcaggacattatgcccattgaccagatggaagactgaggctcagaaacaaaacacgagttgttcagaattccatgcccagttaatagtaaatgcatggactcatcctaagtgttctgacttcaaatgcagcatttattctgccataataggagtcatttggccaggaaaaagaatggctaaaaataagcctctggaccttcagtttgctgcttttcctcttggattcattatttctcgttgttttcttgcttttccccttcattcaagcacaactctagctaccaaggagcttcaatgacaattcctccagctgatggatttggccaagagtcagagagtctagcaacaacctatgcattgacagtttatttttgtgatgactcaattttacttctgattgaaaagcaaaatcctcttatcttctagatatgggagaaagtgacataggttctaaccaatctagactacagcccttctttttctttcaatgcttatattctctttcctcctatataatgaccatttctagcaacaggctaatttaaggtgtggagagaaatattcttctagtcaaaaactgtttt

SEQ ID NO: 340268 - DNA, 393 bp, Homo sapiens
tatcaattccaggccctacacaccacagggcctttgcaagtgccatttgctgtctctggaaaacacacacatctctcctcttttgcctctctctctacctcctactcaaacctcagctctcatctcagatgtcactttcttacatagaccagtctgtctaggtcagggttttgttgttgttgttctagtctctcaattccctttctttctacacgcttaactcactttgtaatgaaaagattattacttgatcagtttgggtgtgccttccccagaagtctctaagctctatggaagctgagctgtctactttcacatatcattgtatccccaacacatagcacaatgctcagctcagaacaggcactcaaatctgtgaaaaggaggagagag

SEQ ID NO: 340269 - DNA, 506 bp, Homo sapiens
gcaggagaattgcatgaactcgggaggcggaggttgcagtgagccaagattgcgccattgcactccagcccgggtgacaaagtgagactctgtctctcacacacacgcacacacacatgaattagtctctaggcagaaactttgctttattgattggttttcttcctcctcttgaggattatggaggaaaagaggaagccttttaaatgaggacagcttggtgtgggtaagtctcaaaatataagtggagtaactggaaaagcatgccatttagtatgcatttgtaccacacgggcattgttgctttgtgttttaggttctcatctgtaaaaggtcagcaatactatatctcctgtccctcctgttttgtcccacaataatagccggcttttgtgtagtttagtttacaatattttgtctggattgtcttggggcctttggggctagttttgaactttgatccacaggagtaaatacaacttacagtgtgtcccaataccaccttg

SEQ ID NO: 340270 - DNA, 166 bp, Homo sapiens
tgcacacagaatggaaaggactactggtccccgtcctaaactgccacatctgtggttacacgtgtgaccattgcatcaattacatggcatgtaaataacaagtgagcatggttgtggcatgggaaataggcttgagggggttacttgcattcaggaaccaggagta

SEQ ID NO: 340271 - DNA, 183 bp, Homo sapiens
agtgaattctgctccctggagagcaaggatgccaggatgagaggcttggggagttttgagcaggaacagagggaaaatatcagtctagcctgatgctcttgtggctgtgattcatgctttttttttttttttgtaactaacaggggttattgtggattgagtctgtggaaacggaatggaatg

SEQ ID NO: 340272 - DNA, 610 bp, Homo sapiens
tactcccaaggttcagcagcatctgctcacctagcaggctttctgctcttttctgggatgttggtgctgtagtgtggcccagagctcttcaccaaacacagtgcatgcattaccttttttaaaaataaaacttttatattgtaactactacatttgtaaaggttaattattttgtttttcttggtctcagcaggtttaattgttaaacttcgggaaacaattcagagtggcccattgaactggctgctgctcaggagtaaactgagacctgccctttaataaatagaaaaccaaatgattagcagcagaattagctcatactcactactaactacctgctctctgtatggcactcagtagctccaaccacttaacatttttaagccttttttcccctctgtaatgtaaacttcgtgaagctcaggcctttttaaaatgtatacccttcgctaagtacgcttgatacaataaaatctttgttctctgcagcattgcagattcatatatgtatatacacacatgcactgtctaatatttatctggtctggaataagcattaatctttaattactatataaacattttaaacaggtgtggaataactgcactc

SEQ ID NO: 340273 - DNA, 420 bp, Homo sapiens
agttgctgcatcctagcccacaaaagaagaaatgataaaatcattttacattgtccattggcagacatacagagtggaggcaggaagacaggattgcttgctgattttgaaaagtgttctgaacatttgatttggggttctgtctcataggaatcactggaggaaacggtgggagttgtgtttgataaatcacttaaaaaataaattctgttgtgtatatttaaggtatacaacatgattttataagatacatggatagtaaaaaaatgtatagcgtgttcacagatttgcatgtcattcttgcacatggacatgctgatcttctctgtattgttccaattttagaatatgtgttgccaaagcaagcactaaatcatttttacttatttattctcctactaactagtaggaaagaagact

SEQ ID NO: 340274 - DNA, 118 bp, Homo sapiens
cgtgtctaacacaacacgaacgagtccaccgtgtctaacacgaacgagtccaccgcgtctaacacgaacgagtccaccgtgtctaacacaacacgaacgagtccaccgtgtctaacac

SEQ ID NO: 340275 - DNA, 793 bp, Homo sapiens
acctcctgggctcaagtaatcctcccacctcagcctccccaaagtgttggtattacaggcatgagccactgagcctggcccacatagagttgtaaatcatgaaactgttctggacagaaagcagatggcagaatcacaatcttctgtgtccagagattatttgagattattttaagaacctaagtacaccttttagagcagggatttcttggatttgaatttttaggttacaatttgctttttagttgtattgcctgcaaaaaatcttaaatctctttgctgtttgtgacattgtgcatacttctcaatgatcttccctcttcatactttaacttactcctctccttgcccagatcactaaagcggcatgactcagccagcagaattgtcatcatccccaggccttgagcagctagtttgaaaaactgaaatagatctggcctcattgaatgctgttttaggtgaaggaaggtaattttgctctggcaggttggcgaattagtatgttacagctgtaaatgtatttctcctaaggtggttttctagcatcgtgtgcctcaattcagttgtttctttaaagttcagcattgcttttttttttcacctattcattcttggttaattaggaaaagacagcatctgttgtgggttttgttgtctggtgtagatgactgtttaatcagagaaggcattatgtcttgcagttagcagtttgaccctttgcagcacaggcttggggcgtgacctcaggatgtgactgcaccaaaccttactattttatagaaaatgggga

SEQ ID NO: 340276 - DNA, 263 bp, Homo sapiens
attatcttcagttctataaaatacaatgccatagcagctgctaggcaggctagaaaaaatggcagctagccccttttgccaagctcctgtccctaaatagtcagcacaacaacaacctgtaggcctagccctttaaaaatgttaatattcacagagggaactaatttccacctcatcaccaccaccaccttccccttagagccagatttctcggctcagcacttcattgatcactggtgaaaagggataatgtgatagcagct

SEQ ID NO: 340277 - DNA, 273 bp, Homo sapiens
aggatgccacagggaggggggatggacttggactcacagggcgctcatccccccagcctggctggaaggcgtgtggcacagatggcccccgacaccgtgcctcctgcccagctcagcagagggcactgctccgcgtccctttgtcctgccccagccggaggctcccagcctctccagctgggcttatcctggcaccgattctaggacgcagctgagccttactcgcaggcttgggtgctaggatccaagggaggtcacagaatggggcaggtc

SEQ ID NO: 340278 - DNA, 807 bp, Homo sapiens
ccgtcgaagcttttatatttttgtccctcaatgatatattgtttttctcccttaccatagcagtgggagagataataaaataataaataaatattgattgaagtgagaaaactggggaaacattgctgcgaaggaaggttttttctatcagtgtggtgtcacttaagcataagcataactgcagacattgattggtaaggaactgttacatttaaaaaggtattttagtggaattaaaattttttttctttgtaaaaaccgagggaaaattaatgtttggatttagagtaagttcaaaagcatatttatattacgtttacaaatctggtaagattattgtatttacctttaatattcctcgaacttattggccattaatacatcctgtctaaactcattgtcaatagaaccccagaattatgtatatgacgggtcagtattagactcagaaacaactgtattcagtaaaatcttgtaagaatcctcttagatcaaagttaatgctgtcccagtttagactgagggcatagtttctccagcacctatttcatttcctttccaaccctattttaaaccttttttctttttttttaacctctatgctttatgcactctcagtctaaattttactaaaatgatacatagattgttctcctgtgtaagaatctttagtggcttatgataaaatatatataacataaaattgaccatttagccatttgtaagagtataattcattggcattaaggacagtcagccctctgtatccatggattgaaccaaatgtggatagaaaatatttggaga

SEQ ID NO: 340279 - DNA, 443 bp, Homo sapiens
  misc_feature (91)..(91): n is a, c, g, or t
tagtgacactgatgaagaggtgacatctcagaaagtctgaaacaggtcaaaatgtactgatgaatgtggctgcccattaaagcatggaatngaagaaatattagaagtaagtttaagggatactttggtgtttctggattcaaattaaataggagcatactgactacatgaaaccctgaagggaatagagatcacgatactctaagcccgtcattgtacagatgaagtcactgagccacagagaagctgagtggcctgcccagaatcaaatgttaattcatggcagatctgggagtaaaatccaggctcctgtctcccaacatgtttgtcatcattagtttaagaacatctcagaaagtctgaaacagggtcaaaatgtactgatgaatgtggctgcccattaaagcatggaattgaagaaatattagaagtaagtttaaggg

SEQ ID NO: 340280 - DNA, 132 bp, Homo sapiens
gagaagaaagaggaagtaaaagtgaaattgtcatgatagaactatctagaaaaggaaaagaaaaaaaaaaatcaagggctggtaaagacaacagatgaccactagcaattgagcacctactgtcagacccta

SEQ ID NO: 340281 - DNA, 409 bp, Homo sapiens
aggattgattcctaaagactcatgttatgtgaagaagcagctcagaagaggaaaggaaaggagccaggcatggctcttcctcagggacgcttgactttcagggatgtggctatagaattctcattggcagagtggaaatgcctgaacccttcgcagagggctttgtacagggaagtgatgttggagaactacaggaacctggaagctgtggatatctcttccaaacgcatgatgaaggaggtcttgtcaacagggcaaggcaatacagaagtgatccacacagggacattgcaaagatatcaaagttatcacattggagatttttgcttccaggaaattgagaaagaaattcatgatattgagtttcagtgtcaagaagatgaaagaaatggccatgaagcacccatga

SEQ ID NO: 340282 - DNA, 399 bp, Homo sapiens
caagcagagtttccccaatatgtctttcagatgaatgtcagggcatcacagcaggccttttgaagctaggtaacgtggggcattgctggctgaggtaagtgctgacacaggcctaaaccacagcccgcagcatcgtactgtcacagaggcttatttcaatgatgatgtgcccctacacatcttcccgccatgatttcttttccatgtattcagatgagaaatgattccgttttcaccactcccagataggccgggttttcccattttataaaagtatatgctgaaccctgtgagtgttgagggattgcagggagccaggtatttatcgctgtgttccccacttctgtgctgccgctccgatttctagagatgtgcagttgagaaacagtagttttctgc

SEQ ID NO: 340283 - DNA, 367 bp, Homo sapiens
gcagtaatttacagtaaactagagagtattcactcttaagaggctggctagatatatgagaaaaacacaagcaagcataggtagagatcatgtaaattagggaaattaaacaaaaattttccagatgtataggtaactaatcacatatgtaagcatcttcaccttcagcagcagcagcagcttaaaataaaaaaaaaaaattttttttggtatttcaggctgggcgtggtcgctcatgcctataatcccagcattttgagaggccaaggtgagaggacagcttaggcccacgagttcaagaccagactggacaacatggcaagactccgtctctacaaaaaaatttaaaaattagccaggtgtgatg

SEQ ID NO: 340284 - DNA, 313 bp, Homo sapiens
gcaaagggctttctgggtgctggtatgatgatccctacagcagagggtataatgggctctggtacctaattctgtgtgaccatggctaaatcacctagcctctttgagcctctgttttctcttctctaaaatgggattaataacagtactgatcttatatccttgttctatgaaagtatcttgtattaagtgttgcatgaaaatatcttgtatagccctggcacatacaaagtgctcagtaaatggtacgtatatttttatcattaacattatgttcctagccaccccttgcatggactctgttaacaaccaa

SEQ ID NO: 340285 - DNA, 414 bp, Homo sapiens
ccagagtttggttattttaactgaagacctcaggatggacaggaaccaagacagtggtggggatcttaaatatagaaacaagtagatagtttcatcaagactcagccattcgattttcttagctctaacatttttcaattccttgtgtcaccctactcaggacgcaagttcctgggagaaggaatttgattggcttatatgcctgtgctttggaaagaatagagaatactttgaccgacagctccaagactgcatgagataaggaaagaggagttcttcagagtattttttttgttggtttgttttttagcctaaggaagttaggtagtgatgcaaaataggcagaaacaaccactggccaaaaccagggtgtatttcactgatgaacagtactgtagaatatgtggaatagtt

SEQ ID NO: 340286 - DNA, 707 bp, Homo sapiens
gggcaagagtgaaaagcagagacatcagttagggggcttgtgcagtagttttaagtaattgcagcttgaaccagggcagtaggagtggagatgtagagaagtagatggaattaggatatgttttgagaggtacagttggctgtaccacttgctgtgtcacctcaggcaagttactcagtatgtgccttttggtcctctgctgtaaaatgagaatactagtatgaaagtactaacttattggtatatgggttttgaaataatattaacagtgcttggcaatgtggtaccactctccctccattgttcttgcttagaaagcctcaaatgtgattaaattcaactcagtgtttgtacttgcacctgagtggccagagatgcaccttgtagccacattgacttgtcttgcttaaatttatgaacattaaggaacttaagttcatgagcactaaggaacattaaggcacactaaggaaccttaattgggtccttagtatgcagcacctgacagtcttacagtttactagtccagtcactcttccactgccacaggatgctttcatatcatctagcctgcttattttcacttgatgaccctagtctttatttgattgagaatttggaaataatcgagacagaatgtctacaaggtcctaccgtagctacctacctgctagcctcttcttactgtagatagttctgaattgtgg

SEQ ID NO: 340287 - DNA, 610 bp, Homo sapiens
ctgagctgggcccctacggctgctcaacagtttcatttacaggaagactctgttcagctcctttcccacacccttcaaggagtgtgggaaacctccaacactccacaactctcttccatcccaacaccacccccagtgccatttctcatccatgtatcaggcacaaactcctgccaccttccacctttccactgccccagctggtccctcctgtccctctgcttgcctagggctaagcctccctgtgtgccctcctgtctctactaatcccctatgtctactctcttcatcctctctacctccagagacggctcctcccagcttgtaaacatgtgcaagtctcttccatcttaaaaaataaagccaaaccctcaaaaaagcctgagggtcccctagacctaccatcctttcactttattccctttcacataaagctgggacctcatgaaggaatagtctgtactcagtgcttcagtttcttcaaccacaattcacttctcaacatgcctccacctggatcccctcaccaccatctcctctacacagccacactcagtcctgagccatactggaatctgaggcaaaagggacaatcagcaatactgacgct

SEQ ID NO: 340288 - DNA, 222 bp, Homo sapiens
agactaaaggaaatcctcgtttacaccaacgtgagcattgtgatagtatcagtctgcccacatcctgaaaatattaagtatttaccaaaaaattctcttctaatttgattggggaaagtgttgttatagcagtttaatttgggtagactttaaaagagtcaatcatagattctttgcatgtttttaaacatgtttcacacagtttaggacaggttgaggaca

SEQ ID NO: 340289 - DNA, 235 bp, Homo sapiens
ggtctgggaatgggggtacaaggactgactacaaagggcatgaaagaatggtgaggctgataggaatgttctacagcttgatcacagtgctcattacataactgtatcaaaactcatagaattgtaaattataaagggtaaattttataaacttatcaaaactcatagaattgtaaattataaagggtaaattttactgcactttatactacaaattatacctcaatacacttga

SEQ ID NO: 340290 - DNA, 1099 bp, Homo sapiens
tgggcagctgcagtccagtgtgtcctaggcatgtgctgtgtgctggggtctttggcagtaggggaaggggttatccctgtcagagagaggagaaggggcttcctggcagagggaacacacagtaaggcattaaaatgtgacagtgtgaaagcatggccagacaggcgcttgagggacggagggagtggtgggaaagtgatagcagggtactttgggggcagatcctgaagggccggccctcagccccatgctggagagtttgaactttagttgatcattggtggagaatcataggtttttacacagagccaggatcggttgagaaagagacagttcacctgttcatctcctgttctccatgcctaagggtacggcaccgtgctggctgagggcagggcctcaacaggtgatggttaaagatggcattatggggctagggaggcctgtgagcagcggtgcagcagccctggcctgatgatgaagggctgaactaaggcagtagcaggaggggtcaaggaaagctcccggaagcaggattcacagcactgagttgatgaggggaggccagagacactagtggcactgtggcgagtgggcctccgagtgctgctctgagtcccgccccagtgctgcggatgaagagcgcgtgccttgctttggcactcgcctgcttggccttgtcttgagccactgccccattctccacatcttcttcagtgtgtttgtcatgttctcacgtaccgcggggtcctccatcatctctccagcagccgccgcctctggtgttctgaaggatgcaccttctgctttgcttcctagctccccttcctgggttgtagtcatgggtctgtgtgattggttattgagggtctgagtctcaggacactggaaggggtgggagcctgccaggactaggccccacggtgttctcagcatggacgataggctcggcaagtagcggccgagtgaaagcctagttaaacgaggaaaacaggctgggtgtggtggctcacgcctgtaatcccaacactttgggaggcggaggcaggtggatcacctgtggtcaggagtttgaggccagcctggccaacatggcaaa

SEQ ID NO: 340291 - DNA, 220 bp, Homo sapiens
acccagctaatttttgcatttgtagtaaagatggggtttcaccatgttggccaggttggtctggaactcctgacctcaagtgatctgcccgcctcggcctcccaaaatgctaggattacaggcgtgagccacggcacccggccagtgacttttaacttcactgatgaattcaaaatctcttacagagctctcttacgctctgtgcgtagctatcatcacg

SEQ ID NO: 340292 - DNA, 214 bp, Homo sapiens
tctacaatgataaatatcaatgaataaataaacaaattggggagaaagaaaagatagctcttacagaaaaattctaatcaatatagaaggaattatggagttagaagatcattaatagatactaaaataccaggtgaaagtctgataaagaacaagatatttacatggtctcaaagtatctccctacaaattacttattaattacaaagggaaa

SEQ ID NO: 340293 - DNA, 206 bp, Homo sapiens
aacatccatttctttcttgtttttggtcccttgggttcttcattaaaaagtgtgtttttttgcctaagctgataggtttgtatttgcaaccaaagagccttgataaaatagtgatttacaatttactaagcacttgcaggtacaataatctcattcgggactcacagtaccctatggaaatgaagagaccagtttcttttaccttg

SEQ ID NO: 340294 - DNA, 607 bp, Homo sapiens
actccagcctgggtgacagagcaagatactgtctcaaaaaaaaaataaataaataaataactcagagccataatttttgggaaacatggttattggcatcagaaagccacactaggaatgcagatccctgttcccattgctattggtgacctgggaaatggaattgataagaaaggaagcaaaaaaattttttttcgttaagcacttcactggttgccgccagttttgtattagaatccagagtttgaaaaagttgattctgtcagattttgccagcttaatggatgcttcagtggagggactggactgattattggaactccctactccatcatttatgtggcatcacctaactgcttttgcttgccttagaacttccagcacagatacgaaaaaaaatggtgagagaagacatccttgccttgttcttacatggaagacattgagtctttcactgttaggtatgttagctatagttatttttaagaaaatctttatcaagtttaggaaatttcccactattgctagttttttgagagttcttatgaatgctatgaattttgtcaaatgattttctgtatttattagtatagtcatgatcatatga

SEQ ID NO: 340295 - DNA, 370 bp, Homo sapiens
cctgcgtcgactgaaaagaaaaccactttcacaattcccatctctttcctggctgtacgtaccccgcatatcctagaacgatatcacaacaacatgttcatatatggctgaaacctggttcaactagatgtccaaaatcaatggagtgcacattatcctacaagtgcagtttgggtggcatgaggggacagaggaggtggcagactcattgtctttctttgctttagcaatagtggcagtgctttttgatttgtatggccagagccttttcttacagcatctgccgtggggagtcacctctctcttgcaagaaagtgctacgatgaagcagagaatgagatataagtcccatggagaaagtactttatgc

SEQ ID NO: 340296 - DNA, 102 bp, Homo sapiens
gaagtgaggggataggaaggatgaaaaatgactcctagattgttggcttgaacatctgggtggtgtcatttactaagataaggaagtctaggagaagaacag

SEQ ID NO: 340297 - DNA, 347 bp, Homo sapiens
agagagaagaaaaaaataggaccctgagtataggcaactttttcagagttttgctatatagtagagattcgtgtgcagtaatcagaggggaagtagagtcaagcgttgtttttaagagttaagaatactgattttgtttgctgctgcttggccttccaagaagaacttagtcctgacaaatgatttaattctttactaatgagaatttaagttatagtggtgacctcaagagaggtcaaaaattgttctaagaaatcagtacacaaatatccaatttcagttgacctcacaggatgcttaaggatcatccacattataacatttctaacagtcttattcttttccaa

SEQ ID NO: 340298 - DNA, 280 bp, Homo sapiens
caaagaagacagtagtttttcagggaccgttaaacacaatcttcagcaaacaaatccagagcagccctcttcccatgagaatatattggtagagttttagggagagatgaggaatttggaatttctggaaattattgcagaggcctacaggatatgatctaggtcagtggtagttgaaactttttttttttttttaaaagaaggaaaccattggaaaaaaaaatcttgctggttccctggtctctgagggcagttccagacctttcttggtcttcctgtg

SEQ ID NO: 340299 - DNA, 634 bp, Homo sapiens
cttgcccccaaggttaatctttattaccaggaagaatatgtgtcccttccccagggaagacctggagtagtccccaaaaaaactgagctgacaagtggttgtagatatttaagtcatctcttggcaccatgtgcccaggaaaggtatcccactaggcttggaccttcgagtggggatcttttccctatctactgggatccttccatactgtctggaactgtcaggatttatgctaacaattcctggaagaaggaaaggctacacttccactgtatagggttaaaactgcagggaggcgggtaatgtactttcacttgaagatgtaattaatattggctggctttatagatatcatcctcaagctcagatggaactcaaaacaatatgctgagatattatgaatccaggactcgacttcgtaagtattttgagttgaatagatttgtgtatgaaaaaggttcataatttttttcaattctacagtattaacatctaacttataaaagaatactggagaactggacacagtggctcatgtctataatcccagcagctcaggaggctaaggtgggaggatggtttgaggctaggagttcaaggccagcctgggcaacatagcaagatcctgtctcta

SEQ ID NO: 340300 - DNA, 427 bp, Homo sapiens
attacagttatgagccaccatccctggccaataaaggtgtttttaatacctataagaatattgcctgcaaggatgtttgataggtttcttgatatttcattctctcttgaaatgtttgcttcgtcaattttttatttttcataaaagctttactcaagaattaggatgaccactatgttatctagtagtataatttggaatcatttattataaatctgaaactgacttgactgatgaatcttgagcactgcttattgtgttctaattttggtagctgtttcaataaagtagctcttgtagaataggaaaactatatcattttagtctgaaataagcttttgattaaaaggttactttttcctattaataaaaaatggagattaagattgcttttcttgctacacaaaattatttacatactttcctg

SEQ ID NO: 340301 - DNA, 207 bp, Homo sapiens
catctaccagtagattaaaattttatgctttgatttacattttttaaaagttagtatttttaatggatatgattttttgatgctgagctgactcagaggaagaacttcaaaacagaaacattaaatgtctcagtgaactgaacaccaaaataccaaaataaagtcatgagattaaatgcttaaggggtgggaccttcagacattttt

SEQ ID NO: 340302 - DNA, 483 bp, Homo sapiens
cccaccctaatccaggatgacctcgtcttaaccagttacttcttcaaaaacgctatatccaaataaggtcacattctgaggttctatgtggacatgaactttggggaacactacacaacccagttcagaccatacagacgtgggagccgttcccctatctaccactttgtagccgtgtgacttcaggcaagtcacatcaccgctttgtgcctctgcttttccacctgtaaaacagaaataacagtcatcatcaccatcatcatcatcatcatcatcatcatcatcgtaatccctgctaggaatgctgccgggcacatagtgatagctatgcagtttggtcagataaagtcagccaagtgcccgtagctgctatgtagaggtaaactgcatggacagccatgtcatcaagggccccactgggggtgacacagaagggaacagactcatagggccaaccagaatgcacagggcagggcgcctacc

SEQ ID NO: 340303 - DNA, 156 bp, Homo sapiens
tgctggctagggattctaaaattatgggaaaactggaaaattgatattagggcaccatctgcccctttggccatgccctctctacttcctgtatacaaaactcactcaccttatccttaagggagaccactgtaaaagttctaactagttgcagca

SEQ ID NO: 340304 - DNA, 1257 bp, Homo sapiens
ggcggcgctgcgggacgaaggcgaggaggaggcggaggtggagctggcggagagcgggaggcggctgcgactgccgcgggaccagatccagcgcatgaacccgcccaagttcagcaaggccgaggacatggccgagctgacctgcctcaacgaggcctcggtcctgcacaacctccgggagcggtactactccggcctcatctacacgtactccggccttttctgtgtggtcatcaacccgtacaagcagcttcccatctacacagaagccattgtggagatgtaccggggcaagaagcgccacgaggtgccaccccacgtgtacgcagtgaccgagggggcctatcggagcatgctgcaggatcgtgaggaccagtccattctctgcactggagagtctggagctgggaagacggaaaacaccaagaaggtcatccagtacctcgcccacgtggcgtcgtctccaaagggcaggaaggagccgggtgtccccgcctccgtcagcaccgtgtcttatggtgagctggagcggcagctgcttcaggccaaccccatcctagaggcctttggcaatgccaagacagtgaagaatgacaactcctcccgattcggcaaattcatccgcatcaactttgatgttgccgggtacatcgtgggcgccaacattgagacctacctgctggagaagtcgcgggccatccgccaggccaaggacgagtgcagcttccacatcttctaccagctgctggggggcgctggagagcagctcaaagccgacctcctcctcgagccctgctcccactaccggttcctgaccaacgggccgtcatcctctcccggccaggagcgggaactcttccaggagacgctggagtcgctgcgggtcctgggattcagccacgaggaaatcatctccatgctgcggatggtctcagcagttctccagtttggcaacattgccttgaagagagaacggaacaccgatcaagccaccatgcctgacaacacagctgcacagaagctctgccgcctcttgggactgggggtgacggatttctcccgagccttgctcacccctcgcatcaaagttggccgagactatgtgcagaaagcccagactaaggaacaggctgacttcgcgctggaggccctggccaaggccacctacgagcgcctcttccgctggctggttctgcgcctcaaccgggccttggaccgcagcccccgccaaggcgcctccttcctgggcatcctgga

SEQ ID NO: 340305 - DNA, 1233 bp, Homo sapiens
ggcggcgctgcgggacgaaggcgaggaggaggcggaggtggagctggcggagagcgggaggcggctgcgactgccgcgggaccagatccagcgcatgaacccgcccaagttcagcaaggccgaggacatggccgagctgacctgcctcaacgaggcctcggtcctgcacaacctccgggagcggtactactccggcctcatctacacgtactccggccttttctgtgtggtcatcaacccgtacaagcagcttcccatctacacagaagccattgtggagatgtaccggggcaagaagcgccacgaggtgccaccccacgtgtacgcagtgaccgagggggcctatcggagcatgctgcaggatcgtgaggaccagtccattctctgcactggagagtctggagctgggaagacggaaaacaccaagaaggtcatccagtacctcgcccacgtggcgtcgtctccaaagggcaggaaggagccgggtgtccccggtgagctggagcggcagctgcttcaggccaaccccatcctagaggcctttggcaatgccaagacagtgaagaatgacaactcctcccgattcggcaaattcatccgcatcaactttgatgttgccgggtacatcgtgggcgccaacattgagacctacctgctggagaagtcgcgggccatccgccaggccaaggacgagtgcagcttccacatcttctaccagctgctggggggcgctggagagcagctcaaagccgacctcctcctcgagccctgctcccactaccggttcctgaccaacgggccgtcatcctctcccggccaggagcgggaactcttccaggagacgctggagtcgctgcgggtcctgggattcagccacgaggaaatcatctccatgctgcggatggtctcagcagttctccagtttggcaacattgccttgaagagagaacggaacaccgatcaagccaccatgcctgacaacacagctgcacagaagctctgccgcctcttgggactgggggtgacggatttctcccgagccttgctcacccctcgcatcaaagttggccgagactatgtgcagaaagcccagactaaggaacaggctgacttcgcgctggaggccctggccaaggccacctacgagcgcctcttccgctggctggttctgcgcctcaaccgggccttggaccgcagcccccgccaaggcgcctccttcctgggcatcctgga

SEQ ID NO: 340306 - DNA, 946 bp, Homo sapiens
  misc_feature (559)..(559): n is a, c, g, or t
gggcctcagcctccggagcagctgggattacaggcgcccgccatcacgcccaggttctccttctctcctctatcctgccactttgtgaagaaggtgcttgcttctccttcaccttccaccatgattgtaagtttcctgaggcctccccagccatgtggaactaggtgacatttttccaacgcctgaatgaatgatgagaaggagccaaacatgaaattctctggggaaacagcattttcttgagcgggaagaatacgttcaaacttctgtggcaaaggagataaggtcaaaatgaaaaatagaatataaaaacttctctactcctgactcaccaacgcaccagaacaacttttagtcctgcaatcatgaagcattgatgtgaacatcttctacatattatcaccaccctagacactacaacaacaaagaagtcaatactagtttcaatttgtggaaagctggaaatgcgatgattcccatgccctgagtttctgctccagacaccaggtgggggcatggcaattgtgactggagagagtggaggggtcatcttatccancacatcagaagctgaggttaggatatgtgtggcagagatgaaaagtgaagtgatgtgaggaaacttcatcctgaattcaataaagccctggaatacttgttcaaataaccagctgacaacttgggggtaaagctgtctgtgaattaacctgtttagctcagccaatacaattatgaaataaaacagttaacagtctactattttgtagtccctggataaagaggcctaaatggtatcctgtaaagttatgcagagtactatctgcatagatctagtcaatgaccttggctagtagcatcattggtttccactttatgtgcatcaattcttctttatatgcagtagttaattacatgcccatatatcttatctcttaactcctgggga

SEQ ID NO: 340307 - DNA, 778 bp, Homo sapiens
  misc_feature (391)..(391): n is a, c, g, or t
gggcctcagcctccggagcagctgggattacaggcgcccgccatcacgcccaggttctccttctctcctctatcctgccactttgtgaagaaggtgcttgcttctccttcaccttccaccatgattaaaaatagaatataaaaacttctctactcctgactcaccaacgcaccagaacaacttttagtcctgcaatcatgaagcattgatgtgaacatcttctacatattatcaccaccctagacactacaacaacaaagaagtcaatactagtttcaatttgtggaaagctggaaatgcgatgattcccatgccctgagtttctgctccagacaccaggtgggggcatggcaattgtgactggagagagtggaggggtcatcttatccancacatcagaagctgaggttaggatatgtgtggcagagatgaaaagtgaagtgatgtgaggaaacttcatcctgaattcaataaagccctggaatacttgttcaaataaccagctgacaacttgggggtaaagctgtctgtgaattaacctgtttagctcagccaatacaattatgaaataaaacagttaacagtctactattttgtagtccctggataaagaggcctaaatggtatcctgtaaagttatgcagagtactatctgcatagatctagtcaatgaccttggctagtagcatcattggtttccactttatgtgcatcaattcttctttatatgcagtagttaattacatgcccatatatcttatctcttaactcctgggga

SEQ ID NO: 340308 - DNA, 881 bp, Homo sapiens
gggcctcagcctccggagcagctgggattacaggcgcccgccatcacgcccaggttctccttctctcctctatcctgccactttgtgaagaaggtgcttgcttctccttcaccttccaccatgattgtaagtttcctgaggcctccccagccatgtggaactaggtgacatttttccaacgcctgaatgaatgatgagaaggagccaaacatgaaattctctggggaaacagcattttcttgagcgggaagaatacgttcaaacttctgtggcaaaggagataaggtcaaaatgaaaaatagaatataaaaacttctctactcctgactcaccaacgcaccagaacaacttttagtcctgcaatcatgaccatccttccttctctaatattctgaccacatgtatcagtattcagaaaaaagcaagagcttcttctcgcaggcgggattgccattgaagaggatgtcaagaaagatgagtcactgttaggattgattcatgatactttattgccaagctgcatttgctgatagagtcatctatatcctggtatccatggaacacagtggaagggaaatctgtccttgtcattacctggccacaggcctcttttaaaagatactagaaaattaattagactgcaaattcacccataaaattaaagtaaaagctacctgggctcagggctctgaaagaggataacttatttggattagaaaatttgtcatgttgagctcaagtagcattaatttgtttagaagagataatgatatttcattattattcccaaccctgaagttagtcaagaaataactaaaataaataccttgtaaatactgactacacataatacttatactctatagcaacatggccacact

SEQ ID NO: 340309 - DNA, 656 bp, Homo sapiens
gaaggggacggtaaaatcatgccagatgtggcaggggtgaagacagtgggggattgggcagagccatggtagacatcccaccgccagggatcagagatgacagggcagcaggcgtgcgggggtggagcccacatgtagatcccccgcccccgcacacagggtcaaagttagctgggatcagggatgacgggggggtgagaagaagcgtggattttatgaagagtagaagaaacagatgtttgttaagacctaacatgtgggaggcactgctgtggacaggagtgagtgagacgcagggccggtcttcatggagtttacaagctggcgggggatacagccctgtggacagataactgtcattacacgggctaaacactagcatagggggaattctaggagatacagggacccacaggtatggcaccagactatggggtcagaataagatctcaccacagaggtatgagcaaaaagaaacaggatatggtctgttcctttcaagcttcccacaggggccaggagccccttttgcaggatgtcttaataaatgggacataaaggtacccatttgtctagagtgcagtgttggctgcagacagtgaacatatgaaatgatgcccttaaaatgccctttggctcaaaacgagtccccttcc

SEQ ID NO: 340310 - DNA, 434 bp, Homo sapiens
gggggcaaacacaggaggcgccggtccccgtgagccagacacaggagggacatgccacttcttccacgcagggactaactagcagcaatgctgcagagacacaggtcacttctcaacattcctggtcaagacagacctcttaaaatcatgggtaaatatccaccgactgcctcctagaagcccgcactgtgctgcacgctgctggggaatactgaggaggggatgtgaaatgtctgtatgtgacccaggacctaactgtggaatggagtccaattctcagggacagagaaagtgctccggtgtgtcctgctggtggagagcacaatcgtcattggagactggatgagctcagggcaggctgatggattattcaggagaggcttcataggggccaggggcctgagctgggctctccaggggtgcagcctgggcag

SEQ ID NO: 340311 - DNA, 378 bp, Homo sapiens
cacttctcaacattcctggtcaagacagacctcttaaaatcatgggtaaatatccaccgactgcctcctagaagcccgcactgtgctgcacgctgctggggaatactgaggaggggatgtgaaatgtctgtatgtgacccaggacctaactgtggaatggagtccaattctcagggacagagaaagtgctccggtgtgtcctgctggtggagagcacaatcgtcattggagactggatgagctcagggcaggctgatggattattcaggagaggcttcataggggccaggggcctgagctgggctctccaggggtgcagcctgggcaggggagaaagggagaactctaggaaggggacggtaaaatcatgccagatgt

SEQ ID NO: 340312 - DNA, 453 bp, Homo sapiens
ccctcccacaaccaggcaggtaggccctggccctagccctcctacaggcccagcacaggtcctggggtacccactggggctttagtggggactcagaacaggactgagggtgaggctgttagggttgcctgaggtctctccaccccactcagcctttcagatgagggccccgaggaggacaggtcacatggcagataggtgagtgcagaccccaggccagccctgcccgtgcctcgaccctctgccacaggtcagttctgtatggaagcctctagaagccgattccagcgtggtaccctctttgcccctggagagctgtgcaggtgcacgagctgtctgcaccggcagcagcctctcggctagaccagggccagtcacggcagccttcaaacctcagcgggctggaggcccatctacacagcctgtcgagcttggcctcctcatagaggccag

SEQ ID NO: 340313 - DNA, 1364 bp, Homo sapiens
atgtggtctgtaagagcctctaaggagaagacttcccttcatgctgttggtgacatgctttctgcttaccagaacagttcattctttcattctagaaacacttactacatatttttgtgagcacttaatgtgtacaagatacctgtcctaagtgctttaggtacggcttattttaatgaagccttagaataactcaaggaggtaagcatttttaggtgaaattctctttacaggtaaggaaactgaaagtttaagtaatctgcccaaggatctccatttaggaagtggcagagctagcacctgaatccaggaggactgacactagggctctgaagcacagtttttatgggtgccccaggagcaatcagagatttagtctgaaaagagagacacattgacacaaaggaacacagcaagtgataagaagtgatccccaggaatgagaaagggcagtgggtagtcttctagacagggagaggtggatttgaatagaaaagaaatgtgagcgggaaagcattccagcaataaaaacaggcatagaagggggaaagtacagggcatgttccagaaaaagcaagtactaaattttgacttgtataaaaggtcaatggggaaagaggtatttgggtcaataagaatccttaaatgctaggtgggaagtttccattttcatctgtggacagtgggagtctgaggatttgtgagtcagggagcagcgtgatgacatctgagctttgagaagctcttagagcatgtatgtaagattacatggaaggagacaccagagagaagaataccagcattgccatggtcgagaggaaagaaaacaatggccagggaataataaggtgatgacagtaggaagagagaagagagaccagatgtgatgatggtgtgggactagagagagaaaagcaagaaagtccttgaaaaggttgtttctgagcctggagattcaggcagtagcagtagggctggggaggatgaatgtggagagctctacctgtgaggtcctggtgggcagtcaggtgggtttgtttgttcacccctttgcccatttattctacagatttctgttgagtacctgctgagtgctggcttctgtgttctgcaaagaggttaggtctagagatgaaaatgtttctggccagccaagcattagcaagtagcacagatgtggaagtgatggaaaccagggatggtaaaggggaatggaaactttgagattacagtggaagagaacagcaagaaaaggagaggaggggtgaggtggattcctagagaccacccacctccagagaaggaggaaacagaagcaggaaaagaggggttagagggacgagggagtctggagagcgttgctg

SEQ ID NO: 340314 - DNA, 609 bp, Homo sapiens
atgtggtctgtaagagcctctaaggagaagacttcccttcatgctgttggtgacatgctttctgcttaccagaacagttcattctttcattctagaaacacttactacatatttttgtgagcacttaatgtgtacaagatacctgtcctaagtgctttaggtacggcttattttaatgaagccttagaataactcaaggaggtaagcatttttaggtgaaattctctttacaggtaaggaaactgaaagtttaagtaatctgcccaaggatctccatttaggaagtggcagagctagcacctgaatccaggaggactgacactagggctctgaagcacagtttttatgggtgccccaggagcaatcagagatttagtctgaaaagagagacacattgacacaaaggaacacagcaagtgataagaagtgatccccaggaatgagaaagggcagtgggtagtcttctagacagggagaggtggatttgaatagaaaagaaatgtgagcgggaaagcattccagcaataaaaacaggcatttaggtaacagccatttaggtaacagccatttaggtaacagccatttaggtaacagccatttgggtaacag

SEQ ID NO: 340315 - DNA, 584 bp, Homo sapiens
aaacatgctatgattaaagagtattacgctttgctctttctgtagtccccaagaaagcctatttggtcctccctatggtccagtacaggtgattaagagaaaaaagtcagggtatcactttttgataggtattattcagctttgatgaactaactctggtatctagtttgagtgtatatgaataagagtggggaaaaaaggcagggaagaagaaagggagtatttttaaaaaggcacatactagtctaaacagggagagaaaagagcaatatttttacattcattttttgataataaactagtaattccagtctatcaagctgattaccttaagattatattaaccagacctcaagctgtcaccaaatcaaacacagtgatacatcagcagtcacaaaacagcttaattcaatgacaacattatttcacatattcaaataagctcatttttaagtgggataaccacatatctttgtgggggaaaagaaaacttcaaaatgtaaaatgtgttaatacaaaatattacatcagagaagaaaatatggctatatgtgaaatgaggggaaatggaaactcagatgtac

SEQ ID NO: 340316 - DNA, 296 bp, Homo sapiens
gcccacacaacataattttaggatacttcacactattcaaggtaagtacacaaccaccaccaccaccaccaccaccaccgaaacagcaacaacaaacatgctatgattaaagagtattacgctttgctctttctgtagtccccaagaaagcctatttggtcctccctatggtccagtacaggtgattaagagaaaaaagtcagggtatcactttttgataggtattattcagctttgatgaactaactctggtatctagtttgagtgtatatgaataagagtggggaaaaaaggca

SEQ ID NO: 340317 - DNA, 183 bp, Homo sapiens
ccataaccctaagaaaaagttaagaactactgctctattagaaatgaaatgttttatgctttgaagatgtttctggaaaactattgattttctgttctgtttactttgaattgcttggaagataatttgaaaattgacctccaaagaaacttagtcagcgctgtgtgtggaatatattgtaaa

SEQ ID NO: 340318 - DNA, 144 bp, Homo sapiens
taatggctgattaaaaacagtatttgaaaaccaaagagttctcagttaaaataatttccctaaaaagtagttaatgcgacgttttgaaaacatttttaaaatattaaatcagatgttaatgcagcgttaactcaaaatcaacga

SEQ ID NO: 340319 - DNA, 249 bp, Homo sapiens
gggtcactgcttaagcaggaaataaaactgagaaggggctaaaaaggatgatcagaaaggaagattaccacagaaatctgtatcctatgtaaaagttaaaatgaaatctaaaaaatatttctctaaactcaactgtccttgtagtttaaatcatcgaatttttcattggcgagcctatcctttactgctagtctgtcctaaaaccagttgtcatatagcattagcgacatgtctcatgccttacctgta

SEQ ID NO: 340320 - DNA, 288 bp, Homo sapiens
aaactcataactaactctcgtgtaaaaaaatcacatcccaacaaatatctcatttattaaatttaaaaattgacaacaatttttttggttctgttgagtcacttacattgtgtttatttttagacgggggggaaaatattaaatacttactactaagaaaatgtaacacaggacaatattgataacaaaatttacccaaatctacactctgacttacttattgctattaaggactgaaaacatgtgctccagaaaagcaggattttgtgtctggtttgttcactgctg

SEQ ID NO: 340321 - DNA, 499 bp, Homo sapiens
gttcccatccactctctccacctctgtcactttccacggtgagaggactttctgaaaatgtgaggcatattaacgagttctatagcagagaagttcttcctccctcctcaaagatcaggagaaatgatcaatcaaaattctggagaattttaagaaaaacaagagtttcatgaagtataaacattgaaaggttcatactagaccacatgaagtatgatgtatatccttatgccaagaacaccaggaagtcaccaacactgatcctaacccagcgtaattgctactagaaggtgaccttggccagctgcgtacatttccaggtctcaaccacgttaccaacaagggagggtgtaactcacatgactatctgacaagcataatgtaatgtacccattagtaaacgttacaagcaacgtgcacagccctttaaaatttccttacattcctcatcagccctatgaagtatcttctgtctactttagcaaagaaccacctgagg

SEQ ID NO: 340322 - DNA, 282 bp, Homo sapiens
ctcttctgggaatctgttctgtagaaataaaagtatcaacatataaaggtatatgtatggatatttttataatgtttccaatatttgctactaaaaacagcctgaatatccatcaatagtaggaagtataaattgtcatttacctgtactgtggaatatttcgcaactcagagaatgtgttataagtctgtatgtatttacctggagggatgtctgtaatagattgtagagtaagacaaacaagttataaagaaatgtgtataataagatcccatttttata

SEQ ID NO: 340323 - DNA, 498 bp, Homo sapiens
ccggttcaatgtgtatgtgccacttacaatctagatttatgatcatgcctcttagtctccattttcccaaattaaatccatgtgatctcatctgcagtaccctctcaggcttcagttatgtcagttctccaatgggagacctcatctagctctgtcgcagttcaggattagactagataaagcccaaggtaattcccctttcctgaagcaatgtaaattccgtagttttagcctgtcctgttttcagcctcctggaattgcctcaagtgaaggcattactgttctatagcttttcattcactatgaaaaatggtcccaaaattatcttcagcattctaattgaagcagatagcctgcattgcaccttttttcatagtcaccaattgcctaaaataattagctattataagtgtccttcagttcctcctcttaataattttggctgctctttaagtttcttgacctctttttgtgccacagtacatgcagaagtgtgtg

SEQ ID NO: 340324 - DNA, 309 bp, Homo sapiens
caggggagtgcagcatgtacccttgggctggcctgcaatggccccactctcctgaaataggagtgcattccaggtactatgtgtcctagcatacaaggtctctgtcggatcacgcataagccatgtgatgcactgagataagaagaaataaacaccaagatgccccaagataacaagaaggatcgaaatagctccatgttcagtaaatccttcatcatgaaaataatgcctcataacattctgttcttacttcccaaaccactagtacttggtttttcaaattcacattgattttgtacatgaggtctg

SEQ ID NO: 340325 - DNA, 470 bp, Homo sapiens
aaacaaaatcagggtcataataattaatactgctgaatcagattcaaaagattggtgtttctgtggataaattaccattttcatttgatgaaatggatttacttggggattggttgaatcaccggatcatgcaattctaaattattgtgttagcattataattgatcctggccaataggagcgaggagagagatagctttcctttttctacctgaatgtcctgctctatcttcaagcaagaatgtagcagggctggattattgtttgtgcacctaatccattgagcagtgttcactagttgttgcgagaagtcagggaccccaaacggagggactggctgaagccatggcagaagaacgtggattgtgaagatttcatggacatttgttagttccccaaattaatacttttgtaatttcttatgcctgtctttacttcagtctcttaatcctgtcagctgaggaggatta

SEQ ID NO: 340326 - DNA, 372 bp, Homo sapiens
aattatggtgcttaccaaccaaagacatgaaaattgtctctatttgtttgacaggggtatttgttttcaacaatgtcagcactttgacctcttcaggcatgattatcaaatgcattttgaacataaaacaactttagcatttctaaatatgagtcaaaaggacaaacaggtcaactctcacccttccctctagttgaagatatcccttactgccgagtgggttgtgttctctaacatctgttcaagaactgaatgccacattctttatggggtctggacctgtatctacttagtaccatcatatagtaactgtgttgtgtgcaaggaaatggtacagaacatatgataaagacaagagttcctcaagatata

SEQ ID NO: 340327 - DNA, 102 bp, Homo sapiens
taaactgtaccccttcacaatcttaattttaaacattactctcttaactaccacccatctcccgcaagtgtttcttcattccatctagtataaaatgtttag

SEQ ID NO: 340328 - DNA, 619 bp, Homo sapiens
aggaaatgaccggacttaatgtgcttgtgacctagttccaaccaatgaggaagaagggattgacagagcaaacaccaaaatgagcaggaaagagaacactgacagtctgtaaggacaggccaggcagacacctgtgccccagccaccaccaagacaggcctcaaccgctccaggtaccgaggcaggtccacacccccctccgcagagccacggcccatcttctccaacttcccgtgggagaatgaggtccctgaacggacttgggtggctgctaggggagtgagctccgcaggtgccctcagtgtaaaggacgcacatgcaaagtgcttccttgtttcagtgattactaagcattacaggtgatgcccttcttactcccttgaaccccaacaagagttctctctttgtccacgaaacaatcccaagtctctgtcctgatggtgtttacagtctaacagagagcaagatgagtgaggttcaatctcagctttgcatttgttgacaacattgcaatgctcggaatccaagaaaggcagatgagtccttgcttcactgagcttacagtcctgtgggggaggcagaaactaaagctactgcacgcgtgcacacaaacacatac

SEQ ID NO: 340329 - DNA, 88 bp, Homo sapiens
ccatacaaagttgcaaaaatatttactattagcaatttaagtccaacaatatataagaagaataggccagttgtggtggctcacatgg

SEQ ID NO: 340330 - DNA, 613 bp, Homo sapiens
atacattattaatgtattcctccaatactgacctcttacactcggctaaacattaaagatggaatgaactggacctggttctagccacgaaagaactgatagtctactaagatatatacaataatcagtggtgtgacctgaaggataacaagttagagttaactacaaaaagtgtaggaaataggggtgggacaggaagaaagatccaggcaaaagcaacatcatctacaaatgttaaggggcaagaatgcacagggcaagtctgagaaactgagatggggcttgggttgtaaattgataagcaattgaccagcttccccagcatagcattaaatgactatgatataatttctttcatatcaaaattatattttattacagaccatgggacctctgagattaaacaagagttttctataccatggaggttaaaatcttttagtagcaacctcatactttacctacctgatgattagttaagtaacgtgaaatacatatcttccacatcatctgtattactttggggcttatcacaagaattgaatatagttgatgcctaaaaacatatctttagtcacttgatgcctctcacacaaacacttctacaagcaga

SEQ ID NO: 340331 - DNA, 617 bp, Homo sapiens
gatcttatggggctttaaatgattgcaagagatcaaggtcccctattttctgtctcatctgggagattgagcctcacttaatgcaggtgctttcttctcatatctgcctgccaagaagaaaatagagaattgaatggttaagcctaggaggtacttaaatgtttaagcccacatagaagatgagcaaccccagattaggtcatgaactcaaatgctggtttctcttgggtcttgcaaatcaggagtacctgtttctgcatatcctggggcttctgcttttgcctttggatccgggggttgggaggactcaagggacgttccagatgagagtgtagaaccaattatgtgcggaccctttcttgcaactagtagatgttctccctgtggaaatttgctttggcattttcccatatcttcttttcagtgtcctaactattaaatcttgttcctcttacactttgcacatactgaggttctcagtcagaaagttcttaccttttgtttccctaatttcaacttactccttaattcagcctccaacttccaatactgttgtccttcctttgatattctctttccccatcttttcaggtaagaactccactttataaaagctc

SEQ ID NO: 340332 - DNA, 354 bp, Homo sapiens
ggggtgttggtctggcgtttatgggaaaggctggggatgctaaatgtcctatactgcctgggacagtcccacaaaagggagctttctactgcccaaaataattaatagctccccaaatagaaacactgttcaaatgacttttcagactaacttctcatgacgctattaggagagggggtaaaggcaccaaatcacggtgatcttaagtggcctcccgaaggtctcatgtacagcgctctactgtgattctctgcgtggcctttactgcctgacatttacttgggtatttgcttactgcctgtgatcttcccaccagaaagtgagtcccacataaacaggggtctagtcctaatt

SEQ ID NO: 340333 - DNA, 229 bp, Homo sapiens
aggtgtgagccaccacacccagcctattttcactctcttaatgatgtctttggaagtgcaaaagttttgaattttgaagaagtctaatttatcaattttattgtgatctatctatctatagagctatacatacagacatttcctgatttacaatggttcaacctacaatttttgactttactgtggtatgaaagccatatacatgcagcagaaatcatgccaagtaccc

SEQ ID NO: 340334 - DNA, 163 bp, Homo sapiens
cagtggactgttcggagggagaggcatgcggctggaaggggcagcagcacagtcgccctgggtcacagactgacttccttttgaggaagggcaggaagtcccctgtggccagaggtggcaggccgcggggaggggacggggaggtgggcagtggatcccagcg

SEQ ID NO: 340335 - DNA, 3280 bp, Homo sapiens
  misc_feature (1207)..(1207): n is a, c, g, or t
  misc_feature (1209)..(1209): n is a, c, g, or t
  misc_feature (1324)..(1324): n is a, c, g, or t
  misc_feature (1696)..(1696): n is a, c, g, or t
  misc_feature (1706)..(1706): n is a, c, g, or t
agcggagttctcccgcccgtttcagcggcgcagcttctgtagttgggctactggaggggtcgctcagaaacctcatacttctcgggtcagggaaggtttgggaggatgctgaggcctgagatctcatcaacctcgccttctgccccggcggtttccccgtcgtcgggagaaacccgctcacctcagggtccccgctacaatttcggactccaggagactccacagagccgcccttcggtccaggtggtctctgcatccacctgtcctggcacgtcaggagctgcgggcgaccggagcagcagcagcagcagccttccctgccccgcgccaaactcccggccagctcaaggttcatactttggaaacaaaagagcttatgcagaaaacacagttgcatcaaattttacttttggtgcaagctcatcttctgcacgagatactaattatcctcaaacacttaaaactccattgtctactggaaatcctcagagatcaggttataagagctggacaccacaagtgggatattcagcttcatcctcatctgcgatttctgcacactccccatcagttattgtagctgttgtagaagggagaggacttgccagaggtgaaataggaatggcaagtattgatttaaaaaacccccaaattatactatcccagtttgcagacaacacaacatatgcaaaggtgatcactaaacttaaaattttatcacctttggaaataataatgtcaaatactgcttgtgctgtggggaattccaccaagttgttcactctgatcacagaaaatttcaagaatgttaatttcactactatccaaaggaaatacttcaatgaaacaaaaggattagagtacattgaacagttatgcatagcagaattcagcactgtcctaatggaggttcagtccaagtattactgccttgcagctgttgcagctttgttaaaatatgttgaatttattcaaaattcagtttatgcaccaaaatcactgaagatttgtttccagggtagtgaacagacagccatgatagattcatcatcagcccaaaaccttgaattgttaattaataatcaagactataggaataatcacactctctttggtgttctaaattatactaagactcctggagggagtagacgacttcgttctaatatattagagcctctagttgatattgaaaccattaacatgngnttagattgtgttcaagaactacttcaagatgaggaactattttttggacttcaatcagttatatcaagatttcttgatacagagcagcttctttctgttttagtccaaattccanagcaagacacggtcaatgctgctgaatcaaagataacaaatttaatatacttaaaacataccttggaacttgtggatcctttaaagattgctatgaagaactgtaacacacctttattaagagcttactatggttccttggaagacaagaggtttggaatcatacttgaaaagattaaaacagtaattaatgatgatgcaagatacatgaaaggatgcctaaacatgaggactcagaagtgctatgcagtgaggtctaacataaatgaatttcttgacatagcaagaagaacatacacagagattgtagatgacatagcaggaatgatatcacaacttggagaaaaatatagtctacctttaaggacaagtnttagctctgntcgaggatttttcatccagatgactacagattgtatagccctacctagtgatcaacttccttcagaatttattaagatttctaaagtgaaaaattcttacagctttacatcagcagatttaattaaaatgaatgaaagatgccaagaatctttgagagaaatctatcacatgacttatatgatagtgtgcaaactgcttagtgagatttatgaacatattcattgcttatataaactatctgacactgtgtcaatgctggatatgctactgtcatttgctcatgcctgcactctttctgactatgttcgaccagaatttactgatactttagcaatcaaacagggatggcatcctattcttgaaaaaatatctgcggaaaaacctattgccaacaatacctatgttacagaagggagtaattttttgatcataactggaccaaacatgagtggaaaatccacatatttaaaacagattgctctttgtcagattatggcccagattggatcatatgttccagcagaatattcttcctttagaattgctaaacagatttttacaagaattagtactgatgatgatatcgaaacaaattcatcaacatttatgaaagaaatgaaagagatagcatatattctacataatgctaatgacaaatcgctcatattaattgatgaacttggcagaggtactaatacggaagaaggtattggcatttgttatgctgtttgtgaatatctactgagcttaaaggcatttacactgtttgctacacatttcctggaactatgccatattgatgccctgtatcctaatgtagaaaacatgcattttgaagttcaacatgtaaagaatacctcaagaaataaagaagcaattttgtatacctacaaactttctaagggactcacagaagagaaaaattatggattaaaagctgcagaggtgtcatcacttccaccatcaattgtcttggatgccaaggaaatcacaactcaaattacgagacaaattttgcaaaaccaaaggagtacccctgagatggaaagacagagagctgtgtaccatctagccactaggcttgttcaaactgctcgaaactctcaattggatccagacagtttacgaatatatttaagtaacctcaagaagaagtacaaagaagattttcccaggactgaacaagttccagaaaagactgaagaataatcacaattctaatgtaataatatatcttaattcaaggaacctagaatttatttttctccttagagataaggaaaataacatttgccaaatttcatattttaattgaaaattacattatattaacatcacaattgtcatctatatattctatatgaaaaatatttattataacttaacaaatgagaactacttaaaggaatggtttttatgttaggagaaaatacaatacaccacttttttctcacaaaaattcacattattaagacctaagttcatttatacttacaagttatagtttaaaatattattgtaaataccctagtttaataaacacctggcctcgttggccttatcgggggagcca

SEQ ID NO: 340336 - DNA, 3272 bp, Homo sapiens
  misc_feature (1207)..(1207): n is a, c, g, or t
  misc_feature (1209)..(1209): n is a, c, g, or t
  misc_feature (1324)..(1324): n is a, c, g, or t
  misc_feature (1696)..(1696): n is a, c, g, or t
  misc_feature (1706)..(1706): n is a, c, g, or t
agcggagttctcccgcccgtttcagcggcgcagcttctgtagttgggctactggaggggtcgctcagaaacctcatacttctcgggtcagggaaggtttgggaggatgctgaggcctgagatctcatcaacctcgccttctgccccggcggtttccccgtcgtcgggagaaacccgctcacctcagggtccccgctacaatttcggactccaggagactccacagagccgcccttcggtccaggtggtctctgcatccacctgtcctggcacgtcaggagctgcgggcgaccggagcagcagcagcagcagccttccctgccccgcgccaaactcccggccagctcaaggttcatactttggaaacaaaagagcttatgcagaaaacacagttgcatcaaattttacttttggtgcaagctcatcttctgcacgagatactaattatcctcaaacacttaaaactccattgtctactggaaatcctcagagatcaggttataagagctggacaccacaagtgggatattcagcttcatcctcatctgcgatttctgcacactccccatcagttattgtagctgttgtagaagggagaggacttgccagaggtgaaataggaatggcaagtattgatttaaaaaacccccaaattatactatcccagtttgcagacaacacaacatatgcaaaggtgatcactaaacttaaaattttatcacctttggaaataataatgtcaaatactgcttgtgctgtggggaattccaccaagttgttcactctgatcacagaaaatttcaagaatgttaatttcactactatccaaaggaaatacttcaatgaaacaaaaggattagagtacattgaacagttatgcatagcagaattcagcactgtcctaatggaggttcagtccaagtattactgccttgcagctgttgcagctttgttaaaatatgttgaatttattcaaaattcagtttatgcaccaaaatcactgaagatttgtttccagggtagtgaacagacagccatgatagattcatcatcagcccaaaaccttgaattgttaattaataatcaagactataggaataatcacactctctttggtgttctaaattatactaagactcctggagggagtagacgacttcgttctaatatattagagcctctagttgatattgaaaccattaacatgngnttagattgtgttcaagaactacttcaagatgaggaactattttttggacttcaatcagttatatcaagatttcttgatacagagcagcttctttctgttttagtccaaattccanagcaagacacggtcaatgctgctgaatcaaagataacaaatttaatatacttaaaacataccttggaacttgtggatcctttaaagattgctatgaagaactgtaacacacctttattaagagcttactatggttccttggaagacaagaggtttggaatcatacttgaaaagattaaaacagtaattaatgatgatgcaagatacatgaaaggatgcctaaacatgaggactcagaagtgctatgcagtgaggtctaacataaatgaatttcttgacatagcaagaagaacatacacagagattgtagatgacatagcaggaatgatatcacaacttggagaaaaatatagtctacctttaaggacaagtnttagctctgntcgaggatttttcatccagatgactacagattgtatagccctacctagtgatcaacttccttcagaatttattaagatttctaaagtgaaaaattcttacagctttacatcagcagatttaattaaaatgaatgaaagatgccaagaatctttgagagaaatctatcacatgacttatatgatagtgtgcaaactgcttagtgagatttatgaacatattcattgcttatataaactatctgacactgtgtcaatgctggatatgctactgtcatttgctcatgcctgcactctttctgactatgttcgaccagaatttactgatactttagcaatcaaacagggatggcatcctattcttgaaaaaatatctgcggaaaaacctattgccaacaatacctatgttacagaagggagtaattttttgatcataactggaccaaacatgagtggaaaatccacatatttaaaacagattgctctttgtcagattatggcccagattggatcatatgttccagcagaatattcttcctttagaattgctaaacagatttttacaagaattagtactgatgatgatatcgaaacaaattcatcaacatttatgaaagaaatgaaagagatagcatatattctacataatgctaatgacaaatcgctcatattaattgatgaacttggcagaggtactaatacggaagaaggtattggcatttgttatgctgtttgtgaatatctactgagcttaaaggcatttacactgtttgctacacatttcctggaactatgccatattgatgccctgtatcctaatgtagaaaacatgcattttgaagttcaacatgtaaagaatacctcaagaaataaagaagcaattttgtatacctacaaactttctaagggactcacagaagagaaaaattatggattaaaagctgcagaggtgtcatcacttccaccatcaattgtcttggatgccaaggaaatcacaactcaaattacgagacaaattttgcaaaaccaaaggagtacccctgagatggaaagacagagagctgtgtaccatctagccactaggcttgttcaaactgctcgaaactctcaattggatccagacagtttacgaatatatttaagtaacctcaagaagaagtacaaagaagattttcccaggactgaacaagttccagaaaagactgaagaataatcacaattctaatgtaataatatatcttaattcaaggaacctagaatttatttttctccttagagataaggaaaataacatttgccaaatttcatattttaattgaaaattacattatattaacatcacaattgtcatctatatattctatatgaaaaatatttattataacttaacaaatgagaactacttaaaggaatggtttttatgttaggagaaaatacaatacaccacttttttctcacaaaaattcacattattaagacctaagttcatttatacttacaagttatagtttaaaatattattgtaaataccctagtttaataaacacctttctttttaggtctggaaac

SEQ ID NO: 340337 - DNA, 264 bp, Homo sapiens
tgattgtcaggctgatttctcttcccatctccacacttggtctgtcctgccttgcacagaggcatgcagacaccccagtatacttgtctagactctgctcacacctatggtaatagctactcctcaggccaaggggtgtggtacatgctggacccagtcttgaaaaaagaggtcctgtaagacctagaagcaggcttgggtgatttgagtgtgggattctagagttctgtgtgtcttggcatccggtcataaaatcagtgggca

SEQ ID NO: 340338 - DNA, 803 bp, Homo sapiens
ttacacagatgatatattcatttagtaagtcaatgaatattcattgagtacttactatgtcccaggcattgttgtagatcctgcagtagtgaataaaattcttgtccttgtagaacttctattctagtgggagagctcatcaataagcaagataaataagtaaaatacagaatatggtaagtgctaagaagaaaaaataaagcagaaaaaagacaatagaaattcaagggaggagggcatttgaaattttaaataaggtagccaaggaagtcctcactgaaaaactatctttggagtaaggacttgaaggaagtgagggagctacctgtgtgaagggctaggagaagcccagtaatccaggcagattaataacatgtacaaaagacccaaggtgcatgcctcaaagacggcaaggagaacagtgagccggtgctgagtgaatgaacgggagagtactagaaaaagatggggagcatggggtgtagaccgtgccatatagagccttgttagtaagaattctaatgagaagtcattggattttaagcagaagagtggcacaatcagatttttcttttttttttttaagagatggggtcttgctatatcggctaggttggtcttgaactcctggcctcaagcattcctcccacctcagcctcccaaactgctaggattacaagtgtgagccaccgcaccccgtcagcacaatcagactgacattcgaagagcattattggttggctgtattgagaacagattgcaagggggcaagggccaagagaccaattagggtggtgttattc

SEQ ID NO: 340339 - DNA, 298 bp, Homo sapiens
acagtatgaagagaaaattcaaatgagaatctaatttcagctttgatgccagttactcttgtgactttgaggaagttctttaactctgtttgtattgagtttaagagaggtgacttctaagagttctgccagccttaaaattatttgattctgtacatttttccttagctctaaaatagggacaataatatttgtactatctcacagtgttgataggagaattaagttcttttactcaatagaatctgtaattttgcatttgtgtaattatttgcttaatgcctatcaccccagcagg

SEQ ID NO: 340340 - DNA, 306 bp, Homo sapiens
ttctaaatatctttatagatctgatttaaagctatgatcagggaggctgaagtgactagaatttgtggagcagaatgctagaagggaaataatttcacagagaggaaactctggcaatctgcataagagtgcccttgaatctctggctgggaactgggtacagggagaaactccaggaggctggggaaaggagtacttgaaagttgaacaagggaaatttgaaactatgttgaacagaataaaattgaaaacagtatagcagactgtgtgggatttaaactaaggcagtgtggagggaaatttata

SEQ ID NO: 340341 - DNA, 310 bp, Homo sapiens
cctcggctccctcatctgcagagccaggaggaggacgcctcccccaggatggaggtaaaatacagaacacctgataactctgaatttcagataaacaacaagcagcttttctagtataaatacatcccaaattttgcatccttacacaaaaaaacaaagtcatgcctggggtatctgcaattcgggtttactgggcatcctgttttcattcgcaacctctggcagccctactctacctgacccaccttttcataaagatgaatgagccccgagccctgccttctggagtacctgtcaccgtggtgtcccc

SEQ ID NO: 340342 - DNA, 813 bp, Homo sapiens
gtgtgtgtcatgagatacttatagcaagaattttcattgataacttagccaatgtttattgaacaacaaccatgggccagacactgggtcaatgctctacctatcattgacctatcttttcacttgtcatctaaattgaatcctcgcagtgggaaaggcagtgtcatccctgttgacgtgatctggaaacagtgcgttagagagtataggagacttgccaaggtattatggattgaattgtgtccctgaccccaagaaatgtgttgaaatcctaaccttccccacctgtgaatgtgacgttatttggaaaaagggtctttgtggatgatcaagttaggaaggagtcattaggatgggtcctgatccaatatgactggtagaaaaaccagggagatttggacacagagggaagaccatgtgaagactcagggagaagaggaaggacagccatctgtaagccaaggaatgccagcgatttctaggagggaggcctagacgagatccttcccccacagtcctcagaaagagccaaccctgccaacagcctgatagcgaacttttagcttccagaaccatgagacaatatatgtttgttgttgaagccacttagcctgtgatactttgtatgggagccccaggaagtaactacacaagctcacccaaactgtgggtggtggagctggtgtgtatgtgtccaggccctgcctgtccccgcagttatgcagtgtagcctgcacactgctggtttccttgatgagggcccagccagtgcctggatgtgctcccgtgggccttggatgtttaggagttggt

SEQ ID NO: 340343 - DNA, 545 bp, Homo sapiens
agcagggagagggaagccagagaccagtggtcctgctgtgttgaggagatggagatcagtgtcaccggaggccaaggtgagtaagtgagaggagaggaggcagcagcacacagacagagagtgctgtagatctgcagtgggtcccctggagtccttggttgagtgaaggtgttagaagaaactacttaagccaagaaatgagtaactggaaattagtagagcaaataatttacagatcatctatggggctgggaaaagtttgtgtttccactagccagagtagaaataactcataatgcatgggtcatcaggtggagtcctccaacaggtgttgccttagtactgaggtcaaattgtccctagaccaaaggcttctttggacttcccctaacaaagcttaaagacaagccttggaaggatcaaactaatttcaagaaacttaactgtgaatcagaataaaacccaataccatttataggaatataacaaaatccatcaacaaacaacataacactcataattaccaacattcagtaaaaaattac

SEQ ID NO: 340344 - DNA, 331 bp, Homo sapiens
ccatttccaaaagtcacttcttactcaataacagacacctctgttcacagagatctactgtaatacaccttacttctgctttcgctagaactgtctctttgtaaccttcatccaaaacctcctaagaaacagatcaattctacaccttcaaatgacaaccttttctgttgccaaatccagggactatgtatcctctgagtactaacttctgtaagacaaaagtggactttgagtagggacatgtatgtgccaaggaagtcagctgcacgtcagagagttagaattttgctcaaggagtaacttagctgttggttttctacctaaagcaaag

SEQ ID NO: 340345 - DNA, 1355 bp, Homo sapiens
gtattggcgcacgatggcgcgtccctaagttttcagtgtagaagggggtgtggctctcggagtttggggaaagaataaaggagatgggcctgtctctgagtgggaaagggctactggacgggctccatgtagtgactgagcgcctgagaggggtttgctccctagctttgtgttcggggagggtgttgggaaagcggtaaggagtagggtggctggatcttgtttggagagggagatgtggtcagggttcttgccttagtaaggaacaaatctagtgttgtgtgttcctaccagagccagaaaggaagggcccaaagctccagaattcttcctggtcctcgaaggagggaactagaatttctgctgtaggaggtacttatgcagtaatctcgttgggaggcggagactggagttggagtcttaagagttgtgtatttgcgaacatcctaagcacgttcttggttatttcaatggtagcttattggaggtgcttgggacatggggggaggcggaaacctggtaagccaactcgtgatgctgccactatgaatgctttccttgcacttttaaacaaagaaattatcaagagtgacgagtttgatgaatttagaggctagaaagtagagggttcctatttcattagattttccagagagattggattttaaggatggagatgcattaagggatctgaactttggtggaagtaagtttgcgtgaacttttagtgtattttaaaatccttttatctttcaaaaattgacgtgtaagacactttaattagtaataaagtgtgaaataatgttttcccagtgtgtgaaattgtaggcttgcatggttgtactggttcccaaatttcaccatgataccatgtgtagtattttttttctttatatttagtggacagaaattgtaatggattgatatggatactaaaggtgttgagagtgttatcacttgaacagctgtcttatgattctttccgattgaaatggattacaagtgactaatgaaaggcaagggatcttgttaggaagtgctgagaagtggtaagtcagtacaaattgaagacggacattttgaggtaggattgtggttaggatggagggatagggtaagggtcttcattttaaggataaatgttagtaaaaagaataaatatgtattttgagatattaaaattatatttgcaccaccctgacacaactgtttcacttatgttattaatctgttgttcgtaggtaaaaataagcatgagtcccaaggaagcatacagtttaaagagaaacattactttctagatcaattcataacatttgcagatcgtaaggttttttagaccattttttttttcc

SEQ ID NO: 340346 - DNA, 602 bp, Homo sapiens
gatgattcaggggcctcagaaacccacagctagagtgtaggtttgtctcaatggatccagcaaccgtgtccctatgtccagcaatctcccacccatgtccctggacctctccagagcattggacaccactgacctggccaccctgaggtcccctcacaggatttcaggccattatgctttccaaggccttcatcctcccacgctggtgggcgccagggtggctggggaatgggcctgggtgtctgaatgttgatcgcaccccgagtggttctgcgcacatcagggggaggaccctggggctctctggaggctctgcctcctcctctttcacctgcccctgagtgtgggtgtgcccctgaggtctgccctcaccctcttcccaccttttctcccgtgagctcacctgaccccacggcctcagctcccgcctccaagtggcaactgacagattttctaatatccagctcagttgttactcccaagctctggcagcctgtggcagcttcaccttggacctgctcttcctctggattccccacttgctgtccttgtcctaacttctgaaggtgacgtgtgaacggtgccctgaggctgtgacctgt

SEQ ID NO: 340347 - DNA, 170 bp, Homo sapiens
ctgcatcagtagcacctgcactctagggtgctaatgaaagctatttacagggatgtatctcatctgaggcactctgctataaattgcccaatgtgtgtgtacacatgtgtgtgtacgtgtgtgtgtatggtgggtgctaggggtagctgctacctgccacgtactggaga

SEQ ID NO: 340348 - DNA, 544 bp, Homo sapiens
gctccgcccctctctgctgctcctgccctctctctgctcggccccttcttcttatgcaagggggcttataaagccaacgggatctgcaagagcagatgctcgcaggggctctttgatggaggattatgtatccaaacagttcctccctggtatctggtgcactgaaaggctctgggggttcaaggtgcctgtatggggaagatgctgaggcctctcagtagtctctgaatactggaagtataaaaagcgagaaattccataaaagtagagaaagtgtcaaaggacagagtctaggaattgaagagtctctcaaggcagatggtaagaggggtctctgagtagaaatactgggcagagtctctgatggaagatgctagggccagggtggggttaggagacctgacgtgtggcgaagaggggcccccgacacaaaggccaggcccaaatggcctttcacagggtctagtacccctggaagctctgagcgcggctagcatgtgtgtgggatgggggtctgaaggaaaatgctaaagaggactctctt

SEQ ID NO: 340349 - DNA, 470 bp, Homo sapiens
gggaggctgaggcaggagaatcgcttgaacccaggaggtggaggttgcagtgagctgagatggcgccactgcactccagcctggacgacatagtgaaacaattctgtctcggaaaaaagaaaaagaaaaagaaaacaagaaggcctgtggggggaagggacatctgacaatgatcctggggtccaaggaggctgaaagcagaagctgaaaacccctgactgcagacgttagggaccttgaaacgatctgagggcagattctgaggcctgatgtgaggataagggatctgtgaaaaaagcagctagaacccaggttggtttttgaaggcagaggctgggtctagggtggggttggggaggcgagtctctgatggaaggggctagaagccaacgggatctgcaagagcagatgctcgcaggggctctttgatggaggattatgtatccaaacagttcctccctggtatctgg

SEQ ID NO: 340350 - DNA, 694 bp, Homo sapiens
gttcttcctgtagggctgaagcagtgcctactcgatagaatcagtcatcatgcaaataaaagccacctgagtcaaaggcaaagccagagtgcagcttggagcaaagaagagttaaaagcatattggcagaggaagagccctggcattccagcaggagctaacaggaaaaagaaaatcaatggcagtagccctgacacattcacttctggtggttaccactcacctggggatgtgagtctcggcgggccaggctcctggggacagggggcccaaggggcagtagagggttcgcacatctaaggaggagaagaagcatgagatacatctggtacagaagcttgggaggagcttgttcaaactcaaaaaccagacggctgaacccctggccccacagcccccagcagggccatctaaggtggagcagctacaagatgagaccaaccacctaaggaaggagctagagagtgtgggaagacagctccaggctgaggtggaaaacaatcagatgttgagtctcctgaacaggagacaggaggagaggctacgtgaacaggaggagaggctacgtgaacaggaggagaggctgtgtgaacaggaggagaggctgtgtgaacaggaggagaggctacgtgaacaggaggagaggctgtgtgaacaggagaagctgccagggcaggagaggctgctggaagag

SEQ ID NO: 340351 - DNA, 729 bp, Homo sapiens
agcctttgatcttacaacccagtcccctaagttttctcaccccatttctggttcctctggttgcagcacaaatttccagctggaaggggagtggagactatgggacctaggagcaaagagttaaaagcatattggcagaggaagagccctggcattccagcaggagctaacaggaaaaagaaaatcaatggcagtagccctgacacattcacttctggtggttaccactcacctggggatagccagtaccaagaactagcagtagccctggattcaagctccgcaataatcagtcaactcactgaaaacatcaattcactggttcgcacatctaaggaggagaagaagcatgagatacatctggtacagaagcttgggaggagcttgttcaaactcaaaaaccagacggctgaacccctggccccacagcccccagcagggccatctaaggtggagcagctacaagatgagaccaaccacctaaggaaggagctagagagtgtgggaagacagctccaggctgaggtggaaaacaatcagatgttgagtctcctgaacaggagacaggaggagaggctacgtgaacaggaggagaggctacgtgaacaggaggagaggctgtgtgaacaggaggagaggctgtgtgaacaggaggagaggctacgtgaacaggaggagaggctgtgtgaacaggagaagctgccagggcaggagaggctgctggaagag

SEQ ID NO: 340352 - DNA, 776 bp, Homo sapiens
gttcttcctgtagggctgaagcagtgcctactcgatagaatcagtcatcatgcaaataaaagccacctgagtcaaaggcaaagccagagtgcagcttggagcaaagaagagttaaaagcatattggcagaggaagagccctggcattccagcaggagctaacaggaaaaagaaaatcaatggcagtagccctgacacattcacttctggtggttaccactcacctggggatcaacaggtatctacggggagggccgtgcatcctctactaccctgcaggatctggagagccagtaccaagaactagcagtagccctggattcaagctccgcaataatcagtcaactcactgaaaacatcaattcactggttcgcacatctaaggaggagaagaagcatgagatacatctggtacagaagcttgggaggagcttgttcaaactcaaaaaccagacggctgaacccctggccccacagcccccagcagggccatctaaggtggagcagctacaagatgagaccaaccacctaaggaaggagctagagagtgtgggaagacagctccaggctgaggtggaaaacaatcagatgttgagtctcctgaacaggagacaggaggagaggctacgtgaacaggaggagaggctacgtgaacaggaggagaggctgtgtgaacaggaggagaggctgtgtgaacaggaggagaggctacgtgaacaggaggagaggctgtgtgaacaggagaagctgccagggcaggagaggctgctggaagag

SEQ ID NO: 340353 - DNA, 272 bp, Homo sapiens
caggtgcatggtttatgcctgtatcccaacactttgagaggttgagacaagaggatgagttgagcctgagagtttgaggctgcagtgagctgtgattgtgttgctccacttaccagcctgggtaatagtgagaccctgtctcaaaaaaaggaaaagaaaaaagaaaaaaacactctgttctcaagtttcctattacttcttagtttaaacagtgatatttgggattcgttgattgtgagagtgaaaaagagagatggattggtccgagcgga

SEQ ID NO: 340354 - DNA, 463 bp, Homo sapiens
ggtgggtcagggggaagggtttggaatgaagaagtgtgttgtagccagaagaaagaggcgagagaatgtgatcagcatgggaaatgggaaaggcccagtacagctggtgcatttatcctacttacagcaggaagacaaggaggggttttaagcgcaggtggggaggggacaatggaaaatgcacgcccagatttgcattttgacacaataaatctaggtgcaagctgctgggtacagaagtgacccactacgccctgatggacagaaataatcctgggcaatgccagaagaaaaaaaaaacaaaaaaactccacagtaaaaagaaagaaattctacccacaatccttctacctagagataaccacaataactattttcctccatagcctttgggtttatttttatggattaaaaacaattgagatgactctgaagagagagatttgtaccctgccttttcaat

SEQ ID NO: 340355 - DNA, 574 bp, Homo sapiens
ttgagggtccccccaaaggtttccaggggtcccagattaatgccctgcaatccagcctggtttacaaaacggggctctttcttttaaaaaaaaaaaaaaaaaaaaactccagcctgggcaacaagaacaagactcggtctcaaaaaaaacacctactggtcagtgtttggcatacagtgggtgtttctactgttttcagcttcatctctgcctaaggcacaaagtctttggctgatcctgggtgcccagcagtgcgtggcatctcacagtgtacctcctcagcatggagctgtgcagagttgggatctgagagaggctccagacacattcttaccctcgaggagtgtctggacagcctctttgcgggtctccctgccttcagccttcagccttcagccttgttcatttaatccattattttgaacacaaaagcccaaatctgatagggccaggcactcctggactctactgccctcaggatagagtccaaactgatctacagcctaggtttggggctgctgcttatattcccagtgcacctcacctgtcctgcgacctatgaggtaccgagcgc

SEQ ID NO: 340356 - DNA, 521 bp, Homo sapiens
ttgagggtccccccaaaggtttccaggggtcccagattaatgccctgcaatccagcctggtttacaaaacggggctctttcttttaaaaaaaaaaaaaaaaaaaaactccagcctgggcaacaagaacaagactcggtctcaaaaaaaacacctactggtcagtgtttggcatacagtgggtgtttctactgttttcagcttcatctctgcctaaggcacaaagtctttggctgatcctgggtgcccagcagtgcgtggcatctcacagtgtacctcctcagcatggagctgtgcagagttgggatctgagagaggctccagacacattcttaccctcgaggagtgtctggacagcctctttgcgggtctccctgccttcagccttcagccttcagccttgttcttgttgcccaggctggagtgcaatgccaccatctcggctcactgcaacctccgcctcccgggttcacaccattctcctgcctcagcctcctgagtagctgggactacaggtgcctgc

SEQ ID NO: 340357 - DNA, 528 bp, Homo sapiens
tgcagtggcatgatctcggctcactgcaacctctgcctcccgggttccagcgattctcctgctgcagcctcctgagtagctgggattacaggcatgcaccaccacacccagctcatttttttgtatttttggtagaaacaggattttgccatgttggccagactgatctcaaactcctgacctccggtgattcacccgccttggtctcccaaagtgctggggttacaggcatgagctacagcacccgacagagtcactgtgatcttaaatgactgctagagaatagaaggagtagaattcagattctaatgggctgaggagctagtgggaggtgaggcactaaagatagcaggtgtagacaactctctcaagaactcttgtagcaatgggagtagagagattagacagtagctggaaaagtaggtgagatccaggaaacgcttttcaaagttaggaaaatccaagtgtgttaatgctgatgaaaagaaaagcagcagccaggctcagtgacaacagcctgtagtccca

SEQ ID NO: 340358 - DNA, 371 bp, Homo sapiens
ggccatttccagagtcacctatctgccactttatgaatctgtatgccatatgccggctgctggggttacaggcatgagctacagcacccgacagagtcactgtgatcttaaatgactgctagagaatagaaggagtagaattcagattctaatgggctgaggagctagtgggaggtgaggcactaaagatagcaggtgtagacaactctctcaagaactcttgtagcaatgggagtagagagattagacagtagctggaaaagtaggtgagatccaggaaacgcttttcaaagttaggaaaatccaagtgtgttaatgctgatgaaaagaaaagcagcagccaggctcagtgacaacagcctgtagtccca

SEQ ID NO: 340359 - DNA, 248 bp, Homo sapiens
tgcctggcatatatagttggattttaataaatatttgaataaataaatgaatcttactgtttttaaacttttgtggtttttaaaaggcattttaaaaatctgggttagtatcaaatattacaatggtattactttaacttcaggtttcatttagctgttttaacttttacaatatattctgacacagaaaatattaggcattaagcatttttcaatgagttgattcacttctactcatgcacatatgt

SEQ ID NO: 340360 - DNA, 908 bp, Homo sapiens
gtctgcctcagagacaaaatacagtccaacaagagttcttaatccatttcttattctcactttgtgtaaaaaaaaaaaaaaaaaatcatctgacatccagcttttctaggtgcccaaagcagttctccctccagtgacagactccagggaatcccttcgattcactgccctctgtatgtcccagggcaactccctgggtcccattcctcaacatggattcatgggccacagccacgagccccacgtggagtaaacacagggccaagttctcaaggccaccctatgccctaacctggggtgacaacctcaactctggctatgaagggagaatcacctgtggtgttttttcattgttctccaaaagcctagcctcagcccactctgaaagtgactatttgggatgctggggtggaatccaggcaaatagattgaaaaagctctgggataaatgtcagaacagagggaggcagcatcccagaaaaaaaacctgaagcagaggagctgtgaacccccgagggaactagcaccccaaaaccatacaaagggcttcttccccaggggaggtgggctctaagaaattgctgttttacctttaaagcttctcaggttagtggggagagaacaaaagagacccgcctgacaaaagatttcaagtatcaagtcagctgggtaggtaaatcaggtccctggcttccaacggggctcgtttccctccaccttcctgttgcctccaggacctctggcctcctctcctccaggaccctccagggcctattgcacgcagcctcaggcatctgggctccaggtatcccactgctgcctcatgcagagaccttggcttctccttaagtgttgttgccagccttatctttcactccacctctagaacctcattgtgaccatctatg

SEQ ID NO: 340361 - DNA, 1640 bp, Homo sapiens
aaaaatagctttcttcattgtattagccctggcatctgtttttagggataaattaaacaccacagtatagatcttgtgactgtgtacacagggcccaaagatggaccgatcgtgtcctgaacgttgtttagagaaagatgggcacagcgtgccttactgtcggcacctggtggctgatggacccggaaccatggactccacttctgcttacccctccattcacagcctccttactctccccaggctttgctgttctacaccaacgccctggcagagaacgacgcaaggctccagcaggccgcatgcctagcgctcaaacacctcaagggcattgaaagcatcgaccagactgccagcctgtgccagtctgacctggaggccgtgcgggcggcagcccgggaaaccacactgtcgttcggtgaaaaaggacggttagcttttgagaagatggacaagctctgctcagaacaaagagaagtcttttgccaggaggcagatgttgaaatcacaatattttaaaaaatcctggctgatgagcacaaatctcacatcgttttttttgctgctgcccagcctggacatagcctgcactctgggtaatggtgctgtgcactcctccaggagtgtgagctgcccagagctctacctgagactccggccattgacccagccccagggcatgggctggtcttttgtacagaggcagaaaaaagcaaggcaaaggtacagcattccaggggctgcacggcctcaacagagcgctcaacttctggctgagggtctgtgtgaccttccccgagatgcagagctgagccaaactaggtggccacctacaaaagggccaaggccaggcaagttgaggccctaaataaaaggctccaaggcaagtgtgtagaactccaggcctcgctgccggtcagctgctcggcacttctgcgtcaagaggcactggggatgcagcaggctggcaggtggctggccctgctaatgcaagactgctcaggccatttcagcagcagccaggtgtcaccttggtgagctggggaaggtgggaaggcacaaagccagggtttctacaaccacactctcagcccgactgacttgctgcgagtgctggtggagctcacagacggcggctggtggatggtggactgtgaacctcactttccctatgttcagcagcacaaagggaagaagccaccacatcagcccaggagccctgagcagcacaggcagtagggccactcactttggccatccgcacccaaatgcaatcaatcaacccagcttcggaagctaccctaggatctcgtcaataaactgctaagaagccatcaactggcctaaagaaagagttcactgaagaacgcaattgctttaaagaaagaaaaattagtttcctatttaagtcttaaaaaaaagcaaaccatgtcctgagatgtctgtgttaatagtgcagagagaacctagggtttgaggttgctgtagcaatggcattggagaactttaacttgaacattctcatcgatacttcctggacatattttgtgtttttaacttacttagtatttatttgccttgttcatatgttcaattttctgaaatttcaattaaactattggtgtttcactttttaccca

SEQ ID NO: 340362 - DNA, 1691 bp, Homo sapiens
tcagaaaggaccggcccctgcccccaccgtcatcactgaaagcgtcatccagggaactcacagccggtgccccagagctggacgtgctgctgatggtacacctccaagtctgcaaagctctgctgcagaaactggcctcccctaatttatcaaggctggtccaggaatgcctcctggaagaagtggcacagcaaaagcacgttctggagacactttctgtccttgactttgagaaggtcggcaaggcaacatccattgaagagagtcctagtggagggaaacctttcgggtccttgtcatgtgctctccccgagtcaccattcaggtttctgaactggggctttcagtcatcccacaggcctcgcggacgaaggggtgcctgaagctgtggagagggtgcacagggcctggcagggtcctgtcctgccctgccacgacgctgctgaaccagctcaagaaaaccttccagcacagagtcagagggaagtacccaggacagctggaaatagcgtgccgcaggctcctggagcaggtggtcagctgtggtgggctgctccccggagctgggctcccagaagaacagatcattacctggttccagtttcacagctacctgcagaggcagagcgtctctgacctggagaagcacttcacccagctcaccaaggaagtgacactcatcgaggagcttcactgtgcgggactccggccattgacccagccccagggcatgggctggtcttttgtacagaggcagaaaaaagcaaggcaaaggtacagcattccaggggctgcacggcctcaacagagcgctcaacttctggctgagggtctgtgtgaccttccccgagatgcagagctgagccaaactaggtggccacctacaaaagggccaaggccaggcaagttgaggccctaaataaaaggctccaaggcaagtgtgtagaactccaggcctcgctgccggtcagctgctcggcacttctgcgtcaagaggcactggggatgcagcaggctggcaggtggctggccctgctaatgcaagactgctcaggccatttcagcagcagccaggtgtcaccttggtgagctggggaaggtgggaaggcacaaagccagggtttctacaaccacactctcagcccgactgacttgctgcgagtgctggtggagctcacagacggcggctggtggatggtggactgtgaacctcactttccctatgttcagcagcacaaagggaagaagccaccacatcagcccaggagccctgagcagcacaggcagtagggccactcactttggccatccgcacccaaatgcaatcaatcaacccagcttcggaagctaccctaggatctcgtcaataaactgctaagaagccatcaactggcctaaagaaagagttcactgaagaacgcaattgctttaaagaaagaaaaattagtttcctatttaagtcttaaaaaaaagcaaaccatgtcctgagatgtctgtgttaatagtgcagagagaacctagggtttgaggttgctgtagcaatggcattggagaactttaacttgaacattctcatcgatacttcctggacatattttgtgtttttaacttacttagtatttatttgccttgttcatatgttcaattttctgaaatttcaattaaactattggtgtttcactttttaccca

SEQ ID NO: 340363 - DNA, 1583 bp, Homo sapiens
aaaaatagctttcttcattgtattagccctggcatctgtttttagggataaattaaacaccacagtatagatcttgtgactgtgtacacagggcccaaagatggaccgatcgtgtcctgaacgttgtttagagaaagatgggcacagcgtgccttactgtcggcacctggtggctgatggacccggaaccatggactccacttctgcttacccctccattcacagcctccttactctccccaggctttgctgttctacaccaacgccctggcagagaacgacgcaaggctccagcaggccgcatgcctagcgctcaaacacctcaagggcattgaaagcatcgaccagactgccagcctgtgccagtctgacctggaggccgtgcgggcggcagcccgggaaaccacactgtcgttcggtgaaaaaggacggttagcttttgagaagatggacaagctctgctcagaacaaagagaagtcttttgccaggaggcagatgttgaaatcacaatattttaaaaaatcctggctgatgagcacaaatctcacatcgttttttttgctgctgcccagcctggacatagcctgcactctgggtaatggtgctgtgcactcctccaggagtgtgagctgcccagagctctacctgagactccggccattgacccagccccagggcatgggctggtcttttgtacagaggcagaaaaaagcaaggcaaaggtacagcattccaggggctgcacggcctcaacagagcgctcaacttctggctgagggtctgtgtgaccttccccgagatgcagagctgagccaaactaggtggccacctacaaaagggccaaggccaggcaagttgaggccctaaataaaaggctccaaggcaagtgtgtagaactccaggcctcgctgccggtcagctgctcggcacttctgcgtcaagaggcactggggatgcagcaggctggcaggtggctggccctgctaatgcaagactgctcaggccatttcagcagcagccaggtgtcaccttggtgagctggggaaggtgggaaggcacaaagccagggtttctacaaccacactctcagcccgactgacttgctgcgagtgctggtggagctcacagacggcggctggtggatggtggactgtgaacctcactttccctatgttcagcagcacaaagggaagaagccaccacatcagcccaggagccctgagcagcacaggcagtagggccactcactttggccatccgcacccaaatgcaatcaatcaacccagcttcggaagctaccctaggatctcgtcaataaactgctaagaagccatcaactggcctaaagaaagagttcactgaagaacgcaattgctttaaagaaaggtgttaatagtgcagagagaacctagggtttgaggttgctgtagcaatggcattggagaactttaacttgaacattctcatcgatacttcctggacatattttgtgtttttaacttacttagtatttatttgccttgttcatatgttcaattttctgaaatttcaattaaactattggtgtttcactttttaccca

SEQ ID NO: 340364 - DNA, 465 bp, Homo sapiens
gcagcccgggaaaccacactgtcgttcggtaaaaagtggcacaaactgtgcagcgcagcggggtgcctggggcccttagaatctgcgagaggccacacccagctctcccagcaggcagaacaactctggggcacctgggatgggcaccgttagcagccctggcacagagccgacctccaccctttgtagcatcctgccaaggcaggcctcctccatggctggggtggcagggagtgttcgctgtcttcttagacctttgggatagaagccagaggcaaggcagggttcccattcagcggaacatcctagaggtaaagacaaggcccccaggccatgtgagtcaccaggtgggggctcccgcacatactccctcccctgccgctttgcagagaccactgagacccacagtcactaagcactagggccaccctggcccaggagagttggaagtgccaaggcaggatc

SEQ ID NO: 340365 - DNA, 1637 bp, Homo sapiens
tcagaaaggaccggcccctgcccccaccgtcatcactgaaagcgtcatccagggaactcacagccggtgccccagagctggacgtgctgctgatggtacacctccaagtctgcaaagctctgctgcagaaactggcctcccctaatttatcaaggctggtccaggaatgcctcctggaagaagtggcacagcaaaagcacgttctggagacactttctgtccttgactttgagaaggtcggcaaggcaacatccattgaagagagtcctagtggagggaaacctttcgggtccttgtcatgtgctctccccgagtcaccattcaggtttctgaactggggctttcagtcatcccacaggcctcgcggacgaaggggtgcctgaagctgtggagagggtgcacagggcctggcagggtcctgtcctgccctgccacgacgctgctgaaccagctcaagaaaaccttccagcacagagtcagagggaagtacccaggacagctggaaatagcgtgccgcaggctcctggagcaggtggtcagctgtggtgggctgctccccggagctgggctcccagaagaacagatcattacctggttccagtttcacagctacctgcagaggcagagcgtctctgacctggagaagcacttcacccagctcaccaaggaagtgacactcatcgaggagcttcactgtgcgggactccggccattgacccagccccagggcatgggctggtcttttgtacagaggcagaaaaaagcaaggcaaaggtacagcattccaggggctgcacggcctcaacagagcgctcaacttctggctgagggtctgtgtgaccttccccgagatgcagagctgagccaaactaggtggccacctacaaaagggccaaggccaggcaagttgaggccctaaattcggcacttctgcgtcaagaggcactggggatgcagcaggctggcaggtggctggccctgctaatgcaagactgctcaggccatttcagcagcagccaggtgtcaccttggtgagctggggaaggtgggaaggcacaaagccagggtttctacaaccacactctcagcccgactgacttgctgcgagtgctggtggagctcacagacggcggctggtggatggtggactgtgaacctcactttccctatgttcagcagcacaaagggaagaagccaccacatcagcccaggagccctgagcagcacaggcagtagggccactcactttggccatccgcacccaaatgcaatcaatcaacccagcttcggaagctaccctaggatctcgtcaataaactgctaagaagccatcaactggcctaaagaaagagttcactgaagaacgcaattgctttaaagaaagaaaaattagtttcctatttaagtcttaaaaaaaagcaaaccatgtcctgagatgtctgtgttaatagtgcagagagaacctagggtttgaggttgctgtagcaatggcattggagaactttaacttgaacattctcatcgatacttcctggacatattttgtgtttttaacttacttagtatttatttgccttgttcatatgttcaattttctgaaatttcaattaaactattggtgtttcactttttaccca

SEQ ID NO: 340366 - DNA, 95 bp, Homo sapiens
caacactgagataaacatttgggttttagaaatatgattttcctttcatcaagcaattagtagaataagtaggtggggtgtagggcgtattatat

SEQ ID NO: 340367 - DNA, 236 bp, Homo sapiens
ctgattagcctgtcactgaatacacaatttataaaaattgtcacttataccttagtctggtgtagtgaaataatagggtaaaaagagaaattagataagaatttgtctcaatcaagcagagggatgactgcattctgctgtcctttgtccacaaggaaattccttgtgtgcaaattgtgagggaggtaggtagcgtcttttttttttttttttttttttttttttttttttttttt

SEQ ID NO: 340368 - DNA, 2534 bp, Homo sapiens
atgggtaaaaaaaggaagggggtaaagaagtaaaaaagcaaagaaaaaaaaacctaagaaataatctaatcgaaacatctatttaacagatgaaaaactaagaaataatctactctaaacatctgtttaacagataacacagctgtgacatagggaagtaaagacatttggccaaggtcacatattcagtgaaagccagaactagaaccctggccccgtccttccacaatggcactctctcttgcatctcccagtgccaactgcctcctgtttaactcaggtctcccgggtttcagccgattctctactggccacacagcaagggccctctcaccttttaccacaccctacccaatggcaaacacagtgagctctagaggacaagggagagaggtggaaaacatgatgtgtttaccctctcattttgtcactcattcatgcattcactcactcacccacttatttatgtatttaactaccatttaccgagtacctcagtcacatggaacctggggcaggggatggagctcggtaggtggtacacacctgggtgtggcatcttcccgtcatcagatgtgcctacctgcttgcagtcacagcagatgaaacgtctctgccccgatgaaaggccaaccctgcctctttgctctgcatcccaccctactcacctttccaaggatttggccgctccaatgatcccgttttctgtttcatcagtctctcccttcaccctgcaaacatattctgctatcttctgtctttaaaaaatcctcttcctatccccacattcctctctagctaccagtgcctttctctgccccatggtctctgccttcaccttcttatcccttcctatcaggccaactctgatcccctcaagtccccacagtctctaactccatcataccaatggtcacttctatatcctcaattcccttgaccttttagctcatccctgtctcatgcctttgggtttgtgatgcccagtcttctgtttgctttgtaactcagttgtctttcctactcattctccttgctgtccttctctgttagagctctaaattgttgaagaaccccaggcttggtttctagtagtcttgtcattaaatgacagctttgtgcaatggctgaaatttatactctagtcaggattctttcctggcttcagacacacatgatgtacctgctgacttattaaaactggacatttagtaggcatctcaatcataacacggcccaaaaaactcttgatttccacttgccatctactacatcacttcccctcctggtctgccatatatatacttgccaccatcatccatgccccaaacctacaaatgattcttgtttcctctattttctcatcccaacagccaatctaccagcaaggtttgctggctttgcaaccaaaatatattttcagggtctctttttccctccttcactgctaattccctaactcaagccactgtcatctcttgcaagaactactgcaactgtcccctaactggtctttgtgctttctctcttgactatgtacaattcattttcctagaaatcagagtagccttttaaaactcgacccagccactacaattttgtgctaccatgctaaactagttcctgccttaggtcctttgcccttgctgttctttggtccagggatggtctgccccagtttatcacttgaatggtcactttgaacaccttctcagagaggcctcccctgacagcccaatctaaagtagttatctcctctccctggtggctctttattacatcatcccattttattgtcttcacagacaataaattattatgttcattcattgacttatttattgtccatttgtcttcaccattaggttataagctccaggaataaaggaatctgacttattcactgctgtatccccagcatcctatacagtagaccttcaaccagtatttgttaagtgaaaaagtggtaaatggatggaaggatggaaggatgaatgaaagtgtgaatgatggaaggattgatgatgaaaggatggatgggtgaaaagatggatggaaagatggacagataaaaggatgtatatatagaaagatgtatagattaatggaggaatagattgaaaaggggatgaaaagatggatataggagaggagggatgggtggaagaatggatgatgaaaggatagatggaaagacagattaaaggatagttctatgaaaagatgaatggacgaatgaatatggatggaaaaataaaaggattgatggaaagatggatggatggaaagatggatgatagataactgaaaagacagatgaattaaaagatggatggagggaccaggcacagtgactcacacctgtaatcccaacactttgggaggccaaggcgggcagattgcctgaggccaggagttcgagaccagcctggccaacatggtgaaactccgtctctaccaaaaatataaaaattagccaggtgtggtggtgggtccctgtagtgacagctagtggggaggctgaggcaggagaa

SEQ ID NO: 340369 - DNA, 434 bp, Homo sapiens
tctgcaatcgcaatgaacggaaaccagcatggtctaagggaggtagtggttcacaacatttagacataaaaacttttgtgggaattctggaaaaaaggctatgacatcagcttaaattttaaatctctccgaattccctcataaagtcagagaaaacctcatgcacaaaatcccaaaatataaggtggggaaaaaccaccaactgccacaagatctgtgtgggcagtggagtataatacaggggcatttgccagcccacagaacataaaaaaaaattaaaaataaaaataaccaacagggactctctatatagcacaacaggcaaaactgggaaaagtgtgtaaaaaggaatgagttttgcctactacaatagtacacaagtgcacgggtccacaataaagctttaaaggcatggaagactctagtcactacat

SEQ ID NO: 340370 - DNA, 195 bp, Homo sapiens
ttttttctctatctttatttctctttactagatagattgtatcattggcaaaaggtgactttgccctagccttaaacagttagcatcccattttatggatggtaccttgttcttgacatctgcaagaaaatttgaggcaagaaaagttaaatggaaggatagattaaagtattatgtgacatgttcgttccattt

SEQ ID NO: 340371 - DNA, 294 bp, Homo sapiens
catttcttctagttgggcttcctcaaatttttttttaggagtgattcttatacaaagaatatagctgtattttgctttttaaaaataaatctttaaatattctttaatagaatatcaattctatcacgttatgacacatttttatttcacttctgctaatatctcctattcattgtattttcctgtgtttcttcttttgccatttcttatttaactaattattcaagagtttaaaaaatattgtacatcataatagaatacccatactatttggatatcctactatatgttttt

SEQ ID NO: 340372 - DNA, 250 bp, Homo sapiens
atgtcatgttgaagggagttgaagaaagctatgaggggagttgtcacaatccagggaatccaggtgctgtagcaaggaattaaggaaacaggttttagaatttctttggagttagttagcttccacagaatatgggaatgtgggggtgcagaatgttgtcaggagggctgtaaagaaattaaaatagaaggataggatagagaggagcaggggcttccttagagtaggggacctctctgagacatgacat

SEQ ID NO: 340373 - DNA, 313 bp, Homo sapiens
ttgaagcaactgccaggaggccactgtagctaaagaagagtaacccagaaagaaaatcatgtgatatgaggtcagagaagcactaggccagatggtgaaaggccttgtgtgcctgacactgagaggctattggcagaagattgacatcgtaagatttaggctttaaattggttaccttggctgccaggttgaaaatagtctgtagagtgacaggtcctattgcagtaacccaggcaaaagatgatggtagcttgtactagggttgttacagtagagggcttaagacatggttgggttctgggtatattttgaa

SEQ ID NO: 340374 - DNA, 652 bp, Homo sapiens
gtctgtctgtccttcgcccctccgtcgccaagtccctatcgtttctcggcctggggagtccaggggggtccgggcagtggaacctgccaggtccccggagaccggccctcgatccctttgccgaatgcggcgaatagagacctcgaggttccgggacgtgcgcggggtcaggctgcgggcgactctcgcgaccccactctcagcccctaacggcgcccgctgcccgccggggggcacccgggaggctgcaggtgcccatttcctgtcgaggggctgcgagcacgtgtcgacaggggagggaaggaggggcgtccgttccgccgagtcacggcggccgagtcacggcggctgagtcacccggggcgtccctcccttcctggcctggagcggcccgggcccgggagtgggagatgccgccggcggtgcctcggacccggaactggggtcactgggacgccgggcccgcagcgcttgggctcgggctaccgctgtcgggacttgcctgggcttgtgggcgcttcccggacgattgggcgcccacacccagggcccagcggcagagctagaacccacttctcccagaacactgagccccatcccaacccactcctcagatagctggctgatagaatgggaacagggacgttgtgct

SEQ ID NO: 340375 - DNA, 444 bp, Homo sapiens
gatgaagccctgtgcactccaacctttagaaactgggaagaagaggatgaatagcaaagaaatggaaatggaacacctaatgaggtaggagaaaacccaagagcaggagacattttagtaattaaatgaggaaagtatttccataaaaagagatttctcaactgcatcctaccctactttgagattgaataaggtgaagactcaaacttaaccattgaattatataattgataccattaattaccttgacaaaattggtatggtggagtggggcataaaggaaactatggaactgggccaagggaataatggaaggtgaagaactggaaacagaatgcagctttgggaggccaagaggggcgaatcacctgaggtcaggagatcgagaccagcctggccaacatggtgaaatcccgtctctgctaaaaatacaggaattagcca

SEQ ID NO: 340376 - DNA, 263 bp, Homo sapiens
aagtgtgtgtttaccgctgaatgcttttgtgtgttctccacagttgtaatgagtttttcctctgtgactgatggccccaccgtcgcttttgctatttgattgctccccagtgtgagcagcctgttgatggagaaatcccaacttggccaggaagtccttcccaacttctctgcaggtggaaggctcccctgacacatggaatgtgcaggtcttcacaaacaaggctctgcccacattgcttctgaaatgtttttctccaaggt

SEQ ID NO: 340377 - DNA, 409 bp, Homo sapiens
tccatatgaatatcaccatacaatcacaaagaactccagtctccaacgtatgtatatatacacacaattttgtgtttgatcctttttgttttttgagacagggtctcattctcatcgcccaggctggagtgcagtggtttgatcatagatccgtgcaaccttcaacttccaggctcaagcgatcctcccactttagcccctcgaggacctgcgactaaaggcacatgccaccatgctcagccaacattctttttaatagatggataaacatgtcctaggttaaaaggactactatggctagtcacccacatgttttgatttccaacctagttctctttctacatatttcaagacagatataaatacttaaactctctggttctcaaagggcatgtgaagcaccccagca

SEQ ID NO: 340378 - DNA, 170 bp, Homo sapiens
cacaaggaactacttcctgtatatatggcttgggctttgccatttccaagtctttccctgcaattccctctctctgaaatatctctcccctgcttcacccctacggtccaaaaccctagctgtcctttaggatccagttcaaatggtacttccttcaaaaagccttccct

SEQ ID NO: 340379 - DNA, 298 bp, Homo sapiens
cattaaaaaaaatgtacactgaacccaagttcaggcttacatgcctccctttgtcaatttccttgtaaaattaagggattgtcattttaaacacttcattctattatctgaaacctgaatgccagaacgctccttccaaagctaatgatgcaaaatgttttgtggacaggccaccctggacacaaagactcagaatgaaaagaggtcttgagaaccccagtgctgtggtcccgctctgtggaactggtcacggcaggctgtggagaaccacacagagcagatcttgtggtcttgcttg

SEQ ID NO: 340380 - DNA, 257 bp, Homo sapiens
accacaggtgaccttcccatcactgtgggtcgcaggtggggcagggagccagggtcaggtctgtgttttggggtggggatggccatggtctggttggggtctgggcagcgtgaggatgtaggaggtgtcatggcatggggtgctgttggagggggagttgctcagacttctgcctccccatgcttgcgagtctttggttgggaccttggttgttaacacctcaaggttacctgggaacctgtcacctcccccttgag

SEQ ID NO: 340381 - DNA, 552 bp, Homo sapiens
tggcttgcagatggctgcttaggaggtggggctgcagcagagagaagagcactgggcccagacacgcaggaagaagagaggccattgtgggaaactgaggtgctgttaaaagaaaacccacagtgtcacggaaaccaggcatcagcagtagcagcctctcagcaggacaaggggccaacctagagtccccttttgctgtggtgactcccaagaactgtgatggctcacctgggggaaggttctagaagctcccagcagcagcactgccaccctcagaatgcaggtctccaccaggcaacatcacattaggtaagagtatgcccctagtcattatgtggataggtgcttataccaaataccagggtcacagcccttgcaataacttgaccctcatccttgacaactctggagaacattacaaagcattatggctacaagctgtgttattcatttccagttgccatgaacatactttgttttggactgaaatgtcatcgtgcactaccctgaaagtcattttttacttgattggatgtttgacattgccaatag

SEQ ID NO: 340382 - DNA, 275 bp, Homo sapiens
cttagactcaattagaaactttaaaattaatcaaagacttaaacaaaagataataaaactataaaagtactagaagacatgggagaattcttttaaaatcttggcataaagagggtctttctaatgacagcatatccatattataaaaggaaaggctgattcgactatatgaaaatcaaaacttcagtcctacgaggtaggcaaggaaacggcggtgctggtcagtgggtcacttgccgtgtgccactcgaggtggatcctggattcaaacccag

SEQ ID NO: 340383 - DNA, 265 bp, Homo sapiens
ggagtgaggcttcaggctagagctgtctttccaggacccttgagggagttccggctggttttcctaacgccctctttcattttatcaccttcactgccaccatcgtcatcctggcctatgccctctctcctgaggtataccctaatcttcctcactggtccactgtggtctcatgtactaaactgcttctcctcaggctattttccacacagtagccagagttatccttaaaaacacaatcacagtatgccactcccgtattcaa

SEQ ID NO: 340384 - DNA, 592 bp, Homo sapiens
aagttgtgacagtgggaaggtaaagggagataagaagacattgtgtatagtgtctgtggggattggctcgggaaaggcacaagaatcagaaaaaaaagttaaattttcttcctgcaagaagaaaggtggaaagaggcaaactaactggttaggaaggccaagactgaagggacaacgtaatggcagggcatcttatgaacctcacctaagggaagaaagcaaaccaggccccgtgtttcctgacctacaaacaaccaaaggcagcagctaaggcaggctcactccttgcccggaccaaacagaatcccagtaacgacacccaagtaagcacagtggcaccagaaaagcggacaacagagaaccgcactgacaacagtggtcagaagcacttctttccagactcccttcccccattaaagttcccaggcagccaggactgcggaagcaccttgtgcacccttgagaggcacctgcaaggatcgggggagtcctatcggcagcagatgaacaaaagacacccaaacagcaagacaaacgctctaaaattgaggtctcattggaaccacccacaaaagcaggccagaacctgagt

SEQ ID NO: 340385 - DNA, 405 bp, Homo sapiens
ccccctatgctgctggcttgcactgacaggtaaagggaggacttgctccagttggcattttcctctcttgcagtgagtgagttttgatttccattattatgttggaacttggttctattggctagaccaggggtcagtgaactatctctgcaacggactagagagtggatattttaggctttgcaggctacaggatctttatcgcaactgttctaacatgaaagcagccctgggcaatatggaaatcagggaatgtggctgtattgcaataaaactttacttacacaaacacattagcagttgcacttggccaattcttgtagctcatcagttccctgaggccacggagtatttttctgtcatgctgcccatctctcccttctctgctcctgggcgtggcccctg

SEQ ID NO: 340386 - DNA, 503 bp, Homo sapiens
tctaacattaaacaaacatacataagtaaacctttaattagtatacactcaaggtacatacattgttttcctttctccttctaaagcatggaagagattttttttttaaataagctgacaaaatatgaaaattaaaagaacacaaccgcatgcagaagtagcacagaggacttcctagaaattgtattctttctccagggagcaacaagaatcgttattcccaaaagggactctattcacttcacagcctggaaggtaatacctacctctgacagaacagaaactggcgtctggatcctagaatcacctagcagtagtcacaaataccttttttttttttttttgggtaatacgccatttaaagaaaattaatgttaacttgcaacaaagtaaatccttaaaaagaaaaagaaaagccccaccatccctgcaatctcccacccaaagacaaattataactcaacagcctatcaccaagattcagcccatcatctagattcatc

SEQ ID NO: 340387 - DNA, 139 bp, Homo sapiens
ttgtctaatggacatctcaatcctaatttgtctaaatctttgctcatgctttcagtgcaactctccctccatccccccaacacacacatactcacacatttacctctactcttctggcagccttctcatctcaataaat

SEQ ID NO: 340388 - DNA, 1349 bp, Homo sapiens
attgagcctcgggatggaataactgtgagatgtgtttgttgcattcacatatacaggttctgttgatgtgatggaatacgtttactgatttgtgtatgttgaaccagccttgcatcccagggatgaagccaactcgatcatggttttggtatcaggatgatgctggcctcataaaatgagtcagggaagagtccctctttttctgattgtttggaatagtttcagaaggaatggtaccagctcctctttgtacctctggtgcaattcttgcagccctattttacagctcacagaaattaattaattgaacagtgcttctgatctggaaagtgatggactcaggcttatagcataggcagcctgactccacagctcaactattaaacactactctcatcaccccacagggcctgaattttctgctcctgaattcaaacattaaaatgtgtggtatatcagtactgggatttatgaggacaatgtggttaatttaaatgccttttggagcaaataggacgtatcttattccaattttttgaagatagagaaagtgcgtggtcctgaacacaacagaatagaatgcaactgaagaaatggctggtgcaattcagcaaggtaaaagattatcttacccccagctggttaaaggcagaagctatgaatttgtgctattgtctgtgggctcctttcagttctcaaacagtagctgccacttctagctgggagagaaatgagagctctgctcatggtgatccagtatctccagaatccatcaccactgctgacctcccactccatgtctccaagtgctctgctatacctgccaccagcagctgccacctccagactttggaaggttataataaaacctctgttctacgatctgccttctgcttcaacatcctcactccccacaaacaattctaataaacagcaattaatctgaaagtgtttttgcaattttaatgtatgagatatggtttctctcaaaagctacactgctcttgtgtccttacaaggtattttcttagcaagaataatctgtttgcatgggtgttaatgactaaatccctttcttgtaaagttatgcccatctgtcacacaagaagaatagtaccctttagagagcgctgaaatgtagggaaatgtagggaaaatgagcagctattcaaaaaggtaaaatgctgccacagagcctgataagagcaattaattaaacattaagtgtagaatagggaatatatggcatgggataaattatagtcacaattcatgtttcttttgtctccagaagttcacacacaaaaacccatgcctttacaaaacaataaattcagcactgtcaatga

SEQ ID NO: 340389 - DNA, 1457 bp, Homo sapiens
attgagcctcgggatggaataactgtgagatgtgtttgttgcattcacatatacaggttctgttgatgtgatggaatacgtttactgatttgtgtatgttgaaccagccttgcatcccagggatgaagccaactcgatcatggttttggtatcaggatgatgctggcctcataaaatgagtcagggaagagtccctctttttctgattgtttggaatagtttcagaaggaatggtaccagctcctctttgtacctctggtgcaattcttgcagccctattttacagctcacagaaattaattaattgaacagtgcttctgatctggaaagtgatggactcaggcttatagcataggcagcctgactccacagctcaactattaaacactactctcatcaccccacagggcctgaattttctgctcctgaattcaaacattaaaatgtgtggtatatcagtactgggatttatgaggacaatgtggttaatttaaatgccttttggagcaaataggacgtatcttattccaattttttgaagatagagaaagtgcgtggtcctgaacacaacagaggtggttacaagaagaaataaaatgttggctggcagaagcagcagggaagatttcatattgaagactaactagttctgagacgttttggatgtcttcttgcaaacaaaatagaatgcaactgaagaaatggctggtgcaattcagcaaggtaaaagattatcttacccccagctggttaaaggcagaagctatgaatttgtgctattgtctgtgggctcctttcagttctcaaacagtagctgccacttctagctgggagagaaatgagagctctgctcatggtgatccagtatctccagaatccatcaccactgctgacctcccactccatgtctccaagtgctctgctatacctgccaccagcagctgccacctccagactttggaaggttataataaaacctctgttctacgatctgccttctgcttcaacatcctcactccccacaaacaattctaataaacagcaattaatctgaaagtgtttttgcaattttaatgtatgagatatggtttctctcaaaagctacactgctcttgtgtccttacaaggtattttcttagcaagaataatctgtttgcatgggtgttaatgactaaatccctttcttgtaaagttatgcccatctgtcacacaagaagaatagtaccctttagagagcgctgaaatgtagggaaatgtagggaaaatgagcagctattcaaaaaggtaaaatgctgccacagagcctgataagagcaattaattaaacattaagtgtagaatagggaatatatggcatgggataaattatagtcacaattcatgtttcttttgtctccagaagttcacacacaaaaacccatgcctttacaaaacaataaattcagcactgtcaatga

SEQ ID NO: 340390 - DNA, 1461 bp, Homo sapiens
attgagcctcgggatggaataactgtgagatgtgtttgttgcattcacatatacaggttctgttgatgtgatggaatacgtttactgatttgtgtatgttgaaccagccttgcatcccagggatgaagccaactcgatcatggttttggtatcaggatgatgctggcctcataaaatgagtcagggaagagtccctctttttctgattgtttggaatagtttcagaaggaatggtaccagctcctctttgtacctctggtgcaattcttgcagccctattttacagctcacagaaattaattaattgaacagtgcttctgatctggaaagtgatggactcaggcttatagcataggcagcctgactccacagctcaactattaaacactactctcatcaccccacagggcctgaattttctgctcctgaattcaaacattaaaatgtgtggtatatcagtactgggatttatgaggacaatgtggttaatttaaatgccttttggagcaaataggacgtatcttattccaattttttgaagatagagaaagtgcgtggtcctgaacacaacagaatagaatgcaactgaagaaatggctggtgcaattcagcaaggtaaaagattatcttacccccagctggttaaaggcagaagctatgaatttgtgctattgtctgtgggctcctttcagctttctgtttttctcatgcatgagaaaaatgcatttcagctgaaaacagtattatgaaggagaagtacttcaaaataaaacactttactcaacccaaaagactcactataagttctcaaacagtagctgccacttctagctgggagagaaatgagagctctgctcatggtgatccagtatctccagaatccatcaccactgctgacctcccactccatgtctccaagtgctctgctatacctgccaccagcagctgccacctccagactttggaaggttataataaaacctctgttctacgatctgccttctgcttcaacatcctcactccccacaaacaattctaataaacagcaattaatctgaaagtgtttttgcaattttaatgtatgagatatggtttctctcaaaagctacactgctcttgtgtccttacaaggtattttcttagcaagaataatctgtttgcatgggtgttaatgactaaatccctttcttgtaaagttatgcccatctgtcacacaagaagaatagtaccctttagagagcgctgaaatgtagggaaatgtagggaaaatgagcagctattcaaaaaggtaaaatgctgccacagagcctgataagagcaattaattaaacattaagtgtagaatagggaatatatggcatgggataaattatagtcacaattcatgtttcttttgtctccagaagttcacacacaaaaacccatgcctttacaaaacaataaattcagcactgtcaatga

SEQ ID NO: 340391 - DNA, 1380 bp, Homo sapiens
attgagcctcgggatggaataactgtgagatgtgtttgttgcattcacatatacaggttctgttgatgtgatggaatacgtttactgatttgtgtatgttgaaccagccttgcatcccagggatgaagccaactcgatcatggttttggtatcaggatgatgctggcctcataaaatgagtcagggaagagtccctctttttctgattgtttggaatagtttcagaaggaatggtaccagctcctctttgtacctctggtgcaattcttgcagccctattttacagctcacagaaattaattaattgaacagtgcttctgatctggaaagtgatggactcaggcttatagcataggcagcctgactccacagctcaactattaaacactactctcatcaccccacagggcctgaattttctgctcctgaattcaaacattaaaatgtgtggtatatcagtactgggatttatgaggacaatgtggttaatttaaatgccttttggagcaaataggacgtatcttattccaattttttgaagatagagaaagtgcgtggtcctgaacacaacagaggtggttacaagaagaaataaaatgttggctggcagaagcagcagggaagatttcatattgaagactaactagttctgagacgttttggatgtcttcttgcaaacaaaatagaatgcaactgaagaaatggctggtgcaattcagcaagttctcaaacagtagctgccacttctagctgggagagaaatgagagctctgctcatggtgatccagtatctccagaatccatcaccactgctgacctcccactccatgtctccaagtgctctgctatacctgccaccagcagctgccacctccagactttggaaggttataataaaacctctgttctacgatctgccttctgcttcaacatcctcactccccacaaacaattctaataaacagcaattaatctgaaagtgtttttgcaattttaatgtatgagatatggtttctctcaaaagctacactgctcttgtgtccttacaaggtattttcttagcaagaataatctgtttgcatgggtgttaatgactaaatccctttcttgtaaagttatgcccatctgtcacacaagaagaatagtaccctttagagagcgctgaaatgtagggaaatgtagggaaaatgagcagctattcaaaaaggtaaaatgctgccacagagcctgataagagcaattaattaaacattaagtgtagaatagggaatatatggcatgggataaattatagtcacaattcatgtttcttttgtctccagaagttcacacacaaaaacccatgcctttacaaaacaataaattcagcactgtcaatga

SEQ ID NO: 340392 - DNA, 989 bp, Homo sapiens
attgagcctcgggatggaataactgtgagatgtgtttgttgcattcacatatacaggttctgttgatgtgatggaatacgtttactgatttgtgtatgttgaaccagccttgcatcccagggatgaagccaactcgatcatggttttggtatcaggatgatgctggcctcataaaatgagtcagggaagagtccctctttttctgattgtttggaatagtttcagaaggaatggtaccagctcctctttgtacctctggtgcaattcttgcagccctattttacagctcacagaaattaattaattgaacagtgcttctgatctggaaagtgatggactcaggcttatagcataggcagcctgactccacagctcaactattaaacactactctcatcaccccacagggcctgaattttctgctcctgaattcaaacattaaaatgtgtggtatatcagtactgggatttatgaggacaatgtggttaatttaaatgccttttggagcaaataggacgtatcttattccaattttttgaagatagagaaagtgcgtggtcctgaacacaacagaatagaatgcaactgaagaaatggctggtgcaattcagcaaggtaaaagattatcttacccccagctggttaaaggcagaagctatgaatttgtgctattgtctgtgggctcctttcagttctcaaacagtagctgccacttctagctgggagagaaatgagagctctgctcatggtgatccagtatctccagaatccatcaccactgctgacctcccactccatgtctccaagtgctctgctatacctgccaccagcagctgccacctccagactttggaaggttataataaaacctctgttctacgatctgccttctgcttcaacatcctcactccccacaaacaattctaataaacagataaaaacacgatgcggcaggtttttttcgcgcgcgggttggcgtgaggatgcag

SEQ ID NO: 340393 - DNA, 1272 bp, Homo sapiens
attgagcctcgggatggaataactgtgagatgtgtttgttgcattcacatatacaggttctgttgatgtgatggaatacgtttactgatttgtgtatgttgaaccagccttgcatcccagggatgaagccaactcgatcatggttttggtatcaggatgatgctggcctcataaaatgagtcagggaagagtccctctttttctgattgtttggaatagtttcagaaggaatggtaccagctcctctttgtacctctggtgcaattcttgcagccctattttacagctcacagaaattaattaattgaacagtgcttctgatctggaaagtgatggactcaggcttatagcataggcagcctgactccacagctcaactattaaacactactctcatcaccccacagggcctgaattttctgctcctgaattcaaacattaaaatgtgtggtatatcagtactgggatttatgaggacaatgtggttaatttaaatgccttttggagcaaataggacgtatcttattccaattttttgaagatagagaaagtgcgtggtcctgaacacaacagaatagaatgcaactgaagaaatggctggtgcaattcagcaagttctcaaacagtagctgccacttctagctgggagagaaatgagagctctgctcatggtgatccagtatctccagaatccatcaccactgctgacctcccactccatgtctccaagtgctctgctatacctgccaccagcagctgccacctccagactttggaaggttataataaaacctctgttctacgatctgccttctgcttcaacatcctcactccccacaaacaattctaataaacagcaattaatctgaaagtgtttttgcaattttaatgtatgagatatggtttctctcaaaagctacactgctcttgtgtccttacaaggtattttcttagcaagaataatctgtttgcatgggtgttaatgactaaatccctttcttgtaaagttatgcccatctgtcacacaagaagaatagtaccctttagagagcgctgaaatgtagggaaatgtagggaaaatgagcagctattcaaaaaggtaaaatgctgccacagagcctgataagagcaattaattaaacattaagtgtagaatagggaatatatggcatgggataaattatagtcacaattcatgtttcttttgtctccagaagttcacacacaaaaacccatgcctttacaaaacaataaattcagcactgtcaatga

SEQ ID NO: 340394 - DNA, 1492 bp, Homo sapiens
attgagcctcgggatggaataactgtgagatgtgtttgttgcattcacatatacaggttctgttgatgtgatggaatacgtttactgatttgtgtatgttgaaccagccttgcatcccagggatgaagccaactcgatcatggttttggtatcaggatgatgctggcctcataaaatgagtcagggaagagtccctctttttctgattgtttggaatagtttcagaaggaatggtaccagctcctctttgtacctctggtgcaattcttgcagccctattttacagctcacagaaattaattaattgaacagtgcttctgatctggaaagtgatggactcaggcttatagcataggcagcctgactccacagctcaactattaaacactactctcatcaccccacagggcctgaattttctgctcctgaattcaaacattaaaatgtgtggtatatcagtactgggatttatgaggacaatgtggttaatttaaatgccttttggagcaaataggacgtatcttattccaattttttgaagatagagaaagtgcgtggtcctgaacacaacagaggtggttacaagaagaaataaaatgttggctggcagaagcagcagggaagatttcatattgaagactaactagttctgagacgttttggatgtcttcttgcaaacaaaatagaatgcaactgaagaaatggctggtgcaattcagcaagctttctgtttttctcatgcatgagaaaaatgcatttcagctgaaaacagtattatgaaggagaagtacttcaaaataaaacactttactcaacccaaaagactcactataagttctcaaacagtagctgccacttctagctgggagagaaatgagagctctgctcatggtgatccagtatctccagaatccatcaccactgctgacctcccactccatgtctccaagtgctctgctatacctgccaccagcagctgccacctccagactttggaaggttataataaaacctctgttctacgatctgccttctgcttcaacatcctcactccccacaaacaattctaataaacagcaattaatctgaaagtgtttttgcaattttaatgtatgagatatggtttctctcaaaagctacactgctcttgtgtccttacaaggtattttcttagcaagaataatctgtttgcatgggtgttaatgactaaatccctttcttgtaaagttatgcccatctgtcacacaagaagaatagtaccctttagagagcgctgaaatgtagggaaatgtagggaaaatgagcagctattcaaaaaggtaaaatgctgccacagagcctgataagagcaattaattaaacattaagtgtagaatagggaatatatggcatgggataaattatagtcacaattcatgtttcttttgtctccagaagttcacacacaaaaacccatgcctttacaaaacaataaattcagcactgtcaatga

SEQ ID NO: 340395 - DNA, 824 bp, Homo sapiens
ataaatggcggagacttttccctaaatgggttacttgatttaagagctgctggctaattttggtcggataatttaatagaagagggaagaggaaaggaaagaaaggggcttgaagaaagaggaagagaaaagaaacacaaggatggagaacaaggagagaccatttgttctcaaacagtagctgccacttctagctgggagagaaatgagagctctgctcatggtgatccagtatctccagaatccatcaccactgctgacctcccactccatgtctccaagtgctctgctatacctgccaccagcagctgccacctccagactttggaaggttataataaaacctctgttctacgatctgccttctgcttcaacatcctcactccccacaaacaattctaataaacagcaattaatctgaaagtgtttttgcaattttaatgtatgagatatggtttctctcaaaagctacactgctcttgtgtccttacaaggtattttcttagcaagaataatctgtttgcatgggtgttaatgactaaatccctttcttgtaaagttatgcccatctgtcacacaagaagaatagtaccctttagagagcgctgaaatgtagggaaatgtagggaaaatgagcagctattcaaaaaggtaaaatgctgccacagagcctgataagagcaattaattaaacattaagtgtagaatagggaatatatggcatgggataaattatagtcacaattcatgtttcttttgtctccagaagttcacacacaaaaacccatgcctttacaaaacaataaattcagcactgtcaatga

SEQ ID NO: 340396 - DNA, 711 bp, Homo sapiens
attgatcaataggtagtgcctaaattccgacaagaagacttatggtcacaatacttctcaaacagtagctgccacttctagctgggagagaaatgagagctctgctcatggtgatccagtatctccagaatccatcaccactgctgacctcccactccatgtctccaagtgctctgctatacctgccaccagcagctgccacctccagactttggaaggttataataaaacctctgttctacgatctgccttctgcttcaacatcctcactccccacaaacaattctaataaacagcaattaatctgaaagtgtttttgcaattttaatgtatgagatatggtttctctcaaaagctacactgctcttgtgtccttacaaggtattttcttagcaagaataatctgtttgcatgggtgttaatgactaaatccctttcttgtaaagttatgcccatctgtcacacaagaagaatagtaccctttagagagcgctgaaatgtagggaaatgtagggaaaatgagcagctattcaaaaaggtaaaatgctgccacagagcctgataagagcaattaattaaacattaagtgtagaatagggaatatatggcatgggataaattatagtcacaattcatgtttcttttgtctccagaagttcacacacaaaaacccatgcctttacaaaacaataaattcagcactgtcaatga

SEQ ID NO: 340397 - DNA, 708 bp, Homo sapiens
  misc_feature (28)..(28): n is a, c, g, or t
atatcaccaaccatcacaatatcctgtncggtcacaaccttattgattccattctcaaacagtagctgccacttctagctgggagagaaatgagagctctgctcatggtgatccagtatctccagaatccatcaccactgctgacctcccactccatgtctccaagtgctctgctatacctgccaccagcagctgccacctccagactttggaaggttataataaaacctctgttctacgatctgccttctgcttcaacatcctcactccccacaaacaattctaataaacagcaattaatctgaaagtgtttttgcaattttaatgtatgagatatggtttctctcaaaagctacactgctcttgtgtccttacaaggtattttcttagcaagaataatctgtttgcatgggtgttaatgactaaatccctttcttgtaaagttatgcccatctgtcacacaagaagaatagtaccctttagagagcgctgaaatgtagggaaatgtagggaaaatgagcagctattcaaaaaggtaaaatgctgccacagagcctgataagagcaattaattaaacattaagtgtagaatagggaatatatggcatgggataaattatagtcacaattcatgtttcttttgtctccagaagttcacacacaaaaacccatgcctttacaaaacaataaattcagcactgtcaatga

SEQ ID NO: 340398 - DNA, 184 bp, Homo sapiens
agaattcctggccaaagcaaataatgttgctgattcctctgagttctccttctccttggggatgcagttaacaccaaagggaactaggagtatgaacaattttgctcattcaagcaggatgacctgcttttacaaaacatagtcttcaggatggctaggtgcgctcaggcctataatcctagtg

SEQ ID NO: 340399 - DNA, 488 bp, Homo sapiens
ctgtcgtgctgcaatgtggaatgcggtctctgtgtggtatgctggtctgcaggcttttgctgaatgcaatgccaaagcatcaaaatctagaacagggcaggagccttgccaggaactgcttcaaggcaggagcagactgaaactggaagaaggttgcagacacatcttttgaggtgcagaaagctggggacaggactggaggggcaaaagcatttcctagcaatccacaaagctggcagattggttgaaaatcaggaaaagagattcctatgatttggaaagttgatatctgggccccaaggcacaaggagagtcctggaatctcactggtgctcagatcacaggacatgctaaaggagaggtcctgatctcaccctcaaaatgttccagtcaaatgatgaactcaatctaaagcccaggcccaactcaactactgagtggatggattctccccacaccaactccccacaccatggtcgggcaggagc

SEQ ID NO: 340400 - DNA, 218 bp, Homo sapiens
gtcaggaaggagaacctgaggagggtgtgtgggaagaatggagaaattcaggctgggtgtggtggcttacacctgtaaccccagaactttgggaggccaaggcaggaaatgagagaaaaatattgagagaggaaaaccaggtggtaagaaaactctaaaggtggccgggcgtggtggctcacacccatgatcccagcaggagtttgagaccagcctgg

SEQ ID NO: 340401 - DNA, 524 bp, Homo sapiens
agacggggtttcaccatgttggccaggctggtctcaaactcctgacctcagatgatccacctgccttggcctcccaaagtgctggattacaggcatgagccactgtacccggcctctttcagaaattttctttgtgtatataggccaagatatatggcaattttaaacctacatacataaatacagatgggaatatgttacatatactgagctaaattttcttttctgtatttaaccatagcttaacatctttccgtatcagcttatgtagctagataatattcttttgtgtagatgtgttgtcagagacattatttaactttttcctttaaactttttcctgtaaaactgaaatttaataagctaattttggtgaaagcctctggttatctatggtagttttctttattagcttatttagaatatcaatagagaacagtatatatattgaaaaactattagacctagttttttgtttgctattacagaaactactttgaatattctgttgatgtttggagcag

SEQ ID NO: 340402 - DNA, 333 bp, Homo sapiens
gaaggtgtcattttcctctggctgcttccagtagtctttttctgttgttagttttcagggtggatgggcaggggcagagaagaaagtgtaattatgacatgtcttggcatggatttctgtgggtttatcctgttttgatttactcagctttttgcttctgtaggtttctatctcttgccaagtaggaaagttttcagtccttatttctttgaatgccttttcacctgctctcttttctttctttcttgacatccagtgacatgaatgttagatcttttgcagtaccccaggtactacatttccatgtattttctttcttttgttcatttgggt

SEQ ID NO: 340403 - DNA, 262 bp, Homo sapiens
agacagggtttcaccatgttggccaggctggtctcaaactcctagcttcaagtgatccagctgccttggcctcccaaagtgctgggattacaggcatgaaccaccgtcccaccattggtggttttttttggtttgttttgttttttagtacttttctctttaatttttttggaatagtatatttagtttaataaccaaatttaccccataatttagtcagcaacagcactccagcctgggtgacagagcaagactctgtctc

SEQ ID NO: 340404 - DNA, 810 bp, Homo sapiens
agtgcgtcacgtgacgggtcggtggcgctggcggttgctgtcagctgattcccggggttggtggcagcggcggtagcagcaatggactttctcctggggaacccgttcagctctccagtgggacagcgcatcggtgagtccctggagccccccacagctccgccccggtgctccgcacccagcttcggtcccctgggaagcctccgggtgcctagtcacggaggcagggagggcaaggaggctggcgtgtagctctccgacctggctccgcccagctttcctcccactcttgattgacaagaacttgggccattaggaagccttggcttgtgatagatgtatatgacagccagtaggtaaggagagagggtgggtccggatgcccacggcgcagccaatgtgcgtctgctggggtccccaatcgagggagaaagttttcgtggttaaagggactgcgtggttggcagtggctgggccactctgctgggtcccgccgcctgggctctggccagctccttcctggctcaccgggccctccggacacagacacctgagaagggctagaagtcccttctcccaggaccgcgaagccccgggcttggcgtcttggggccaactggccagaggggcccagcgccggacagcccgcggccaggcctcacagacccgggtctcaggacgtgtccgcctgggctcttttctcgacccaacctcaaatggacccgcacagactctcagaacctgagcagacagtggtcggacaaaccctcctggtcagcccatctcggtgctccgtaggtggggcagccg

SEQ ID NO: 340405 - DNA, 2728 bp, Homo sapiens
agtgcgtcacgtgacgggtcggtggcgctggcggttgctgtcagctgattcccggggttggtggcagcggcggtagcagcaatggactttctcctggggaacccgttcagctctccagtgggacagcgcatcgagaaagccacagatggctccctgcagagcgaggactgggccctcaacatggagatctgcgacatcatcaacgagacggaggaaggtcccaaagatgccctccgagcagtaaagaagagaatcgtggggaataagaacttccacgaggtgatgctggctctcacagtcttagaaacctgtgtcaagaactgcgggcaccgcttccacgtgctggtggccagccaggacttcgtggagagtgtgctggtgaggaccatcctgcccaagaacaacccacccaccatcgtgcatgacaaagtgctcaacctcatccagtcctgggctgacgcgttccgcagctcgcccgatctgacaggtgtggtcaccatctatgaggacctgcggaggaaaggcctggagttccccatgactgacctggacatgctgtcacccatccacacaccccagaggaccgtgttcaactcagagacacaatcaggacaggattctgtgggcactgactccagccagcaagaggactctggccagcatgctgcccctctgcccgccccgcccatactctccggtgacacgcccatagcaccaaccccggaacagattgggaagctgcgcagtgagctggagatggtgagtgggaacgtgagggtgatgtcggagatgctgacggagctggtgcccacccaggccgagcccgcagacctggagctgctgcaggagctcaaccgcacgtgccgagccatgcagcagcgggtcctggagctcatccctcagatcgccaatgagcagctgacagaggagctgctcatcgtcaatgacaatctcaacaatgtgttcctgcgccatgaacggtttgaacggttccgaacaggccagaccaccaaggccccaagtgaggccgagccggcagctgacctgatcgacatgggccctgacccagcagccaccggcaacctctcatcccagctggcaggaatgaacctgggctccagcagtgtgagagctggcctgcagtctctggaggcctctggtcgactggaagatgagtttgacatgtttgcgctgacacggggcagctcactggctgaccaacggaaagaggtaaaatacgaagccccccaagcaacagacggcctggctggagccctggacgcccggcagcagagcactggcgcgatcccagtcacccaggcctgcctcatggaggacatcgagcagtggctgtccactgacgtgggtaatgatgcggaagagcctaagggggtcaccagcgaagaatttgacaaattcctggaagaacgggccaaagccgcggaccgattgcccaacctctccagcccctcagctgaggggcccccgggtcccccatctggcccagcgccccggaagaagacccaggagaaagatgatgacatgctgtttgccttatgagtgtggggtctggcaccctgcagcccaggtccccactgctctcacacccttaggctgggacctccctccctcctctggtgttaaggctgctttgggggtggcttgttacccccttttcctcctctttgaagacggagctgccccagctgtggctgggggtgtggaggcagtgggatgaactgggggacaggtctgcgctgcagtgggatctggctgctctgcctcctttcccaccccagctgaccatgagactttgctgagaagtggaggccccaggacaggctggctggctggctggctgcttgacccagtgtgactctccttcactgagtgataccctgctccgggcccatgccccaaggagcccttcagagcccacactgccagtcgaggcctggctggaggctggccacagtggaaattctgccgagcctcttgtcccttccctgctctgctgcatggggccccatggctttggctggccactgagggtagggtgtggaggtgtggaggccccctgaggagctgcggcggcccaggtacgaagctgcaactctgcgcgcagtgggcgagatctcatcagccccaggctgcaggtgaggcttcaggggatgctggggccccactgcccctccgctgccttgccctccatccttcctctgttccttctggccgggcaccacagcactggggctcacctcttggttgatcctcttgtactgggagaggtgccttttgtatccccaattaaaggtagaaaaccaccctgctagcagcattgtcaaaaaaaaaaacacaaaaaaaagaaaacaaaaaaaagagacaagacaaaaaaaaaccgcgggggaatattccgacggccgacaaaaacagcggccaccaaaagggccacacggtgaccaccggtgcacacacccactttatagcaccagagcgggaacagccgcgggcccccaatagggcggcccgaaaacaaccgcaacccgcggggcaccacgtaataaccatgcagcgaaggaaagccagagcatgacgcaacagccgaggcgcagacacagcgaagcgcaccagacacggacgcacaagaagcagcaaaaacaaaagaggagcgcgacagaccgcacgacccgcgcgacgcacaccccacacacgcaacagcagcacccac

SEQ ID NO: 340406 - DNA, 2266 bp, Homo sapiens
agtgcgtcacgtgacgggtcggtggcgctggcggttgctgtcagctgattcccggggttggtggcagcggcggtagcagcaatggactttctcctggggaacccgttcagctctccagtgggacagcgcatcgagaaagccacagatggctccctgcagagcgaggactgggccctcaacatggagatctgcgacatcatcaacgagacggaggaagggtcttagaaacctgtgtcaagaactgcgggcaccgcttccacgtgctggtggccagccaggacttcgtggagagtgtgctggtgaggaccatcctgcccaagaacaacccacccaccatcgtgcatgacaaagtgctcaacctcatccagtcctgggctgacgcgttccgcagctcgcccgatctgacaggtgtggtcaccatctatgaggacctgcggaggaaaggcctggagttccccatgactgacctggacatgctgtcacccatccacacaccccagaggaccgtgttcaactcagagacacaatcaggacaggattctgtgggcactgactccagccagcaagaggactctggccagcatgctgcccctctgcccgccccgcccatactctccggtgacacgcccatagcaccaaccccggaacagattgggaagctgcgcagtgagctggagatggtgagtgggaacgtgagggtgatgtcggagatgctgacggagctggtgcccacccaggccgagcccgcagacctggagctgctgcaggagctcaaccgcacgtgccgagccatgcagcagcgggtcctggagctcatccctcagatcgccaatgagcagctgacagaggagctgctcatcgtcaatgacaatctcaacaatgtgttcctgcgccatgaacggtttgaacggttccgaacaggccagaccaccaaggccccaagtgaggccgagccggcagctgacctgatcgacatgggccctgacccagcagccaccggcaacctctcatcccagctggcaggaatgaacctgggctccagcagtgtgagagctggcctgcagtctctggaggcctctggtcgactggaagatgagtttgacatgtttgcgctgacacggggcagctcactggctgaccaacggaaagaggtaaaatacgaagccccccaagcaacagacggcctggctggagccctggacgcccggcagcagagcactggcgcgatcccagtcacccaggcctgcctcatggaggacatcgagcagtggctgtccactgacgtgggtaatgatgcggaagagcctaagggggtcaccagcgaagaatttgacaaattcctggaagaacgggccaaagccgcggaccgattgcccaacctctccagcccctcagctgaggggcccccgggtcccccatctggcccagcgccccggaagaagacccaggagaaagatgatgacatgctgtttgccttatgagtgtggggtctggcaccctgcagcccaggtccccactgctctcacacccttaggctgggacctccctccctcctctggtgttaaggctgctttgggggtggcttgttacccccttttcctcctctttgaagacggagctgccccagctgtggctgggggtgtggaggcagtgggatgaactgggggacaggtctgcgctgcagtgggatctggctgctctgcctcctttcccaccccagctgaccatgagactttgctgagaagtggaggccccaggacaggctggctggctggctggctgcttgacccagtgtgactctccttcactgagtgataccctgctccgggcccatgccccaaggagcccttcagagcccacactgccagtcgaggcctggctggaggctggccacagtggaaattctgccgagcctcttgtcccttccctgctctgctgcatggggccccatggctttggctggccactgagggtagggtgtggaggtgtggaggccccctgaggagctgcggcggcccaggtacgaagctgcaactctgcgcgcagtgggcgagatctcatcagccccaggctgcaggtgaggcttcaggggatgctggggccccactgcccctccgctgccttgccctccatccttcctctgttccttctggccgggcaccacagcactggggctcacctcttggttgatcctcttgtactgggagaggtgccttttgtatccccaattaaaggtagaaaaccaccctgctagcagcattgtcaa

SEQ ID NO: 340407 - DNA, 2315 bp, Homo sapiens
agtgcgtcacgtgacgggtcggtggcgctggcggttgctgtcagctgattcccggggttggtggcagcggcggtagcagcaatggactttctcctggggaacccgttcagctctccagtgggacagcgcatcgagaaagccacagatggctccctgcagagcgaggactgggccctcaacatggagatctgcgacatcatcaacgagacggaggaaggtcccaaagatgccctccgagcagtaaagaagagaatcgtggggaataagaacttccacgaggtgatgctggctctcacagtcttagaaacctgtgtcaagaactgcgggcaccgcttccacgtgctggtggccagccaggacttcgtggagagtgtgctggtgaggaccatcctgcccaagaacaacccacccaccatcgtgcatgacaaagtgctcaacctcatccagtcctgggctgacgcgttccgcagctcgcccgatctgacaggtgtggtcaccatctatgaggacctgcggaggaaaggcctggagttccccatgactgacctggacatgctgtcacccatccacacaccccagaggaccgtgttcaactcagagacacaatcaggacaggattctgtgggcactgactccagccagcaagaggactctggccagcatgctgcccctctgcccgccccgcccatactctccggtgacacgcccatagcaccaaccccggaacagattgggaagctgcgcagtgagctggagatggtgagtgggaacgtgagggtgatgtcggagatgctgacggagctggtgcccacccaggccgagcccgcagacctggagctgctgcaggagctcaaccgcacgtgccgagccatgcagcagcgggtcctggagctcatccctcagatcgccaatgagcagctgacagaggagctgctcatcgtcaatgacaatctcaacaatgtgttcctgcgccatgaacggtttgaacggttccgaacaggccagaccaccaaggccccaagtgaggccgagccggcagctgacctgatcgacatgggccctgacccagcagccaccggcaacctctcatcccagctggcaggaatgaacctgggctccagcagtgtgagagctggcctgcagtctctggaggcctctggtcgactggaagatgagtttgacatgtttgcgctgacacggggcagctcactggctgaccaacggaaagaggtaaaatacgaagccccccaagcaacagacggcctggctggagccctggacgcccggcagcagagcactggcgcgatcccagtcacccaggcctgcctcatggaggacatcgagcagtggctgtccactgacgtgggtaatgatgcggaagagcctaagggggtcaccagcgaagaatttgacaaattcctggaagaacgggccaaagccgcggaccgattgcccaacctctccagcccctcagctgaggggcccccgggtcccccatctggcccagcgccccggaagaagacccaggagaaagatgatgacatgctgtttgccttatgagtgtggggtctggcaccctgcagcccaggtccccactgctctcacacccttaggctgggacctccctccctcctctggtgttaaggctgctttgggggtggcttgttacccccttttcctcctctttgaagacggagctgccccagctgtggctgggggtgtggaggcagtgggatgaactgggggacaggtctgcgctgcagtgggatctggctgctctgcctcctttcccaccccagctgaccatgagactttgctgagaagtggaggccccaggacaggctggctggctggctggctgcttgacccagtgtgactctccttcactgagtgataccctgctccgggcccatgccccaaggagcccttcagagcccacactgccagtcgaggcctggctggaggctggccacagtggaaattctgccgagcctcttgtcccttccctgctctgctgcatggggccccatggctttggctggccactgagggtagggtgtggaggcgctgaactgacaattaacagcccattatctacaatcaaccaacaagtcattattaccctcactgtctacccatcacaggcatgctcatatggaaaggttaaatgaaaatattataaactttagggggggcccggtaccttatttcccctattgtgggtcgttttacaatttattggccgtcgttttccaccggcatgactggtaaatctcctggtctttcccaccttaatttgcttgcagcccattccc

SEQ ID NO: 340408 - DNA, 1396 bp, Homo sapiens
agtgcgtcacgtgacgggtcggtggcgctggcggttgctgtcagctgattcccggggttggtggcagcggcggtagcagcaatggactttctcctggggaacccgttcagctctccagtgggacagcgcatcgagaaagccacagatggctccctgcagagcgaggactgggccctcaacatggagatctgcgacatcatcaacgagacggaggaaggtcccaaagatgccctccgagcagtaaagaagagaatcgtggggaataagaacttccacgaggtgatgctggctctcacagtcttagaaacctgtgtcaagaactgcgggcaccgcttccacgtgctggtggccagccaggacttcgtggagagtgtgctggtgaggaccatcctgcccaagaacaacccacccaccatcgtgcatgacaaagtgctcaacctcatccagtcctgggctgacgcgttccgcagctcgcccgatctgacaggtgtggtcaccatctatgaggacctgcggaggaaaggcctggagttccccatgactgacctggacatgctgtcacccatccacacaccccagaggaccgtgttcaactcagagacacaatcaggacaggattctgtgggcactgactccagccagcaagaggactctggccagcatgctgcccctctgcccgccccgcccatactctccggtgacacgcccatagcaccaaccccggaacagattgggaagctgcgcagtgagctggagatggtgagtgggaacgtgagggtgatgtcggagatgctgacggagctggtgcccacccaggccgagcccgcagacctggagctgctgcaggagctcaaccgcacgtgccgagccatgcagcagcgggtcctggagctcatccctcagatcgccaatgagcagctgacagaggagctgctcatcgtcaatgacaatctcaacaatgtgttcctgcgccatgaacggtttgaacggttccgaacaggccagaccaccaaggccccaagtgaggccgagccggcagctgacctgatcgacatgggccctgacccagcagccaccggcaacctctcatcccagctggcaggaatgaacctgggctccagcagtgtgagagctggcctgcagtctctggaggcctctggtcgactggaagatgagtttgacatgtttgcgctgacacggggcagctcactggctgaccaacggaaagaggtaaaatacgaagccccccaagcaacagacggcctggctggagccctggacgcccggcagcagagcactggcgcgtcacctcttggttgatcctcttgtactgggagaggtgccttttgtatccccaattaaaggtagaaaaccaccctgctagcagcattgtcaa

SEQ ID NO: 340409 - DNA, 980 bp, Homo sapiens
tctagaggatcctccggaatacacagcgaccagcgaagggtatttgacaaattcctggaagaacgggccaaagccgcggaccgattgcccaacctctccagcccctcagctgaggggcccccgggtcccccatctggcccagcgccccggaagaagacccaggagaaagatgatgacatgctgtttgccttatgagtgtggggtctggcaccctgcagcccaggtccccactgctctcacacccttaggctgggacctccctccctcctctggtgttaaggctgctttgggggtggcttgttacccccttttcctcctctttgaagacggagctgccccagctgtggctgggggtgtggaggcagtgggatgaactgggggacaggtctgcgctgcagtgggatctggctgctctgcctcctttcccaccccagctgaccatgagactttgctgagaagtggaggccccaggacaggctggctggctggctggctgcttgacccagtgtgactctccttcactgagtgataccctgctccgggcccatgccccaaggagcccttcagagcccacactgccagtcgaggcctggctggaggctggccacagtggaaattctgccgagcctcttgtcccttccctgctctgctgcatggggccccatggctttggctggccactgagggtagggtgtggaggtgtggaggccccctgaggagctgcggcggcccaggtacgaagctgcaactctgcgcgcagtgggcgagatctcatcagccccaggctgcaggtgaggcttcaggggatgctggggccccactgcccctccgctgccttgccctccatccttcctctgttccttctggccgggcaccacagcactggggctcacctcttggttgatcctcttgtactgggagaggtgccttttgtatccccaattaaaggtagaaaaccaccctgctagcagcattgtcaa

SEQ ID NO: 340410 - DNA, 1336 bp, Homo sapiens
agtgcgtcacgtgacgggtcggtggcgctggcggttgctgtcagctgattcccggggttggtggcagcggcggtagcagcaatggactttctcctggggaacccgttcagctctccagtgggacagcgcatcgagaaagccacagatggctccctgcagagcgaggactgggccctcaacatggagatctgcgacatcatcaacgagacggaggaaggtcccaaagatgccctccgagcagtaaagaagagaatcgtggggaataagaacttccacgaggtgatgctggctctcacagtcttagaaacctgtgtcaagaactgcgggcaccgcttccacgtgctggtggccagccaggacttcgtggagagtgtgctggtgaggaccatcctgcccaagaacaacccacccaccatcgtgcatgacaaagtgctcaacctcatccagtcctgggctgacgcgttccgcagctcgcccgatctgacaggtgtggtcaccatctatgaggacctgcggaggaaaggcctggagttccccatgactgacctggacatgctgtcacccatccacacaccccagaggaccgtgttcaactcagagacacaatcaggacaggattctgtgggcactgactccagccagcaagaggactctggccagcatgctgcccctctgcccgccccgcccatactctccggtgacacgcccatagcaccaaccccggaacagattgggaagctgcgcagtgagctggagatggtgagtgggaacgtgagggtgatgtcggagatgctgacggagctggtgcccacccaggccgagcccgcagacctggagctgctgcaggagctcaaccgcacgtgccgagccatgcagcagcgggtcctggagctcatccctcagatcgccaatgagcagctgacagaggagctgctcatcgtcaatgacaatctcaacaatgtgttcctgcgccatgaacggtttgaacggttccgaacaggccagaccaccaaggccccatggctttggctggccactgagggtagggtgtggaggtgtggaggccccctgaggagctgcggcggcccaggtacgaagctgcaactctgcgcgcagtgggcgagatctcatcagccccaggctgcaggtgaggcttcaggggatgctggggccccactgcccctccgctgccttgccctccatccttcctctgttccttctggccgggcaccacagcactggggctcacctcttggttgatcctcttgtactgggagaggtgccttttgtatccccaattaaaggtagaaaaccaccctgctagcagcattgtcaa

SEQ ID NO: 340411 - DNA, 648 bp, Homo sapiens
agtgcgtcacgtgacgggtcggtggcgctggcggttgctgtcagctgattcccggggttggtggcagcggcggtagcagcaatggactttctcctggggaacccgttcagctctccagtgggacagcgcatcgagaaagccacagatggctccctgcagagcgaggactgggccctcaacatggagatctgcgacatcatcaacgagacggaggaaggtcccaaagatgccctccgagcagtaaagaagagaatcgtggggaataagaacttccacgaggtgatgctggctctcacagtcttagaaacctgtgtcaagaactgcgggcaccgcttccacgtgctggtggccagccaggacttcgtggagagtgtgctggtgaggaccatcctgcccaagaacaacccacccaccatcgtgcatgacaaagtgctcaacctcatccaggtgagtgccaggacagggcagggcacggccaggaagagctgtcagtgcaggagcttcctgcccagtggagagtcgaggccatcgtgtttgtcccaggctccgcttctcatttcggggcgtctcggttgtcggctggtgggatgttctgtggggagggaggcttgccaactgcgtgctttgctgtggagtgggcagggcaga

SEQ ID NO: 340412 - DNA, 2345 bp, Homo sapiens
agtgcgtcacgtgacgggtcggtggcgctggcggttgctgtcagctgattcccggggttggtggcagcggcggtagcagcaatggactttctcctggggaacccgttcagctctccagtgggacagcgcatcgagaaagccacagatggctccctgcagagcgaggactgggccctcaacatggagatctgcgacatcatcaacgagacggaggaaggtcccaaagatgccctccgagcagtaaagaagagaatcgtggggaataagaacttccacgaggtgatgctggctctcacagtcttagaaacctgtgtcaagaactgcgggcaccgcttccacgtgctggtggccagccaggacttcgtggagagtgtgctggtgaggaccatcctgcccaagaacaacccacccaccatcgtgcatgacaaagtgctcaacctcatccagtcctgggctgacgcgttccgcagctcgcccgatctgacaggtgtggtcaccatctatgaggacctgcggaggaaaggcctggagttccccatgactgacctggacatgctgtcacccatccacacaccccagaggaccgtgttcaactcagagacacaatcaggacaggattctgtgggcactgactccagccagcaagaggactctggccagcatgctgcccctctgcccgccccgcccatactctccggtgacacgcccatagcaccaaccccggaacagattgggaagctgcgcagtgagctggagatggtgagtgggaacgtgagggtgatgtcggagatgctgacggagctggtgcccacccaggccgagcccgcagacctggagctgctgcaggagctcaaccgcacgtgccgagccatgcagcagcgggtcctggagctcatccctcagatcgccaatgagcagctgacagaggagctgctcatcgtcaatgacaatctcaacaatgtgttcctgcgccatgaacggtttgaacggttccgaacaggccagaccaccaaggccccaagtgaggccgagccggcagctgacctgatcgacatgggccctgacccagcagccaccggcaacctctcatcccagctggcaggaatgaacctgggctccagcagtgtgagagctggcctgcagtctctggaggcctctggtcgactggaagatgagtttgacatgtttgcgctgacacggggcagctcactggctgaccaacggaaagaggtaaaatacgaagccccccaagcaacagacggcctggctggagccctggacgcccggcagcagagcactggcgcgatcccagtcacccaggcctgcctcatggaggacatcgagcagtggctgtccactgacgtgggtaatgatgcggaagagcctaagggggtcaccagcgaagaatttgacaaattcctggaagaacgggccaaagccgcggaccgattgcccaacctctccagcccctcagctgaggggcccccgggtcccccatctggcccagcgccccggaagaagacccaggagaaagatgatgacatgctgtttgccttatgagtgtggggtctggcaccctgcagcccaggtccccactgctctcacacccttaggctgggacctccctccctcctctggtgttaaggctgctttgggggtggcttgttacccccttttcctcctctttgaagacggagctgccccagctgtggctgggggtgtggaggcagtgggatgaactgggggacaggtctgcgctgcagtgggatctggctgctctgcctcctttcccaccccagctgaccatgagactttgctgagaagtggaggccccaggacaggctggctggctggctggctgcttgacccagtgtgactctccttcactgagtgataccctgctccgggcccatgccccaaggagcccttcagagcccacactgccagtcgaggcctggctggaggctggccacagtggaaattctgccgagcctcttgtcccttccctgctctgctgcatggggccccatggctttggctggccactgagggtagggtgtggaggtgtggaggccccctgaggagctgcggcggcccaggtacgaagctgcaactctgcgcgcagtgggcgagatctcatcagccccaggctgcaggtgaggcttcaggggatgctggggccccactgcccctccgctgccttgccctccatccttcctctgttccttctggccgggcaccacagcactggggctcacctcttggttgatcctcttgtactgggagaggtgccttttgtatccccaattaaaggtagaaaaccaccctgctagcagcattgtcaa

SEQ ID NO: 340413 - DNA, 2545 bp, Homo sapiens
agtgcgtcacgtgacgggtcggtggcgctggcggttgctgtcagctgattcccggggttggtggcagcggcggtagcagcaatggactttctcctggggaacccgttcagctctccagtgggacagcgcatcgagaaagccacagatggctccctgcagagcgaggactgggccctcaacatggagatctgcgacatcatcaacgagacggaggaaggtcccaaagatgccctccgagcagtaaagaagagaatcgtggggaataagaacttccacgaggtgatgctggctctcacagtcttagaaacctgtgtcaagaactgcgggcaccgcttccacgtgctggtggccagccaggacttcgtggagagtgtgctggtgaggaccatcctgcccaagaacaacccacccaccatcgtgcatgacaaagtgctcaacctcatccagtcctgggctgacgcgttccgcagctcgcccgatctgacaggtgtggtcaccatctatgaggacctgcggaggaaaggcctggagttccccatgactgacctggacatgctgtcacccatccacacaccccagaggaccgtgttcaactcagagacacaatcaggacaggattctgtgggcactgactccagccagcaagaggactctggccagcatgctgcccctctgcccgccccgcccatactctccggtgacacgcccatagcaccaaccccggaacagattgggaagctgcgcagtgagctggagatggtgagtgggaacgtgagggtgatgtcggagatgctgacggagctggtgcccacccaggccgagcccgcagacctggagctgctgcaggagctcaaccgcacgtgccgagccatgcagcagcgggtcctggagctcatccctcagatcgccaatgagcagctgacagaggagctgctcatcgtcaatgacaatctcaacaatgtgttcctgcgccatgaacgagacaggggtctcactgtgttgcccaggctagtctcaaactcttggcctcaagcagtcctccctccttggcctccgaaagcattggtattacaggcatgagccaccacacccacctgcccaccttgtatcattctgttcaagagtcacatccccaagagagacttggattggctgagcttcattgtgcctaccagctggggtttgaacggttccgaacaggccagaccaccaaggccccaagtgaggccgagccggcagctgacctgatcgacatgggccctgacccagcagccaccggcaacctctcatcccagctggcaggaatgaacctgggctccagcagtgtgagagctggcctgcagtctctggaggcctctggtcgactggaagatgagtttgacatgtttgcgctgacacggggcagctcactggctgaccaacggaaagaggtaaaatacgaagccccccaagcaacagacggcctggctggagccctggacgcccggcagcagagcactggcgcgatcccagtcacccaggcctgcctcatggaggacatcgagcagtggctgtccactgacgtgggtaatgatgcggaagagcctaagggggtcaccagcgaagaatttgacaaattcctggaagaacgggccaaagccgcggaccgattgcccaacctctccagcccctcagctgaggggcccccgggtcccccatctggcccagcgccccggaagaagacccaggagaaagatgatgacatgctgtttgccttatgagtgtggggtctggcaccctgcagcccaggtccccactgctctcacacccttaggctgggacctccctccctcctctggtgttaaggctgctttgggggtggcttgttacccccttttcctcctctttgaagacggagctgccccagctgtggctgggggtgtggaggcagtgggatgaactgggggacaggtctgcgctgcagtgggatctggctgctctgcctcctttcccaccccagctgaccatgagactttgctgagaagtggaggccccaggacaggctggctggctggctggctgcttgacccagtgtgactctccttcactgagtgataccctgctccgggcccatgccccaaggagcccttcagagcccacactgccagtcgaggcctggctggaggctggccacagtggaaattctgccgagcctcttgtcccttccctgctctgctgcatggggccccatggctttggctggccactgagggtagggtgtggaggtgtggaggccccctgaggagctgcggcggcccaggtacgaagctgcaactctgcgcgcagtgggcgagatctcatcagccccaggctgcaggtgaggcttcaggggatgctggggccccactgcccctccgctgccttgccctccatccttcctctgttccttctggccgggcaccacagcactggggctcacctcttggttgatcctcttgtactgggagaggtgccttttgtatccccaattaaaggtagaaaaccaccctgctagcagcattgtcaa

SEQ ID NO: 340414 - DNA, 2031 bp, Homo sapiens
gaagtgcctaagggggtcaccagcgaagaatttgacaaagttcctggaacgaacgggccaaagccgcggaccgagttgcccaacctctccagcccctcagctgaggggcccccgggtcccccatctggcccagtcctgggctgacgcgttccgcagctcgcccgatctgacaggtgtggtcaccatctatgaggacctgcggaggaaaggcctggagttccccatgactgacctggacatgctgtcacccatccacacaccccagaggaccgtgttcaactcagagacacaatcaggacaggattctgtgggcactgactccagccagcaagaggactctggccagcatgctgcccctctgcccgccccgcccatactctccggtgacacgcccatagcaccaaccccggaacagattgggaagctgcgcagtgagctggagatggtgagtgggaacgtgagggtgatgtcggagatgctgacggagctggtgcccacccaggccgagcccgcagacctggagctgctgcaggagctcaaccgcacgtgccgagccatgcagcagcgggtcctggagctcatccctcagatcgccaatgagcagctgacagaggagctgctcatcgtcaatgacaatctcaacaatgtgttcctgcgccatgaacggtttgaacggttccgaacaggccagaccaccaaggccccaagtgaggccgagccggcagctgacctgatcgacatgggccctgacccagcagccaccggcaacctctcatcccagctggcaggaatgaacctgggctccagcagtgtgagagctggcctgcagtctctggaggcctctggtcgactggaagatgagtttgacatgtttgcgctgacacggggcagctcactggctgaccaacggaaagaggtaaaatacgaagccccccaagcaacagacggcctggctggagccctggacgcccggcagcagagcactggcgcgatcccagtcacccaggcctgcctcatggaggacatcgagcagtggctgtccactgacgtgggtaatgatgcggaagagcctaagggggtcaccagcgaagaatttgacaaattcctggaagaacgggccaaagccgcggaccgattgcccaacctctccagcccctcagctgaggggcccccgggtcccccatctggcccagcgccccggaagaagacccaggagaaagatgatgacatgctgtttgccttatgagtgtggggtctggcaccctgcagcccaggtccccactgctctcacacccttaggctgggacctccctccctcctctggtgttaaggctgctttgggggtggcttgttacccccttttcctcctctttgaagacggagctgccccagctgtggctgggggtgtggaggcagtgggatgaactgggggacaggtctgcgctgcagtgggatctggctgctctgcctcctttcccaccccagctgaccatgagactttgctgagaagtggaggccccaggacaggctggctggctggctggctgcttgacccagtgtgactctccttcactgagtgataccctgctccgggcccatgccccaaggagcccttcagagcccacactgccagtcgaggcctggctggaggctggccacagtggaaattctgccgagcctcttgtcccttccctgctctgctgcatggggccccatggctttggctggccactgagggtagggtgtggaggtgtggaggccccctgaggagctgcggcggcccaggtacgaagctgcaactctgcgcgcagtgggcgagatctcatcagccccaggctgcaggtgaggcttcaggggatgctggggccccactgcccctccgctgccttgccctccatccttcctctgttccttctggccgggcaccacagcactggggctcacctcttggttgatcctcttgtactgggagaggtgccttttgtatccccaattaaaggtagaaaaccaccctgctagcagcattgtcaa

SEQ ID NO: 340415 - DNA, 1686 bp, Homo sapiens
agtgcgtcacgtgacgggtcggtggcgctggcggttgctgtcagctgattcccggggttggtggcagcggcggtagcagcaatggactttctcctggggaacccgttcagctctccagtgggacagcgcatcgagaaagccacagatggctccctgcagagcgaggactgggccctcaacatggagatctgcgacatcatcaacgagacggaggaaggtcccaaagatgccctccgagcagtaaagaagagaatcgtggggaataagaacttccacgaggtgatgctggctctcacagtcttagaaacctgtgtcaagaactgcgggcaccgcttccacgtgctggtggccagccaggacttcgtggagagtgtgctggtgaggaccatcctgcccaagaacaacccacccaccatcgtgcatgacaaagtgctcaacctcatccagtcctgggctgacgcgttccgcagctcgcccgatctgacaggtgtggtcaccatctatgaggacctgcggaggaaaggcctggagttccccatgactgacctggacatgctgtcacccatccacacaccccagaggaccgtgttcaactcagagacacaatcaggacaggattctgtgggcactgactccagccagcaagaggactctggccagcatgctgcccctctgcccgccccgcccatactctccggtgacacgcccatagcaccaaccccggaacagattgggaagctgcgcagtgagctggagatggtgagtgggaacgtgagggtgatgtcggagatgctgacggagctggtgcccacccaggccgagcccgcagacctggagctgctgcaggagctcaaccgcacgtgccgagccatgcagcagcgggtcctggagctcatccctcagatcgccaatgagcagctgacagaggagctgctcatcgtcaatgacaatctcaacaatgtgttcctgcgccatgaacggtttgaacggttccgaacaggccagaccaccaaggccccaagtgaggccgagccggcagctgacctgatcgacatgggccctgacccagcagccaccggcaacctctcatcccagctggcaggaatgaacctgggctccagcagtgtgagagctggcctgcagtctctggaggcctctggtcgactggaagatgagtttgacatgtttgcgctgacacggggcagctcactggctgaccaacggaaagaggtaaaatacgaagccccccaagcaacagacggcctggctggagccctggacgcccggcagcagagcactggcgcgatcccagtcacccaggcctgcctcatggaggacatcgagcagtggctgtccactgacgtgggtaatgatgcggaagagcctaagggggtcaccagcgaagaatttgacaaattcctggaagaacgggcggcccaggtacgaagctgcaactctgcgcgcagtgggcgagatctcatcagccccaggctgcaggtgaggcttcaggggatgctggggccccactgcccctccgctgccttgccctccatccttcctctgttccttctggccgggcaccacagcactggggctcacctcttggttgatcctcttgtactgggagaggtgccttttgtatccccaattaaaggtagaaaaccaccctgctagcagcattgtcaa

SEQ ID NO: 340416 - DNA, 1440 bp, Homo sapiens
agtgcgtcacgtgacgggtcggtggcgctggcggttgctgtcagctgattcccggggttggtggcagcggcggtagcagcaatggactttctcctggggaacccgttcagctctccagtgggacagcgcatcgagaaagccacagatggctccctgcagagcgaggactgggccctcaacatggagatctgcgacatcatcaacgagacggaggaaggtcccaaagatgccctccgagcagtaaagaagagaatcgtggggaataagaacttccacgaggtgatgctggctctcacagtcttagaaacctgtgtcaagaactgcgggcaccgcttccacgtgctggtggccagccaggacttcgtggagagtgtgctggtgaggaccatcctgcccaagaacaacccacccaccatcgtgcatgacaaagtgctcaacctcatccagtcctgggctgacgcgttccgcagctcgcccgatctgacaggtgtggtcaccatctatgaggacctgcggaggaaaggcctggagttccccatgactgacctggacatgctgtcacccatccacacaccccagaggaccgtgttcaactcagagacacaatcaggacaggattctgtgggcactgactccagccagcaagaggactctggccagcatgctgcccctctgcccgccccgcccatactctccggtgacacgcccatagcaccaaccccggaacagattgggaagctgcgcagtgagctggagatggtgagtgggaacgtgagggtgatgtcggagatgctgacggagctggtgcccacccaggccgagcccgcagacctggagctgctgcaggagctcaaccgcacgtgccgagccatgcagcagcgggtcctggagctcatccctcagatcgccaatgagcagctgacagaggagctgctcatcgtcaatgacaatctcaacaatgtgttcctgcgccatgaacggtttgaacggttccgaacaggccagaccaccaaggccccaagtgaggccgagccggcagctgacctgatcgacatgggccctgacccagcagccaccggcaacctctcatcccagctggcaggaatgaacctgggctccagcagtgtgagagctggcctgcagtctctggaggcctctggtcgactggaagatgagtttgacatgtttgcgctgacacggggcagctcactggctgaccaacggaaagagtaaaatacgaagccccccaagtgaggccgagccggcagctgacctgatcgacatgggccctgacccagcagccaccggcaacctctgttccttctggccgggcaccacagcactggggctcacctcttggttgatcctcttgtactgggagaggtgccttttgtatccccaattaaaggtagaaaaccaccctgctagcagcattgtcaa

SEQ ID NO: 340417 - DNA, 1135 bp, Homo sapiens
agtgcgtcacgtgacgggtcggtggcgctggcggttgctgtcagctgattcccggggttggtggcagcggcggtagcagcaatggactttctcctggggaacccgttcagctctccagtgggacagcgcatcgagaaagccacagatggctccctgcagagcgaggactgggccctcaacatggagatctgcgacatcatcaacgagacggaggaaggtcccaaagatgccctccgagcagtaaagtcctgggctgacgcgttccgcagctcgcccgatctgacaggtgtggtcaccatctatgaggacctgcggaggaaaggcctggagttccccatgactgacctggacatgctgtcacccatccacacaccccagaggaccgtgttcaactcagagacacaatcaggacaggattctgtgggcactgactccagccagcaagaggactctggccagcatgctgcccctctgcccgccccgcccatactctccggtgacacgcccatagcaccaaccccggaacagattgggaagctgcgcagtgagctggagatggtgagtgggaacgtgagggtgatgtcggagatgctgacggagctggtgcccacccaggccgagcccgcagacctggagctgctgcaggagctcaaccgcacgtgccgagccatgcagcagcgggtcctggagctcatccctcagatcgccaatgagcagctgacagaggagctgctcatcgtcaatgacaatctcaacaatgtgttcctgcgccatgaacggtttgaacggttccgaacaggccagaccaccaaggccccatggctttggctggccactgagggtagggtgtggaggtgtggaggccccctgaggagctgcggcggcccaggtacgaagctgcaactctgcgcgcagtgggcgagatctcatcagccccaggctgcaggtgaggcttcaggggatgctggggccccactgcccctccgctgccttgccctccatccttcctctgttccttctggccgggcaccacagcactggggctcacctcttggttgatcctcttgtactgggagaggtgccttttgtatccccaattaaaggtagaaaaccaccctgctagcagcattgtcaa

SEQ ID NO: 340418 - DNA, 419 bp, Homo sapiens
cgtggggaataagaacttccacgaggtgatgctggctctcacagtgagtgccccatctgtctgtcctgtggcaggactacggtccactgaaagtcacctcccctcagacccagcaggactcccagcctcctctgagctcctcatttgagagctggaaaggtctgtaggcaacgcactgtcctgtctacactgcaggcggatgcagaatggcaagaggccatttggaaaggttctccccaatcccccagcatgggaacagacgcttacatcactccagaaccactggcagggagagcctgggccaaaggacctgtgggtgacattgaagctcagtaaacccaggcctccgcgggggcagggaggccggctgactgagttgggtgctgctcggcactttggtgctctggcaaatgaatgta

SEQ ID NO: 340419 - DNA, 227 bp, Homo sapiens
agcagttgtaggtcaggaggagagggaaccatggtcctgctgataagttgcctgtctgtattcaaaagggaggagaagaatgaggaaggatttggactggtgacagagagctggcagtggccaaggcatactgggggtcactgagcagcttaggttccatggaagaggagcagtaggagtcaaggttgtaaacacatggcgaggcctgctgggcaggagcttagcag

SEQ ID NO: 340420 - DNA, 439 bp, Homo sapiens
gctcagatacctgctcgccattaccagatctacccctcaaagcataatgtctgctggtgggaggatgagtagcttcagtgttttgtacaaaggagagtatatttatttctaatttcagagtttctcttgctcctgtctagacacttcagagagaaacaaattcaggtcaccagtaaagttatgttctataataagagaagactcgtgctaaatcacttgtaaagacattaactatcatctgcctgaaaagtcttctctcaccaagcttctgcagatcttttgaggtaccagaaatagtggttagttctcacatgctgttctgcttcagcgagcttcatgtggccacctgcagaaatagttcttggtttctcttccttgtctagatgctggtcaaggcagcgtttagaaaaacacagattttcatattcccattcacacg

SEQ ID NO: 340421 - DNA, 385 bp, Homo sapiens
cctgggaggtccaggttgcagtgagctgtgattgcaccactgtactccagcctgtggtgacagaacaagaccttgtctcaaaaaaataaataaacaaataaataaacaagaaaaacaaggaaaggtaaggtgtaacttaacctactgtaactcacttgtgcctacaggaaaaaaataaaatagaaaaaaaaagagaaagagataagaaaactagaacatgagacagagtggagcaacgccaggtaaggggcagtaagaagtgcaggatattggaaggagccatcactcacgcatgtgactgtcacggaaggggactgcttccctctctgctgaaagaaaggtgatggcagaattcttctcatactaggggctgggttctgaaggt

SEQ ID NO: 340422 - DNA, 539 bp, Homo sapiens
  misc_feature (32)..(32): n is a, c, g, or t
acgctgcaccgcgcgtatacaggcttcgcagncgtggagataagatcccgagccaaaattgagaaaattcgagcaagtttatttaacaataatgacttgattggtttgtcaagtttggatggtgaagatgaattgatggaaatgtcaacagaagagattctaaccgtgtctgtagtaaatcagagtctctttgatactcaagggagcccagggttagaagattatttcaatgataagtcaattaaaggggagaagctggtgcccggagccagagaggttctgacggagatatttaagagttgtgcccattcagagcagacgctgagcctgacaccagcgaagcccatcagagtctctgacatttatcttagcaaagagcagatcaactcccagaccccaggcaacctcctccacctcttcttcaccaatgtccggccgccaaaaaaggtgctggaggatcagctcacccagatcctgaggaagtatggcgtgccaaagcccaagtttgaaccggcgtgcgcgtgaggtaccgagctcga

SEQ ID NO: 340423 - DNA, 7350 bp, Homo sapiens
ctgtgctgttatattttttaggtatggtggatattgcccgacagacggttgaatttctctacgaagagaatggtggcatcccaagagacctttatcttcccaccattgaagacattaaagacgaagcaaacaagttcacaattgataaagttcgaaaaggtctcacagtagtaacccgctctccagacagcaataatgtagccagcagtgctgttggaactgctctgccaaaatttgccatccgagggatgctgaaaacctttgggcttcatggagtcgtcttagatgttgattcagtgaatgaactggtgcaggtagaaacgtacctccgcagtgaaggtgtgctggtgcgatactggtatcctattgacatgttggaaaggcccccagcaggctaccgaaggactgccaccaatgggctggtcacactggacaataccaaccttcaaattcacagggagctgctgcgctgcgaggctgcgctggccaggctgtactgccgcatggccctgctcaatatcttcgccccgaagttgcctcacttgttcactcgcctcttccacatccctgccatccgggacattaccctggagcacctgcaactgctgtccaatcagctcctcgcacctcctctcccagacggcaccatcagctccagctcgatcctcctggcgcagtctttacagcattgcatccattcccagaactgctccgccacggacctcttttaccagggcaactcccagacagtgagagagtggctcaacgtggccatcacccggaccctgcaccagggcgaggagagccttttagagctgacgaaacagatctgctctttcctgcagacagcaccagagcagttcccctccgaagagttcccaatttccgaatccaaagtcaacatggacgtgaatttccccggggcagcttttgttgttgtgtcttgtaaagaaagtcaatctggattccgcaaagactcctctctgtacaaggcaccgtgggcacgggtgctcgtatatggcctcggccacaaagtgaagcgaaatggccagctgaacctcatcgaggccgcctgttacccgcgggacgcgtccccagccaacactgggcttgcacctccccccaccgctgaccagtacccctctgtggtcctctccacagacagggtccacatcaaactgggggtgtctccacctcctggagcagtcctggtgttacattccctgcccctggagttcccactggctatggccttcgcagagcagctgctgtcctggaaatcagaggacagtgaagggaagtccgaagatgagcctgacaccattccgacatccgtcctcctgcaggtggtggagctgctaggaaacttcttgtggaccacggacatggcagcctgcgtgaaggagcttgttttccatctcctggcagagctcctgcgcacggtgcacaccctggagcagaggcggcaccccgctggcctgtcctcctcaatcgccctccagctgaacccctgcctggccatgctgatggccttgcagtcggagctccacaagctgtacgacgaggagacgcagaactgggtctcaggcggcgcctgcgggggctccgggggggcggcggccggtgaccagggcaggttctctacgtattttcatgcactcatggaagggtgcctggctgtggccgaagtgaccctgcctactaacatgagtgtcacagccagtggggtgacctcagcgaccgccccaaatctcagtgactcgtcctcctcctcctcgtcctccccaggacagaccccacagagtcccagcctcctctccaagaggaaaaaagtcaagatgaagcgggaaaaggcctcctcgtcgggcaagcgccagtcttcccgcaccgtggactcggaccccaccgtgctcagcatcggaggcagcaagcccgaggacatgctgtggttccaccgcgcactcaccctgctcatcatcctccgccacctcaccaggaaggacccacaggggctgggcgtgacgagtgacgccatcgccgatgcctgccaggccctggtgggccccaccgcccacagccgcttgctggtgatctccgggatccccacccacctggacgagggcgtagtcagaggcgccatccgcaaggcctgcaacgcccacggcggggtcttcaaagacgagatctacatcccgctgcaggaagaagacaccaagaagccaaaagacaaggccgagggcggggacgggaaagttgagcccgagaagacactggccttccccggcacagacagcatggaggtcagcacgtccagcagcctgacccccgccatgagcatcagcgcctccgcctccaccagccaggcctccatctgcagctcgcagggcatctcccaaaccgtcagcgacctctctgtggatccgctgcctgccggcctcgagctgcccatccctccgggcctgttggagccccacgcggtgtccagccaggaaagcctggacatttccctgtgcagcaccggcagcctgggcagcctgggcagcctgggggagcccctggacaatgcagagacggcctcggtgtcggacatgggctccatgtacacagtcacttccctggacaaccagcccctcgccgcccgccccatcaaaggcttcgcagtcgtggagataagatcccgagccaaaattgagaaaattcgagcaagtttatttaacaataatgacttgattggtttgtcaagtttggatggtgaagatgaattgatggaaatgtcaacagaagagattctaaccgtgtctgtagtaaatcagagtctctttgatactcaagggagcccagggttagaagattatttcaatgataagtcaattaaaggggagaagctggtgcccggagccagagaggttctgacggagatatttaagagttgtgcccattcagagcagacgctgagcctgacaccagcgaagcccatcagagtctctgacatttatcttagcaaagagcagatcaactcccagaccccaggcaacctcctccacctcttcttcaccaatgtccggccgccaaaaaaggtgctggaggatcagctcacccagatcctgaggaagtatggcgtgccaaagcccaagtttgacaagagcaagtacagcaaggccgggaaggagcagcaccccgtgaaggtggtgagcaccaagcggcctatcaccaagccgcccgccaaggacaaggctgtgctcaacagcgtcagcaggactgccttaagtgagaagaagccaactgtgaagccaaaatcaccagaaaagagcaaaccagatgaaaaggacccagaaaagtcacctaccaaaaaacaagaagtccctgaggaaaaatacctgacgctggaaggatttcacaaatttgttattgaccgagccaggcaagatatccgtagcgtctggagggcgatcttgtcctgtggttacgatcttcactttgagaggtgcgcatgcatcgatgtccgacatgcacagaaggcctcaagaaagtggaccctggagatggacgtggcacttgtgcagtacatcaaccagctatgccgccacctcgccatcacacccgcacggctccatccccatgaggtgtacctggaccccgcggatgctgctgaccccagagtggcctgtctcctgaacgtgcccatcgagagcctgcgcctgcgcttcgccttgctgcagtccctcaacaccacactggagaccttcttcctgcccctggtggagctgcgccagacacccatgtatacccacagcatcgccgccctgctgaaggaggccaaagggctgatcttctatgacacgaaggtgaccgtgatgaatcgagtgctgaatgccactgtgcagaggacagcggaccacgcggcccctgagatcaccttggacccactggaaattgtgggaggggaaatcagagcttctgaaaactcctacttctgtcaggctgccaggcagctggcctcagtgccgtcgtctcagctctgcgtcaagctggccagtggcggtgaccccacatatgccttcaacatccgcttcactggcgaggaggtccatggcaccagcggctctttccgccacttcctgtggcaggtgtgtaaggagctgcagagttcctcgctgtcgctgctgctgctgtgccccagctcagctgtcaataagaacaagggcaagtatatcctgaccccgagccccatcacctacggggaggagcagctgctgcacttcctggggcagctgctggggattgcaattcgggcagacgtcccgctgcccctggacctcctgccctccttctggaagacgctggtgggcgagcccttggaccctgagcaagacctgcaggaagcggatatcctcacctacaattacgtcaagaagtttgagagcatcaatgatgagaccgagctggaggccctgtgcgctgagatcgcctcccagcacctggccacggagagccctgacagccccaacaagccctgctgcaggttcacctacctgaccatgacgggcgaggaggtggagctgtgcagccggggccggcacatccttgtggcgtgggagaacaaggacatctacgcggcagccatccggagcctgcggctgcgggagctgcagaatgtggagtgcgtgacggccgtgcgggccggcctgggctccatcatccccctgcagctgctgaccatgctcagcccactggagatggagctgcgcacctgcggcctcccctacatcaacctcgagttcctcaaggcccacaccatgtaccaagtggggctgatggagacggaccagcacatcgagttcttctggggggccctggagatgttcacccaggaggagctgtgcaagttcatcaagtttgcctgcaaccaggagcgcatcccgttcacctgcccctgcaaagatgggggtcccgacactgcccatgtgcccccgtaccccatgaagatcgcccccccagatggcacagcaggttccccagactctcgctacatccgcgtggagacctgcatgttcatgatcaagcttccccagtactcctctctggaaatcatgctggagaaacttcgttgtgccattcactaccgtgaagaccccctcagtggctgatgggagggagccccagaattaggctgtcactgaggcacccactctgctggcttgggaagccaccactgcggcccgtccctccagggccctgcgtgaggagttggcaacattttgcttttccaaactttcgtccacattccagggcctcctggaagacttaaccttttgtctttgtacgtttcgtgatgggttggttcttttgctgcctgtttgtggtctatttgtaggatagtttagttcccagacagtttgtgtctaatttgatcttcttggacattgtccctcatggccaccagattctaatgccataaggccccagctggttccccatcacagaaccacccagcaggaagccgggggtacaatgacctcggccacacagagcgctcgtgctttcagcagagcgcctccacagacaagcctgtggccagccctgccctccagcctcgagctggagttgctccagaggcagccccagcaggcctccctccacatagaggtggctgggccaattgcccaaacacgtgagacacacagggagctttatgtgttcatcttcctgctttagaacttgctcccggtcttggtttttctgaggaaaagcccacagtggttcccctgcccctcccatacctccctatctgccgtctgtctctttgggccctggtctgacagttttcatctgaggcctcctcgggagcaggagacttaagggttcatcccgaccttagttcacagagcctagctgggtgcatcccagccgcagggggtgagaagacacccagagatgggggacaatgctcaggtgggggcctcctccgagactctggttgagaggaaagcacatgattcaagcctaccccacaaaaaaggagcacaaaatgctcagaaatggcccttcctccctgcagtgacgtaggacaagggaaagggccacacccattttcaaaagagtggactgaggtgctctgctcaatttggggtctgctttagtgacccagacactcaagtccagatggagactccaggggggtccttctgcccctctggccagccccacccagcactccccatcaccccatgtaagtgtgtatgccagggctgagctgcctccaggctcacccactgcatctttgccccaaataggtctttgtccagtggtactttgttcatgagcagcacaggccatcttgttggacactgtcactttgggccttgccaggtctcacagaatcacatcgctgtatttattgtataatattgtgaatattggaagttttgagtgagtgctgtctagaaggttttggagtgtggatgctggtccaagaaagaagatgtgccctggcctgctggaaagattgtgaattctagagatagagccgttagcatccatctcctccctgtaactcttaggaaatgcatcaaggaccattatagaaaggatcccctgacctaaggatgaaatcgacctagggttaatcatgacagctgcatcagttgtattggatgcaagtcaactctggaggtgagtgcccgcaagcagttcccctgctttgaaagaagatggtcagcccgctgcctccccagcggccacagctcctttgagtgtggggggtcacagccaggatgtattcctgacaataaggatccttttattttcatttctgcataatgaaagagcctttcgatttattagaagtggtttttcctccctacatctttaaattcttggttctctttagtcctcatcccttgaatggacttgtcagctacctccccaggaggagttcagaagcttctgttggccatcacttgagtagatgacaagctgtaaggtatctgctgctaacgtggctgcttctccgagagcacattgaggtccagacagatccaaaccttggccctaaaaaatgtgtgctgtaaagttacttgatgtatatttattataattatttatggttgcatttaacaaacttttcattcaatctgatgctatttacaccatgctgtgtaaaggaagctcactaaaggaaaaaagtcacaccaataaataaccttcatctaattttgatttaccttaagagttgtgtgatcatctactcttgctgagcaagttcaaaggctggcatgcttggatggctctgatatttaagtgctgccaagtggctaggaattaaagtgtttctaattattatggtctctt

SEQ ID NO: 340424 - DNA, 7627 bp, Homo sapiens
ctgtgctgttatattttttaggtatggtggatattgcccgacagacggttgaatttctctacgaagagaatggtggcatcccaagagacctttatcttcccaccattgaagacattaaagacgaagcaaacaagttcacaattgataaagttcgaaaaggtctcacagtagtaacccgctctccagacagcaataatgtagccagcagtgctgttggaactgctctgccaaaatttgccatccgagggatgctgaaaacctttgggcttcatggagtcgtcttagatgttgattcagtgaatgaactggtgcaggtagaaacgtacctccgcagtgaaggtgtgctggtgcgatactggtatcctattgacatgttggaaaggcccccagcaggctaccgaaggactgccaccaatgggctggtcacactggacaataccaaccttcaaattcacagggagctgctgcgctgcgaggctgcgctggccaggctgtactgccgcatggccctgctcaatatcttcgccccgaagttgcctcacttgttcactcgcctcttccacatccctgccatccgggacattaccctggagcacctgcaactgctgtccaatcagctcctcgcacctcctctcccagacggcaccatcagctccagctcgatcctcctggcgcagtctttacagcattgcatccattcccagaactgctccgccacggacctcttttaccagggcaactcccagacagtgagagagtggctcaacgtggccatcacccggaccctgcaccagggcgaggagagccttttagagctgacgaaacagatctgctctttcctgcaggtagaagtctaaagctcatgttcctgcagtgtggttaccatttttaactgggagtctcactggcttgctgaaaatgactcccctttcccttccaagtccctattcctctcgatttccttttcctagaagcttttctgctttatctcatctgtagcttgcttccttccagagggctatttagtcgtttggctgatttcctgggccatgtgagatgagaagatgaaatgctgtccctgtgtttagcccgtggctttccttattcagtgtctccttgcagacagcaccagagcagttcccctccgaagagttcccaatttccgaatccaaagtcaacatggacgtgaatttccccggggcagcttttgttgttgtgtcttgtaaagaaagtcaatctggattccgcaaagactcctctctgtacaaggcaccgtgggcacgggtgctcgtatatggcctcggccacaaagtgaagcgaaatggccagctgaacctcatcgaggccgcctgttacccgcgggacgcgtccccagccaacactgggcttgcacctccccccaccgctgaccagtacccctctgtggtcctctccacagacagggtccacatcaaactgggggtgtctccacctcctggagcagtcctggtgttacattccctgcccctggagttcccactggctatggccttcgcagagcagctgctgtcctggaaatcagaggacagtgaagggaagtccgaagatgagcctgacaccattccgacatccgtcctcctgcaggtggtggagctgctaggaaacttcttgtggaccacggacatggcagcctgcgtgaaggagcttgttttccatctcctggcagagctcctgcgcacggtgcacaccctggagcagaggcggcaccccgctggcctgtcctcctcaatcgccctccagctgaacccctgcctggccatgctgatggccttgcagtcggagctccacaagctgtacgacgaggagacgcagaactgggtctcaggcggcgcctgcgggggctccgggggggcggcggccggtgaccagggcaggttctctacgtattttcatgcactcatggaagggtgcctggctgtggccgaagtgaccctgcctactaacatgagtgtcacagccagtggggtgacctcagcgaccgccccaaatctcagtgactcgtcctcctcctcctcgtcctccccaggacagaccccacagagtcccagcctcctctccaagaggaaaaaagtcaagatgaagcgggaaaaggcctcctcgtcgggcaagcgccagtcttcccgcaccgtggactcggaccccaccgtgctcagcatcggaggcagcaagcccgaggacatgctgtggttccaccgcgcactcaccctgctcatcatcctccgccacctcaccaggaaggacccacaggggctgggcgtgacgagtgacgccatcgccgatgcctgccaggccctggtgggccccaccgcccacagccgcttgctggtgatctccgggatccccacccacctggacgagggcgtagtcagaggcgccatccgcaaggcctgcaacgcccacggcggggtcttcaaagacgagatctacatcccgctgcaggaagaagacaccaagaagccaaaagacaaggccgagggcggggacgggaaagttgagcccgagaagacactggccttccccggcacagacagcatggaggtcagcacgtccagcagcctgacccccgccatgagcatcagcgcctccgcctccaccagccaggcctccatctgcagctcgcagggcatctcccaaaccgtcagcgacctctctgtggatccgctgcctgccggcctcgagctgcccatccctccgggcctgttggagccccacgcggtgtccagccaggaaagcctggacatttccctgtgcagcaccggcagcctgggcagcctgggcagcctgggggagcccctggacaatgcagagacggcctcggtgtcggacatgggctccatgtacacagtcacttccctggacaaccagcccctcgccgcccgccccatcaaaggcttcgcagtcgtggagataagatcccgagccaaaattgagaaaattcgagcaagtttatttaacaataatgacttgattggtttgtcaagtttggatggtgaagatgaattgatggaaatgtcaacagaagagattctaaccgtgtctgtagtaaatcagagtctctttgatactcaagggagcccagggttagaagattatttcaatgataagtcaattaaaggggagaagctggtgcccggagccagagaggttctgacggagatatttaagagttgtgcccattcagagcagacgctgagcctgacaccagcgaagcccatcagagtctctgacatttatcttagcaaagagcagatcaactcccagaccccaggcaacctcctccacctcttcttcaccaatgtccggccgccaaaaaaggtgctggaggatcagctcacccagatcctgaggaagtatggcgtgccaaagcccaagtttgacaagagcaagtacagcaaggccgggaaggagcagcaccccgtgaaggtggtgagcaccaagcggcctatcaccaagccgcccgccaaggacaaggctgtgctcaacagcgtcagcaggactgccttaagtgagaagaagccaactgtgaagccaaaatcaccagaaaagagcaaaccagatgaaaaggacccagaaaagtcacctaccaaaaaacaagaagtccctgaggaaaaatacctgacgctggaaggatttcacaaatttgttattgaccgagccaggcaagatatccgtagcgtctggagggcgatcttgtcctgtggttacgatcttcactttgagaggtgcgcatgcatcgatgtccgacatgcacagaaggcctcaagaaagtggaccctggagatggacgtggcacttgtgcagtacatcaaccagctatgccgccacctcgccatcacacccgcacggctccatccccatgaggtgtacctggaccccgcggatgctgctgaccccagagtggcctgtctcctgaacgtgcccatcgagagcctgcgcctgcgcttcgccttgctgcagtccctcaacaccacactggagaccttcttcctgcccctggtggagctgcgccagacacccatgtatacccacagcatcgccgccctgctgaaggaggccaaagggctgatcttctatgacacgaaggtgaccgtgatgaatcgagtgctgaatgccactgtgcagaggacagcggaccacgcggcccctgagatcaccttggacccactggaaattgtgggaggggaaatcagagcttctgaaaactcctacttctgtcaggctgccaggcagctggcctcagtgccgtcgtctcagctctgcgtcaagctggccagtggcggtgaccccacatatgccttcaacatccgcttcactggcgaggaggtccatggcaccagcggctctttccgccacttcctgtggcaggtgtgtaaggagctgcagagttcctcgctgtcgctgctgctgctgtgccccagctcagctgtcaataagaacaagggcaagtatatcctgaccccgagccccatcacctacggggaggagcagctgctgcacttcctggggcagctgctggggattgcaattcgggcagacgtcccgctgcccctggacctcctgccctccttctggaagacgctggtgggcgagcccttggaccctgagcaagacctgcaggaagcggatatcctcacctacaattacgtcaagaagtttgagagcatcaatgatgagaccgagctggaggccctgtgcgctgagatcgcctcccagcacctggccacggagagccctgacagccccaacaagccctgctgcaggttcacctacctgaccatgacgggcgaggaggtggagctgtgcagccggggccggcacatccttgtggcgtgggagaacaaggacatctacgcggcagccatccggagcctgcggctgcgggagctgcagaatgtggagtgcgtgacggccgtgcgggccggcctgggctccatcatccccctgcagctgctgaccatgctcagcccactggagatggagctgcgcacctgcggcctcccctacatcaacctcgagttcctcaaggcccacaccatgtaccaagtggggctgatggagacggaccagcacatcgagttcttctggggggccctggagatgttcacccaggaggagctgtgcaagttcatcaagtttgcctgcaaccaggagcgcatcccgttcacctgcccctgcaaagatgggggtcccgacactgcccatgtgcccccgtaccccatgaagatcgcccccccagatggcacagcaggttccccagactctcgctacatccgcgtggagacctgcatgttcatgatcaagcttccccagtactcctctctggaaatcatgctggagaaacttcgttgtgccattcactaccgtgaagaccccctcagtggctgatgggagggagccccagaattaggctgtcactgaggcacccactctgctggcttgggaagccaccactgcggcccgtccctccagggccctgcgtgaggagttggcaacattttgcttttccaaactttcgtccacattccagggcctcctggaagacttaaccttttgtctttgtacgtttcgtgatgggttggttcttttgctgcctgtttgtggtctatttgtaggatagtttagttcccagacagtttgtgtctaatttgatcttcttggacattgtccctcatggccaccagattctaatgccataaggccccagctggttccccatcacagaaccacccagcaggaagccgggggtacaatgacctcggccacacagagcgctcgtgctttcagcagagcgcctccacagacaagcctgtggccagccctgccctccagcctcgagctggagttgctccagaggcagccccagcaggcctccctccacatagaggtggctgggccaattgcccaaacacgtgagacacacagggagctttatgtgttcatcttcctgctttagaacttgctcccggtcttggtttttctgaggaaaagcccacagtggttcccctgcccctcccatacctccctatctgccgtctgtctctttgggccctggtctgacagttttcatctgaggcctcctcgggagcaggagacttaagggttcatcccgaccttagttcacagagcctagctgggtgcatcccagccgcagggggtgagaagacacccagagatgggggacaatgctcaggtgggggcctcctccgagactctggttgagaggaaagcacatgattcaagcctaccccacaaaaaaggagcacaaaatgctcagaaatggcccttcctccctgcagtgacgtaggacaagggaaagggccacacccattttcaaaagagtggactgaggtgctctgctcaatttggggtctgctttagtgacccagacactcaagtccagatggagactccaggggggtccttctgcccctctggccagccccacccagcactccccatcaccccatgtaagtgtgtatgccagggctgagctgcctccaggctcacccactgcatctttgccccaaataggtctttgtccagtggtactttgttcatgagcagcacaggccatcttgttggacactgtcactttgggccttgccaggtctcacagaatcacatcgctgtatttattgtataatattgtgaatattggaagttttgagtgagtgctgtctagaaggttttggagtgtggatgctggtccaagaaagaagatgtgccctggcctgctggaaagattgtgaattctagagatagagccgttagcatccatctcctccctgtaactcttaggaaatgcatcaaggaccattatagaaaggatcccctgacctaaggatgaaatcgacctagggttaatcatgacagctgcatcagttgtattggatgcaagtcaactctggaggtgagtgcccgcaagcagttcccctgctttgaaagaagatggtcagcccgctgcctccccagcggccacagctcctttgagtgtggggggtcacagccaggatgtattcctgacaataaggatccttttattttcatttctgcataatgaaagagcctttcgatttattagaagtggtttttcctccctacatctttaaattcttggttctctttagtcctcatcccttgaatggacttgtcagctacctccccaggaggagttcagaagcttctgttggccatcacttgagtagatgacaagctgtaaggtatctgctgctaacgtggctgcttctccgagagcacattgaggtccagacagatccaaaccttggccctaaaaaatgtgtgctgtaaagttacttgatgtatatttattataattatttatggttgcatttaacaaacttttcattcaatctgatgctatttacaccatgctgtgtaaaggaagctcactaaaggaaaaaagtcacaccaataaataaccttcatctaattttgatttaccttaagagttgtgtgatcatctactcttgctgagcaagttcaaaggctggcatgcttggatggctctgatatttaagtgctgccaagtggctaggaattaaagtgtttctaattattatggtctctt

SEQ ID NO: 340425 - DNA, 4720 bp, Homo sapiens
  misc_feature (32)..(32): n is a, c, g, or t
acgctgcaccgcgcgtatacaggcttcgcagncgtggagataagatcccgagccaaaattgagaaaattcgagcaagtttatttaacaataatgacttgattggtttgtcaagtttggatggtgaagatgaattgatggaaatgtcaacagaagagattctaaccgtgtctgtagtaaatcagagtctctttgatactcaagggagcccagggttagaagattatttcaatgataagtcaattaaaggggagaagctggtgcccggagccagagaggttctgacggagatatttaagagttgtgcccattcagagcagacgctgagcctgacaccagcgaagcccatcagagtctctgacatttatcttagcaaagagcagatcaactcccagaccccaggcaacctcctccacctcttcttcaccaatgtccggccgccaaaaaaggtgctggaggatcagctcacccagatcctgaggaagtatggcgtgccaaagcccaagtttgacaagagcaagtacagcaaggccgggaaggagcagcaccccgtgaaggtggtgagcaccaagcggcctatcaccaagccgcccgccaaggacaaggctgtgctcaacagcgtcagcaggactgccttaagtgagaagaagccaactgtgaagccaaaatcaccagaaaagagcaaaccagatgaaaaggacccagaaaagtcacctaccaaaaaacaagaagtccctgaggaaaaatacctgacgctggaaggatttcacaaatttgttattgaccgagccaggcaagatatccgtagcgtctggagggcgatcttgtcctgtggttacgatcttcactttgagaggtgcgcatgcatcgatgtccgacatgcacagaaggcctcaagaaagtggaccctggagatggacgtggcacttgtgcagtacatcaaccagctatgccgccacctcgccatcacacccgcacggctccatccccatgaggtgtacctggaccccgcggatgctgctgaccccagagtggcctgtctcctgaacgtgcccatcgagagcctgcgcctgcgcttcgccttgctgcagtccctcaacaccacactggagaccttcttcctgcccctggtggagctgcgccagacacccatgtatacccacagcatcgccgccctgctgaaggaggccaaagggctgatcttctatgacacgaaggtgaccgtgatgaatcgagtgctgaatgccactgtgcagaggacagcggaccacgcggcccctgagatcaccttggacccactggaaattgtgggaggggaaatcagagcttctgaaaactcctacttctgtcaggctgccaggcagctggcctcagtgccgtcgtctcagctctgcgtcaagctggccagtggcggtgaccccacatatgccttcaacatccgcttcactggcgaggaggtccatggcaccagcggctctttccgccacttcctgtggcaggtgtgtaaggagctgcagagttcctcgctgtcgctgctgctgctgtgccccagctcagctgtcaataagaacaagggcaagtatatcctgaccccgagccccatcacctacggggaggagcagctgctgcacttcctggggcagctgctggggattgcaattcgggcagacgtcccgctgcccctggacctcctgccctccttctggaagacgctggtgggcgagcccttggaccctgagcaagacctgcaggaagcggatatcctcacctacaattacgtcaagaagtttgagagcatcaatgatgagaccgagctggaggccctgtgcgctgagatcgcctcccagcacctggccacggagagccctgacagccccaacaagccctgctgcaggttcacctacctgaccatgacgggcgaggaggtggagctgtgcagccggggccggcacatccttgtggcgtgggagaacaaggacatctacgcggcagccatccggagcctgcggctgcgggagctgcagaatgtggagtgcgtgacggccgtgcgggccggcctgggctccatcatccccctgcagctgctgaccatgctcagcccactggagatggagctgcgcacctgcggcctcccctacatcaacctcgagttcctcaaggcccacaccatgtaccaagtggggctgatggagacggaccagcacatcgagttcttctggggggccctggagatgttcacccaggaggagctgtgcaagttcatcaagtttgcctgcaaccaggagcgcatcccgttcacctgcccctgcaaagatgggggtcccgacactgcccatgtgcccccgtaccccatgaagatcgcccccccagatggcacagcaggttccccagactctcgctacatccgcgtggagacctgcatgttcatgatcaagcttccccagtactcctctctggaaatcatgctggagaaacttcgttgtgccattcactaccgtgaagaccccctcagtggctgatgggagggagccccagaattaggctgtcactgaggcacccactctgctggcttgggaagccaccactgcggcccgtccctccagggccctgcgtgaggagttggcaacattttgcttttccaaactttcgtccacattccagggcctcctggaagacttaaccttttgtctttgtacgtttcgtgatgggttggttcttttgctgcctgtttgtggtctatttgtaggatagtttagttcccagacagtttgtgtctaatttgatcttcttggacattgtccctcatggccaccagattctaatgccataaggccccagctggttccccatcacagaaccacccagcaggaagccgggggtacaatgacctcggccacacagagcgctcgtgctttcagcagagcgcctccacagacaagcctgtggccagccctgccctccagcctcgagctggagttgctccagaggcagccccagcaggcctccctccacatagaggtggctgggccaattgcccaaacacgtgagacacacagggagctttatgtgttcatcttcctgctttagaacttgctcccggtcttggtttttctgaggaaaagcccacagtggttcccctgcccctcccatacctccctatctgccgtctgtctctttgggccctggtctgacagttttcatctgaggcctcctcgggagcaggagacttaagggttcatcccgaccttagttcacagagcctagctgggtgcatcccagccgcagggggtgagaagacacccagagatgggggacaatgctcaggtgggggcctcctccgagactctggttgagaggaaagcacatgattcaagcctaccccacaaaaaaggagcacaaaatgctcagaaatggcccttcctccctgcagtgacgtaggacaagggaaagggccacacccattttcaaaagagtggactgaggtgctctgctcaatttggggtctgctttagtgacccagacactcaagtccagatggagactccaggggggtccttctgcccctctggccagccccacccagcactccccatcaccccatgtaagtgtgtatgccagggctgagctgcctccaggctcacccactgcatctttgccccaaataggtctttgtccagtggtactttgttcatgagcagcacaggccatcttgttggacactgtcactttgggccttgccaggtctcacagaatcacatcgctgtatttattgtataatattgtgaatattggaagttttgagtgagtgctgtctagaaggttttggagtgtggatgctggtccaagaaagaagatgtgccctggcctgctggaaagattgtgaattctagagatagagccgttagcatccatctcctccctgtaactcttaggaaatgcatcaaggaccattatagaaaggatcccctgacctaaggatgaaatcgacctagggttaatcatgacagctgcatcagttgtattggatgcaagtcaactctggaggtgagtgcccgcaagcagttcccctgctttgaaagaagatggtcagcccgctgcctccccagcggccacagctcctttgagtgtggggggtcacagccaggatgtattcctgacaataaggatccttttattttcatttctgcataatgaaagagcctttcgatttattagaagtggtttttcctccctacatctttaaattcttggttctctttagtcctcatcccttgaatggacttgtcagctacctccccaggaggagttcagaagcttctgttggccatcacttgagtagatgacaagctgtaaggtatctgctgctaacgtggctgcttctccgagagcacattgaggtccagacagatccaaaccttggccctaaaaaatgtgtgctgtaaagttacttgatgtatatttattataattatttatggttgcatttaacaaacttttcattcaatctgatgctatttacaccatgctgtgtaaaggaagctcactaaaggaaaaaagtcacaccaataaataaccttcatctaattttgatttaccttaagagttgtgtgatcatctactcttgctgagcaagttcaaaggctggcatgcttggatggctctgatatttaagtgctgccaagtggctaggaattaaagtgtttctaattattatggtctctt

SEQ ID NO: 340426 - DNA, 6454 bp, Homo sapiens
gttctagaggatcccgcctaagtggaactgctccgccacggacctcttttaccagggcaactcccagacagtgagagagtggctcaacgtggccatcacccggaccctgcaccagggcgaggagagccttttagagctgacgaaacagatctgctctttcctgcagacagcaccagagcagttcccctccgaagagttcccaatttccgaatccaaagtcaacatggacgtgaatttccccggggcagcttttgttgttgtgtcttgtaaagaaagtcaatctggattccgcaaagactcctctctgtacaaggcaccgtgggcacgggtgctcgtatatggcctcggccacaaagtgaagcgaaatggccagctgaacctcatcgaggccgcctgttacccgcgggacgcgtccccagccaacactgggcttgcacctccccccaccgctgaccagtacccctctgtggtcctctccacagacagggtccacatcaaactgggggtgtctccacctcctggagcagtcctggtgttacattccctgcccctggagttcccactggctatggccttcgcagagcagctgctgtcctggaaatcagaggacagtgaagggaagtccgaagatgagcctgacaccattccgacatccgtcctcctgcaggtggtggagctgctaggaaacttcttgtggaccacggacatggcagcctgcgtgaaggagcttgttttccatctcctggcagagctcctgcgcacggtgcacaccctggagcagaggcggcaccccgctggcctgtcctcctcaatcgccctccagctgaacccctgcctggccatgctgatggccttgcagtcggagctccacaagctgtacgacgaggagacgcagaactgggtctcaggcggcgcctgcgggggctccgggggggcggcggccggtgaccagggcaggttctctacgtattttcatgcactcatggaagggtgcctggctgtggccgaagtgaccctgcctactaacatgagtgtcacagccagtggggtgacctcagcgaccgccccaaatctcagtgactcgtcctcctcctcctcgtcctccccaggacagaccccacagagtcccagcctcctctccaagaggaaaaaagtcaagatgaagcgggaaaaggcctcctcgtcgggcaagcgccagtcttcccgcaccgtggactcggaccccaccgtgctcagcatcggaggcagcaagcccgaggacatgctgtggttccaccgcgcactcaccctgctcatcatcctccgccacctcaccaggaaggacccacaggggctgggcgtgacgagtgacgccatcgccgatgcctgccaggccctggtgggccccaccgcccacagccgcttgctggtgatctccgggatccccacccacctggacgagggcgtagtcagaggcgccatccgcaaggcctgcaacgcccacggcggggtcttcaaagacgagatctacatcccgctgcaggaagaagacaccaagaagccaaaagacaaggccgagggcggggacgggaaagttgagcccgagaagacactggccttccccggcacagacagcatggaggtcagcacgtccagcagcctgacccccgccatgagcatcagcgcctccgcctccaccagccaggcctccatctgcagctcgcagggcatctcccaaaccgtcagcgacctctctgtggatccgctgcctgccggcctcgagctgcccatccctccgggcctgttggagccccacgcggtgtccagccaggaaagcctggacatttccctgtgcagcaccggcagcctgggcagcctgggcagcctgggggagcccctggacaatgcagagacggcctcggtgtcggacatgggctccatgtacacagtcacttccctggacaaccagcccctcgccgcccgccccatcaaaggcttcgcagtcgtggagataagatcccgagccaaaattgagaaaattcgagcaagtttatttaacaataatgacttgattggtttgtcaagtttggatggtgaagatgaattgatggaaatgtcaacagaagagattctaaccgtgtctgtagtaaatcagagtctctttgatactcaagggagcccagggttagaagattatttcaatgataagtcaattaaaggggagaagctggtgcccggagccagagaggttctgacggagatatttaagagttgtgcccattcagagcagacgctgagcctgacaccagcgaagcccatcagagtctctgacatttatcttagcaaagagcagatcaactcccagaccccaggcaacctcctccacctcttcttcaccaatgtccggccgccaaaaaaggtgctggaggatcagctcacccagatcctgaggaagtatggcgtgccaaagcccaagtttgacaagagcaagtacagcaaggccgggaaggagcagcaccccgtgaaggtggtgagcaccaagcggcctatcaccaagccgcccgccaaggacaaggctgtgctcaacagcgtcagcaggactgccttaagtgagaagaagccaactgtgaagccaaaatcaccagaaaagagcaaaccagatgaaaaggacccagaaaagtcacctaccaaaaaacaagaagtccctgaggaaaaatacctgacgctggaaggatttcacaaatttgttattgaccgagccaggcaagatatccgtagcgtctggagggcgatcttgtcctgtggttacgatcttcactttgagaggtgcgcatgcatcgatgtccgacatgcacagaaggcctcaagaaagtggaccctggagatggacgtggcacttgtgcagtacatcaaccagctatgccgccacctcgccatcacacccgcacggctccatccccatgaggtgtacctggaccccgcggatgctgctgaccccagagtggcctgtctcctgaacgtgcccatcgagagcctgcgcctgcgcttcgccttgctgcagtccctcaacaccacactggagaccttcttcctgcccctggtggagctgcgccagacacccatgtatacccacagcatcgccgccctgctgaaggaggccaaagggctgatcttctatgacacgaaggtgaccgtgatgaatcgagtgctgaatgccactgtgcagaggacagcggaccacgcggcccctgagatcaccttggacccactggaaattgtgggaggggaaatcagagcttctgaaaactcctacttctgtcaggctgccaggcagctggcctcagtgccgtcgtctcagctctgcgtcaagctggccagtggcggtgaccccacatatgccttcaacatccgcttcactggcgaggaggtccatggcaccagcggctctttccgccacttcctgtggcaggtgtgtaaggagctgcagagttcctcgctgtcgctgctgctgctgtgccccagctcagctgtcaataagaacaagggcaagtatatcctgaccccgagccccatcacctacggggaggagcagctgctgcacttcctggggcagctgctggggattgcaattcgggcagacgtcccgctgcccctggacctcctgccctccttctggaagacgctggtgggcgagcccttggaccctgagcaagacctgcaggaagcggatatcctcacctacaattacgtcaagaagtttgagagcatcaatgatgagaccgagctggaggccctgtgcgctgagatcgcctcccagcacctggccacggagagccctgacagccccaacaagccctgctgcaggttcacctacctgaccatgacgggcgaggaggtggagctgtgcagccggggccggcacatccttgtggcgtgggagaacaaggacatctacgcggcagccatccggagcctgcggctgcgggagctgcagaatgtggagtgcgtgacggccgtgcgggccggcctgggctccatcatccccctgcagctgctgaccatgctcagcccactggagatggagctgcgcacctgcggcctcccctacatcaacctcgagttcctcaaggcccacaccatgtaccaagtggggctgatggagacggaccagcacatcgagttcttctggggggccctggagatgttcacccaggaggagctgtgcaagttcatcaagtttgcctgcaaccaggagcgcatcccgttcacctgcccctgcaaagatgggggtcccgacactgcccatgtgcccccgtaccccatgaagatcgcccccccagatggcacagcaggttccccagactctcgctacatccgcgtggagacctgcatgttcatgatcaagcttccccagtactcctctctggaaatcatgctggagaaacttcgttgtgccattcactaccgtgaagaccccctcagtggctgatgggagggagccccagaattaggctgtcactgaggcacccactctgctggcttgggaagccaccactgcggcccgtccctccagggccctgcgtgaggagttggcaacattttgcttttccaaactttcgtccacattccagggcctcctggaagacttaaccttttgtctttgtacgtttcgtgatgggttggttcttttgctgcctgtttgtggtctatttgtaggatagtttagttcccagacagtttgtgtctaatttgatcttcttggacattgtccctcatggccaccagattctaatgccataaggccccagctggttccccatcacagaaccacccagcaggaagccgggggtacaatgacctcggccacacagagcgctcgtgctttcagcagagcgcctccacagacaagcctgtggccagccctgccctccagcctcgagctggagttgctccagaggcagccccagcaggcctccctccacatagaggtggctgggccaattgcccaaacacgtgagacacacagggagctttatgtgttcatcttcctgctttagaacttgctcccggtcttggtttttctgaggaaaagcccacagtggttcccctgcccctcccatacctccctatctgccgtctgtctctttgggccctggtctgacagttttcatctgaggcctcctcgggagcaggagacttaagggttcatcccgaccttagttcacagagcctagctgggtgcatcccagccgcagggggtgagaagacacccagagatgggggacaatgctcaggtgggggcctcctccgagactctggttgagaggaaagcacatgattcaagcctaccccacaaaaaaggagcacaaaatgctcagaaatggcccttcctccctgcagtgacgtaggacaagggaaagggccacacccattttcaaaagagtggactgaggtgctctgctcaatttggggtctgctttagtgacccagacactcaagtccagatggagactccaggggggtccttctgcccctctggccagccccacccagcactccccatcaccccatgtaagtgtgtatgccagggctgagctgcctccaggctcacccactgcatctttgccccaaataggtctttgtccagtggtactttgttcatgagcagcacaggccatcttgttggacactgtcactttgggccttgccaggtctcacagaatcacatcgctgtatttattgtataatattgtgaatattggaagttttgagtgagtgctgtctagaaggttttggagtgtggatgctggtccaagaaagaagatgtgccctggcctgctggaaagattgtgaattctagagatagagccgttagcatccatctcctccctgtaactcttaggaaatgcatcaaggaccattatagaaaggatcccctgacctaaggatgaaatcgacctagggttaatcatgacagctgcatcagttgtattggatgcaagtcaactctggagtcctcatcccttgaatggacttgtcagctacctccccaggaggagttcagaagcttctgttggccatcacttgagtagatgacaagctgtaaggtatctgctgctaacgtggctgcttctccgagagcacattgaggtccagacagatccaaaccttggccctaaaaaatgtgtgctgtaaagttacttgatgtatatttattataattatttatggttgcatttaacaaacttttcattcaatctgatgctatttacaccatgctgtgtaaaggaagctcactaaaggaaaaaagtcacaccaataaataaccttcatctaattttgatttaccttaagagttgtgtgatcatctactcttgctgagcaagttcaaaggctggcatgcttggatggctctgatatttaagtgctgccaagtggctaggaattaaagtgtttctaattattatggtctctt

SEQ ID NO: 340427 - DNA, 6315 bp, Homo sapiens
gttctagaggatcccgcctaagtggaactgctccgccacggacctcttttaccagggcaactcccagacagtgagagagtggctcaacgtggccatcacccggaccctgcaccagggcgaggagagccttttagagctgacgaaacagatctgctctttcctgcagacagcaccagagcagttcccctccgaagagttcccaatttccgaatccaaagtcaacatggacgtgaatttccccggggcagcttttgttgttgtgtcttgtaaagaaagtcaatctggattccgcaaagactcctctctgtacaaggcaccgtgggcacgggtgctcgtatatggcctcggccacaaagtgaagcgaaatggccagctgaacctcatcgaggccgcctgttacccgcgggacgcgtccccagccaacactgggcttgcacctccccccaccgctgaccagtacccctctgtggtcctctccacagacagggtccacatcaaactgggggtgtctccacctcctggagcagtcctggtgttacattccctgcccctggagttcccactggctatggccttcgcagagcagctgctgtcctggaaatcagaggacagtgaagggaagtccgaagatgagcctgacaccattccgacatccgtcctcctgcaggtggtggagctgctaggaaacttcttgtggaccacggacatggcagcctgcgtgaaggagcttgttttccatctcctggcagagctcctgcgcacggtgcacaccctggagcagaggcggcaccccgctggcctgtcctcctcaatcgccctccagctgaacccctgcctggccatgctgatggccttgcagtcggagctccacaagctgtacgacgaggagacgcagaactgggtctcaggcggcgcctgcgggggctccgggggggcggcggccggtgaccagggcaggttctctacgtattttcatgcactcatggaagggtgcctggctgtggccgaagtgaccctgcctactaacatgagtgtcacagccagtggggtgacctcagcgaccgccccaaatctcagtgactcgtcctcctcctcctcgtcctccccaggacagaccccacagagtcccagcctcctctccaagaggaaaaaagtcaagatgaagcgggaaaaggcctcctcgtcgggcaagcgccagtcttcccgcaccgtggactcggaccccaccgtgctcagcatcggaggcagcaagcccgaggacatgctgtggttccaccgcgcactcaccctgctcatcatcctccgccacctcaccaggaaggacccacaggggctgggcgtgacgagtgacgccatcgccgatgcctgccaggccctggtgggccccaccgcccacagccgcttgctggtgatctccgggatccccacccacctggacgagggcgtagtcagaggcgccatccgcaaggcctgcaacgcccacggcggggtcttcaaagacgagatctacatcccgctgcaggaagaagacaccaagaagccaaaagacaaggccgagggcggggacgggaaagttgagcccgagaagacactggccttccccggcacagacagcatggaggtcagcacgtccagcagcctgacccccgccatgagcatcagcgcctccgcctccaccagccaggcctccatctgcagctcgcagggcatctcccaaaccgtcagcgacctctctgtggatccgctgcctgccggcctcgagctgcccatccctccgggcctgttggagccccacgcggtgtccagccaggaaagcctggacatttccctgtgcagcaccggcagcctgggcagcctgggcagcctgggggagcccctggacaatgcagagacggcctcggtgtcggacatgggctccatgtacacagtcacttccctggacaaccagcccctcgccgcccgccccatcaaaggcttcgcagtcgtggagataagatcccgagccaaaattgagaaaattcgagcaagtttatttaacaataatgacttgattggtttgtcaagtttggatggtgaagatgaattgatggaaatgtcaacagaagagattctaaccgtgtctgtagtaaatcagagtctctttgatactcaagggagcccagggttagaagattatttcaatgataagtcaattaaaggggagaagctggtgcccggagccagagaggttctgacggagatatttaagagttgtgcccattcagagcagacgctgagcctgacaccagcgaagcccatcagagtctctgacatttatcttagcaaagagcagatcaactcccagaccccaggcaacctcctccacctcttcttcaccaatgtccggccgccaaaaaaggtgctggaggatcagctcacccagatcctgaggaagtatggcgtgccaaagcccaagtttgacaagagcaagtacagcaaggccgggaaggagcagcaccccgtgaaggtggtgagcaccaagcggcctatcaccaagccgcccgccaaggacaaggctgtgctcaacagcgtcagcaggactgccttaagtgagaagaagccaactgtgaagccaaaatcaccagaaaagagcaaaccagatgaaaaggacccagaaaagtcacctaccaaaaaacaagaagtccctgaggaaaaatacctgacgctggaaggatttcacaaatttgttattgaccgagccaggcaagatatccgtagcgtctggagggcgatcttgtcctgtggttacgatcttcactttgagaggtgcgcatgcatcgatgtccgacatgcacagaaggcctcaagaaagtggaccctggagatggacgtggcacttgtgcagtacatcaaccagctatgccgccacctcgccatcacacccgcacggctccatccccatgaggtgtacctggaccccgcggatgctgctgaccccagagtggcctgtctcctgaacgtgcccatcgagagcctgcgcctgcgcttcgccttgctgcagtccctcaacaccacactggagaccttcttcctgcccctggtggagctgcgccagacacccatgtatacccacagcatcgccgccctgctgaaggaggccaaagggctgatcttctatgacacgaaggtgaccgtgatgaatcgagtgctgaatgccactgtgcagaggacagcggaccacgcggcccctgagatcaccttggacccactggaaattgtgggaggggaaatcagagcttctgaaaactcctacttctgtcaggctgccaggcagctggcctcagtgccgtcgtctcagctctgcgtcaagctggccagtggcggtgaccccacatatgccttcaacatccgcttcactggcgaggaggtccatggcaccagcggctctttccgccacttcctgtggcaggtgtgtaaggagctgcagagttcctcgctgtcgctgctgctgctgtgccccagctcagctgtcaataagaacaagggcaagtatatcctgaccccgagccccatcacctacggggaggagcagctgctgcacttcctggggcagctgctggggattgcaattcgggcagacgtcccgctgcccctggacctcctgccctccttctggaagacgctggtgggcgagcccttggaccctgagcaagacctgcaggaagcggatatcctcacctacaattacgtcaagaagtttgagagcatcaatgatgagaccgagctggaggccctgtgcgctgagatcgcctcccagcacctggccacggagagccctgacagccccaacaagccctgctgcaggttcacctacctgaccatgacgggcgaggaggtggagctgtgcagccggggccggcacatccttgtggcgtgggagaacaaggacatctacgcggcagccatccggagcctgcggctgcgggagctgcagaatgtggagtgcgtgacggccgtgcgggccggcctgggctccatcatccccctgcagctgctgaccatgctcagcccactggagatggagctgcgcacctgcggcctcccctacatcaacctcgagttcctcaaggcccacaccatgtaccaagtggggctgatggagacggaccagcacatcgagttcttctggggggccctggagatgttcacccaggaggagctgtgcaagttcatcaagtttgcctgcaaccaggagcgcatcccgttcacctgcccctgcaaagatgggggtcccgacactgcccatgtgcccccgtaccccatgaagatcgcccccccagatggcacagcaggttccccagactctcgctacatccgcgtggagacctgcatgttcatgatcaagcttccccagtactcctctctggaaatcatgctggagaaacttcgttgtgccattcactaccgtgaagaccccctcagtggctgatgggagggagccccagaattaggctgtcactgaggcacccactctgctggcttgggaagccaccactgcggcccgtccctccagggccctgcgtgaggagttggcaacattttgcttttccaaactttcgtccacattccagggcctcctggaagacttaaccttttgtctttgtacgtttcgtgatgggttggttcttttgctgcctgtttgtggtctatttgtaggatagtttagttcccagacagtttgtgtctaatttgatcttcttggacattgtccctcatggccaccagattctaatgccataaggccccagctggttccccatcacagaaccacccagcaggaagccgggggtacaatgacctcggccacacagagcgctcgtgctttcagcagagcgcctccacagacaagcctgtggccagccctgccctccagcctcgagctggagttgctccagaggcagccccagcaggcctccctccacatagaggtggctgggccaattgcccaaacacgtgagacacacagggagctttatgtgttcatcttcctgctttagaacttgctcccggtcttggtttttctgaggaaaagcccacagtggttcccctgcccctcccatacctccctatctgccgtctgtctctttgggccctggtctgacagttttcatctgaggcctcctcgggagcaggagacttaagggttcatcccgaccttagttcacagagcctagctgggtgcatcccagccgcagggggtgagaagacacccagagatgggggacaatgctcaggtgggggcctcctccgagactctggttgagaggaaagcacatgattcaagcctaccccacaaaaaaggagcacaaaatgctcagaaatggcccttcctccctgcagtgacgtaggacaagggaaagggccacacccattttcaaaagagtggactgaggtgctctgctcaatttggggtctgctttagtgacccagacactcaagtccagatggagactccaggggggtccttctgcccctctggccagccccacccagcactccccatcaccccatgtaagtgtgtatgccagggctgagctgcctccaggctcacccactgcatctttgccccaaataggtctttgtccagtggtactttgttcatgagcagcacaggccatcttgttggacactgtcactttgggccttgccaggtctcacagaatcacatcgctgtatttattgtataatattgtgaatattggaagttttgagtgagtgctgtctagaaggttttggagtgtggatgctggtccaagaaagaagatgtgccctggcctgctggaaagattgtgaattctagagatagagccgttagcatccatctcctccctgtaactcttaggaaatgcatcaaggaccattatagaaaggatcccctgacctaaggatgaaatcgacctagggttaatcatgacagctgcatcagttgtattggatgcaagtcaactctggagtcctcatcccttgaatggacttgtcagctacctccccaggaggagttcagaagcttctgttggccatcacttgagtagatgacaagctgtaaggtatctgctgctaacgtggctgcttctccgagagcacattgaggtccagacagatccaaaccttggccctaaaaaatgtgtgctgtaaagttacttgatgtatatttattataattatttatggttgcatttaacaaacttttcattcaatctgatgctatttacaccatgctgtgtaaaggaagctcactaaaggaaaaaagtcacaccaataaataaccttcatcta

SEQ ID NO: 340428 - DNA, 5075 bp, Homo sapiens
gttctagaggatcccgcctaagtggaactgctccgccacggacctcttttaccagggcaactcccagacagtgagagagtggctcaacgtggccatcacccggaccctgcaccagggcgaggagagccttttagagctgacgaaacagatctgctctttcctgcagacagcaccagagcagttcccctccgaagagttcccaatttccgaatccaaagtcaacatggacgtgaatttccccggggcagcttttgttgttgtgtcttgtaaagaaagtcaatctggattccgcaaagactcctctctgtacaaggcaccgtgggcacgggtgctcgtatatggcctcggccacaaagtgaagcgaaatggccagctgaacctcatcgaggccgcctgttacccgcgggacgcgtccccagccaacactgggcttgcacctccccccaccgctgaccagtacccctctgtggtcctctccacagacagggtccacatcaaactgggggtgtctccacctcctggagcagtcctggtgttacattccctgcccctggagttcccactggctatggccttcgcagagcagctgctgtcctggaaatcagaggacagtgaagggaagtccgaagatgagcctgacaccattccgacatccgtcctcctgcaggtggtggagctgctaggaaacttcttgtggaccacggacatggcagcctgcgtgaaggagcttgttttccatctcctggcagagctcctgcgcacggtgcacaccctggagcagaggcggcaccccgctggcctgtcctcctcaatcgccctccagctgaacccctgcctggccatgctgatggccttgcagtcggagctccacaagctgtacgacgaggagacgcagaactgggtctcaggcggcgcctgcgggggctccgggggggcggcggccggtgaccagggcaggttctctacgtattttcatgcactcatggaagggtgcctggctgtggccgaagtgaccctgcctactaacatgagtgtcacagccagtggggtgacctcagcgaccgccccaaatctcagtgactcgtcctcctcctcctcgtcctccccaggacagaccccacagagtcccagcctcctctccaagaggaaaaaagtcaagatgaagcgggaaaaggcctcctcgtcgggcaagcgccagtcttcccgcaccgtggactcggaccccaccgtgctcagcatcggaggcagcaagcccgaggacatgctgtggttccaccgcgcactcaccctgctcatcatcctccgccacctcaccaggaaggacccacaggggctgggcgtgacgagtgacgccatcgccgatgcctgccaggccctggtgggccccaccgcccacagccgcttgctggtgatctccgggatccccacccacctggacgagggcgtagtcagaggcgccatccgcaaggcctgcaacgcccacggcggggtcttcaaagacgagatctacatcccgctgcaggaagaagacaccaagaagccaaaagacaaggccgagggcggggacgggaaagttgagcccgagaagacactggccttccccggcacagacagcatggaggtcagcacgtccagcagcctgacccccgccatgagcatcagcgcctccgcctccaccagccaggcctccatctgcagctcgcagggcatctcccaaaccgtcagcgacctctctgtggatccgctgcctgccggcctcgagctgcccatccctccgggcctgttggagccccacgcggtgtccagccaggaaagcctggacatttccctgtgcagcaccggcagcctgggcagcctgggcagcctgggggagcccctggacaatgcagagacggcctcggtgtcggacatgggctccatgtacacagtcacttccctggacaaccagcccctcgccgcccgccccatcaaaggcttcgcagtcgtggagataagatcccgagccaaaattgagaaaattcgagcaagtttatttaacaataatgacttgattggtttgtcaagtttggatggtgaagatgaattgatggaaatgtcaacagaagagattctaaccgtgtctgtagtaaatcagagtctctttgatactcaagggagcccagggttagaagattatttcaatgataagtcaattaaaggggagaagctggtgcccggagccagagaggttctgacggagatatttaagagttgtgcccattcagagcagacgctgagcctgacaccagcgaagcccatcagagtctctgacatttatcttagcaaagagcagatcaactcccagaccccaggcaacctcctccacctcttcttcaccaatgtccggccgccaaaaaaggtgctggaggatcagctcacccagatcctgaggaagtatggcgtgccaaagcccaagtttgacaagagcaagtacagcaaggccgggaaggagcagcaccccgtgaaggtggtgagcaccaagcggcctatcaccaagccgcccgccaaggacaaggctgtgctcaacagcgtcagcaggactgccttaagtgagaagaagccaactgtgaagccaaaatcaccagaaaagagcaaaccagatgaaaaggacccagaaaagtcacctaccaaaaaacaagaagtccctgaggaaaaatacctgacgctggaaggatttcacaaatttgttattgaccgagccaggcaagatatccgtagcgtctggagggcgatcttgtcctgtggttacgatcttcactttgagaggtgcgcatgcatcgatgtccgacatgcacagaaggcctcaagaaagtggaccctggagatggacgtggcacttgtgcagtacatcaaccagctatgccgccacctcgccatcacacccgcacggctccatccccatgaggtgtacctggaccccgcggatgctgctgaccccagagtggcctgtctcctgaacgtgcccatcgagagcctgcgcctgcgcttcgccttgctgcagtccctcaacaccacactggagaccttcttcctgcccctggtggagctgcgccagacacccatgtatacccacagcatcgccgccctgctgaaggaggccaaagggctgatcttctatgacacgaaggtgaccgtgatgaatcgagtgctgaatgccactgtgcagaggacagcggaccacgcggcccctgagatcaccttggacccactggaaattgtgggaggggaaatcagagcttctgaaaactcctacttctgtcaggctgccaggcagctggcctcagtgccgtcgtctcagctctgcgtcaagctggccagtggcggtgaccccacatatgccttcaacatccgcttcactggcgaggaggtccatggcaccagcggctctttccgccacttcctgtggcaggtgtgtaaggagctgcagagttcctcgctgtcgctgctgctgctgtgccccagctcagctgtcaataagaacaagggcaagtatatcctgaccccgagccccatcacctacggggaggagcagctgctgcacttcctggggcagctgctggggattgcaattcgggcagacgtcccgctgcccctggacctcctgccctccttctggaagacgctggtgggcgagcccttggaccctgagcaagacctgcaggaagcggatatcctcacctacaattacgtcaagaagtttgagagcatcaatgatgagaccgagctggaggccctgtgcgctgagatcgcctcccagcacctggccacggagagccctgacagccccaacaagccctgctgcaggttcacctacctgaccatgacgggcgaggaggtggagctgtgcagccggggccggcacatccttgtggcgtgggagaacaaggacatctacgcggcagccatccggagcctgcggctgcgggagctgcagaatgtggagtgcgtgacggccgtgcgggccggcctgggctccatcatccccctgcagctgctgaccatgctcagcccactggagatggagctgcgcacctgcggcctcccctacatcaacctcgagttcctcaaggcccacaccatgtaccaagtggggctgatggagacggaccagcacatcgagttcttctggggggccctggagatgttcacccaggaggagctgtgcaagttcatcaagtttgcctgcaaccaggagcgcatcccgttcacctgcccctgcaaagatgggggtcccgacactgcccatgtgcccccgtaccccatgaagatcgcccccccagatggcacagcaggttccccagactctcgctacatccgcgtggagacctgcatgttcatgatcaagcttccccagtactcctctctggaaatcatgctggagaaacttcgttgtgccattcactaccgtgaagaccccctcagtggctgatgggagggagccccagaattaggctgtcactgaggcacccactctgctggcttgggaagccaccactgcggcccgtccctccagggccctgcgtgaggagttggcaacattttgcttttccaaactttcgtccacattccagggcctcctggaagacttaaccttttgtctttgaaatgcatcaaggaccattatagaaaggatcccctgacctaaggatgaaatcgacctagggttaatcatgacagctgcatcagttgtattggatgcaagtcaactctggagtcctcatcccttgaatggacttgtcagctacctccccaggaggagttcagaagcttctgttggccatcacttgagtagatgacaagctgtaaggtatctgctgctaacgtggctgcttctccgagagcacattgaggtccagacagatccaaaccttggccctaaaaaatgtgtgctgtaaagttacttgatgtatatttattataattatttatggttgcatttaacaaacttttcattcaatctgatgctatttacaccatgctgtgtaaaggaagctcactaaaggaaaaaagtcacaccaataaataaccttcatcta

SEQ ID NO: 340429 - DNA, 2306 bp, Homo sapiens
agcatgatttccagagaggagtactggggaagcttgatccatgaacatgctggagaaacttcgttgtgccattcactaccgtgaagaccccctcagtggctgatgggagggagccccagaattaggctgtcactgaggcacccactctgctggcttgggaagccaccactgcggcccgtccctccagggccctgcgtgaggagttggcaacattttgcttttccaaactttcgtccacattccagggcctcctggaagacttaaccttttgtctttgtacgtttcgtgatgggttggttcttttgctgcctgtttgtggtctatttgtaggatagtttagttcccagacagtttgtgtctaatttgatcttcttggacattgtccctcatggccaccagattctaatgccataaggccccagctggttccccatcacagaaccacccagcaggaagccgggggtacaatgacctcggccacacagagcgctcgtgctttcagcagagcgcctccacagacaagcctgtggccagccctgccctccagcctcgagctggagttgctccagaggcagccccagcaggcctccctccacatagaggtggctgggccaattgcccaaacacgtgagacacacagggagctttatgtgttcatcttcctgctttagaacttgctcccggtcttggtttttctgaggaaaagcccacagtggttcccctgcccctcccatacctccctatctgccgtctgtctctttgggccctggtctgacagttttcatctgaggcctcctcgggagcaggagacttaagggttcatcccgaccttagttcacagagcctagctgggtgcatcccagccgcagggggtgagaagacacccagagatgggggacaatgctcaggtgggggcctcctccgagactctggttgagaggaaagcacatgattcaagcctaccccacaaaaaaggagcacaaaatgctcagaaatggcccttcctccctgcagtgacgtaggacaagggaaagggccacacccattttcaaaagagtggactgaggtgctctgctcaatttggggtctgctttagtgacccagacactcaagtccagatggagactccaggggggtccttctgcccctctggccagccccacccagcactccccatcaccccatgtaagtgtgtatgccagggctgagctgcctccaggctcacccactgcatctttgccccaaataggtctttgtccagtggtactttgttcatgagcagcacaggccatcttgttggacactgtcactttgggccttgccaggtctcacagaatcacatcgctgtatttattgtataatattgtgaatattggaagttttgagtgagtgctgtctagaaggttttggagtgtggatgctggtccaagaaagaagatgtgccctggcctgctggaaagattgtgaattctagagatagagccgttagcatccatctcctccctgtaactcttaggaaatgcatcaaggaccattatagaaaggatcccctgacctaaggatgaaatcgacctagggttaatcatgacagctgcatcagttgtattggatgcaagtcaactctggaggtgagtgcccgcaagcagttcccctgctttgaaagaagatggtcagcccgctgcctccccagcggccacagctcctttgagtgtggggggtcacagccaggatgtattcctgacaataaggatccttttattttcatttctgcataatgaaagagcctttcgatttattagaagtggtttttcctccctacatctttaaattcttggttctctttagtcctcatcccttgaatggacttgtcagctacctccccaggaggagttcagaagcttctgttggccatcacttgagtagatgacaagctgtaaggtatctgctgctaacgtggctgcttctccgagagcacattgaggtccagacagatccaaaccttggccctaaaaaatgtgtgctgtaaagttacttgatgtatatttattataattatttatggttgcatttaacaaacttttcattcaatctgatgctatttacaccatgctgtgtaaaggaagctcactaaaggaaaaaagtcacaccaataaataaccttcatctaattttgatttaccttaagagttgtgtgatcatctactcttgctgagcaagttcaaaggctggcatgcttggatggctctgatatttaagtgctgccaagtggctaggaattaaagtgtttctaattattatggtctctt

SEQ ID NO: 340430 - DNA, 4590 bp, Homo sapiens
gttctagaggatcccgcctaagtggaactgctccgccacggacctcttttaccagggcaactcccagacagtgagagagtggctcaacgtggccatcacccggaccctgcaccagggcgaggagagccttttagagctgacgaaacagatctgctctttcctgcagacagcaccagagcagttcccctccgaagagttcccaatttccgaatccaaagtcaacatggacgtgaatttccccggggcagcttttgttgttgtgtcttgtaaagaaagtcaatctggattccgcaaagactcctctctgtacaaggcaccgtgggcacgggtgctcgtatatggcctcggccacaaagtgaagcgaaatggccagctgaacctcatcgaggccgcctgttacccgcgggacgcgtccccagccaacactgggcttgcacctccccccaccgctgaccagtacccctctgtggtcctctccacagacagggtccacatcaaactgggggtgtctccacctcctggagcagtcctggtgttacattccctgcccctggagttcccactggctatggccttcgcagagcagctgctgtcctggaaatcagaggacagtgaagggaagtccgaagatgagcctgacaccattccgacatccgtcctcctgcaggtggtggagctgctaggaaacttcttgtggaccacggacatggcagcctgcgtgaaggagcttgttttccatctcctggcagagctcctgcgcacggtgcacaccctggagcagaggcggcaccccgctggcctgtcctcctcaatcgccctccagctgaacccctgcctggccatgctgatggccttgcagtcggagctccacaagctgtacgacgaggagacgcagaactgggtctcaggcggcgcctgcgggggctccgggggggcggcggccggtgaccagggcaggttctctacgtattttcatgcactcatggaagggtgcctggctgtggccgaagtgaccctgcctactaacatgagtgtcacagccagtggggtgacctcagcgaccgccccaaatctcagtgactcgtcctcctcctcctcgtcctccccaggacagaccccacagagtcccagcctcctctccaagaggaaaaaagtcaagatgaagcgggaaaaggcctcctcgtcgggcaagcgccagtcttcccgcaccgtggactcggaccccaccgtgctcagcatcggaggcagcaagcccgaggacatgctgtggttccaccgcgcactcaccctgctcatcatcctccgccacctcaccaggaaggacccacaggggctgggcgtgacgagtgacgccatcgccgatgcctgccaggccctggtgggccccaccgcccacagccgcttgctggtgatctccgggatccccacccacctggacgagggcgtagtcagaggcgccatccgcaaggcctgcaacgcccacggcggggtcttcaaagacgagatctacatcccgctgcaggaagaagacaccaagaagccaaaagacaaggccgagggcggggacgggaaagttgagcccgagaagacactggccttccccggcacagacagcatggaggtcagcacgtccagcagcctgacccccgccatgagcatcagcgcctccgcctccaccagccaggcctccatctgcagctcgcagggcatctcccaaaccgtcagcgacctctctgtggatccgctgcctgccggcctcgagctgcccatccctccgggcctgttggagccccacgcggtgtccagccaggaaagcctggacatttccctgtgcagcaccggcagcctgggcagcctgggcagcctgggggagcccctggacaatgcagagacggcctcggtgtcggacatgggctccatgtacacagtcacttccctggacaaccagcccctcgccgcccgccccatcaaaggcttcgcagtcgtggagataagatcccgagccaaaattgagaaaattcgagcaagtttatttaacaataatgacttgattggtttgtcaagtttggatggtgaagatgaattgatggaaatgtcaacagaagagattctaaccgtgtctgtagtaaatcagagtctctttgatactcaagggagcccagggttagaagattatttcaatgataagtcaattaaaggggagaagctggtgcccggagccagagaggttctgacggagatatttaagagttgtgcccattcagagcagacgctgagcctgacaccagcgaagcccatcagagtctctgacatttatcttagcaaagagcagatcaactcccagaccccaggcaacctcctccacctcttcttcaccaatgtccggccgccaaaaaaggtgctggaggatcagctcacccagatcctgaggaagtatggcgtgccaaagcccaagtttgacaagagcaagtacagcaaggccgggaaggagcagcaccccgtgaaggtggtgagcaccaagcggcctatcaccaagccgcccgccaaggacaaggctgtgctcaacagcgtcagcaggactgccttaagtgagaagaagccaactgtgaagccaaaatcaccagaaaagagcaaaccagatgaaaaggacccagaaaagtcacctaccaaaaaacaagaagtccctgaggaaaaatacctgacgctggaaggatttcacaaatttgttattgaccgagccaggcaagatatccgtagcgtctggagggcgatcttgtcctgtggttacgatcttcactttgagaggtgcgcatgcatcgatgtccgacatgcacagaaggcctcaagaaagtggaccctggagatggacgtggcacttgtgcagtacatcaaccagctatgccgccacctcgccatcacacccgcacggctccatccccatgaggtgtacctggaccccgcggatgctgctgaccccagagtggcctgtctcctgaacgtgcccatcgagagcctgcgcctgcgcttcgccttgctgcagtccctcaacaccacactggagaccttcttcctgcccctggtggagctgcgccagacacccatgtatacccacagcatcgccgccctgctgaaggaggccaaagggctgatcttctatgacacgaaggtgaccgtgatgaatcgagtgctgaatgccactgtgcagaggacagcggaccacgcggcccctgagatcaccttggacccactggaaattgtgggaggggaaatcagagcttctgaaaactcctacttctgtcaggctgccaggcagctggcctcagtgccgtcgtctcagctctgcgtcaagctggccagtggcggtgaccccacatatgccttcaacatccgcttcactggcgaggaggtccatggcaccagcggctctttccgccacttcctgtggcaggtgtgtaaggagctgcagagttcctcgctgtcgctgctgctgctgtgccccagctcagctgtcaataagaacaagggcaagtatatcctgaccccgagccccatcacctacggggaggagcagctgctgcacttcctggggcagctgctggggattgcaattcgggcagacgtcccgctgcccctggacctcctgccctccttctggaagacgctggtgggcgagcccttggaccctgagcaagacctgcaggaagcggatatcctcacctacaattacgtcaagaagtttgagagcatcaatgatgagaccgagctggaggccctgtgcgctgagatcgcctcccagcacctggccacggagagccctgacagccccaacaagccctgctgcaggttcacctacctgaccatgacgggcgaggaggtggagctgtgcagccggggccggcacatccttgtggcgtgggagaacaaggacatctacgcggcagccatccggagcctgcggctgcgggagctgcagaatgtggagtgcgtgacggccgtgcgggccggcctgggctccatcatccccctgcagctgctgaccatgctcagcccactggagatggagctgcgcacctgcggcctcccctacatcaacctcgagttcctcaaggcccacaccatgtaccaagtggggctgatggagacggaccagcacatcgagttcttctggggggccctggagatgttcacccaggaggagctgtgcaagttcatcaagtttgcctgcaaccaggagcgcatcccgttcacctgcccctgcaaagatgggggtcccgacactgcccatgtgcccccgtaccccatgaagatcgcccccccagatggcacagcaggtaccgccctcccctggccatgtcccaagtagggacacactagcctttctctgtttggaactggggctgccaggccccatgtgaagggagaacaatgaacaggagccccacgtgccaaaactcagacatcattgaggattagggcccggcaggaaccagccatacaggcctgctgttagatactttctcatatcttaaaagaagctgaaaatccagaatgcttcaaatcttctaacttttaaatgcagaaaaatggtta

SEQ ID NO: 340431 - DNA, 3534 bp, Homo sapiens
gttctagaggatcccgcctaagtggaactgctccgccacggacctcttttaccagggcaactcccagacagtgagagagtggctcaacgtggccatcacccggaccctgcaccagggcgaggagagccttttagagctgacgaaacagatctgctctttcctgcagacagcaccagagcagttcccctccgaagagttcccaatttccgaatccaaagtcaacatggacgtgaatttccccggggcagcttttgttgttgtgtcttgtaaagaaagtcaatctggattccgcaaagactcctctctgtacaaggcaccgtgggcacgggtgctcgtatatggcctcggccacaaagtgaagcgaaatggccagctgaacctcatcgaggccgcctgttacccgcgggacgcgtccccagccaacactgggcttgcacctccccccaccgctgaccagtacccctctgtggtcctctccacagacagggtccacatcaaactgggggtgtctccacctcctggagcagtcctggtgttacattccctgcccctggagttcccactggctatggccttcgcagagcagctgctgtcctggaaatcagaggacagtgaagggaagtccgaagatgagcctgacaccattccgacatccgtcctcctgcaggtggtggagctgctaggaaacttcttgtggaccacggacatggcagcctgcgtgaaggagcttgttttccatctcctggcagagctcctgcgcacggtgcacaccctggagcagaggcggcaccccgctggcctgtcctcctcaatcgccctccagctgaacccctgcctggccatgctgatggccttgcagtcggagctccacaagctgtacgacgaggagacgcagaactgggtctcaggcggcgcctgcgggggctccgggggggcggcggccggtgaccagggcaggttctctacgtattttcatgcactcatggaagggtgcctggctgtggccgaagtgaccctgcctactaacatgagtgtcacagccagtggggtgacctcagcgaccgccccaaatctcagtgactcgtcctcctcctcctcgtcctccccaggacagaccccacagagtcccagcctcctctccaagaggaaaaaagtcaagatgaagcgggaaaaggcctcctcgtcgggcaagcgccagtcttcccgcaccgtggactcggaccccaccgtgctcagcatcggaggcagcaagcccgaggacatgctgtggttccaccgcgcactcaccctgctcatcatcctccgccacctcaccaggaaggacccacaggggctgggcgtgacgagtgacgccatcgccgatgcctgccaggccctggtgggccccaccgcccacagccgcttgctggtgatctccgggatccccacccacctggacgagggcgtagtcagaggcgccatccgcaaggcctgcaacgcccacggcggggtcttcaaagacgagatctacatcccgctgcaggaagaagacaccaagaagccaaaagacaaggccgagggcggggacgggaaagttgagcccgagaagacactggccttccccggcacagacagcatggaggtcagcacgtccagcagcctgacccccgccatgagcatcagcgcctccgcctccaccagccaggcctccatctgcagctcgcagggcatctcccaaaccgtcagcgacctctctgtggatccgctgcctgccggcctcgagctgcccatccctccgggcctgttggagccccacgcggtgtccagccaggaaagcctggacatttccctgtgcagcaccggcagcctgggcagcctgggcagcctgggggagcccctggacaatgcagagacggcctcggtgtcggacatgggctccatgtacacagtcacttccctggacaaccagcccctcgccgcccgccccatcaaaggcttcgcagtcgtggagataagatcccgagccaaaattgagaaaattcgagcaagtttatttaacaataatgacttgattggtttgtcaagtttggatggtgaagatgaattgatggaaatgtcaacagaagagattctaaccgtgtctgtagtaaatcagagtctctttgatactcaagggagcccagggttagaagattatttcaatgataagtcaattaaaggggagaagctggtgcccggagccagagaggttctgacggagatatttaagagttgtgcccattcagagcagacgctgagcctgacaccagcgaagcccatcagagtctctgacatttatcttagcaaagagcagatcaactcccagaccccaggcaacctcctccacctcttcttcaccaatgtccggccgccaaaaaaggtgctggaggatcagctcacccagatcctgaggaagtatggcgtgccaaagcccaagtttgacaagagcaagtacagcaaggccgggaaggagcagcaccccgtgaaggtggtgagcaccaagcggcctatcaccaagccgcccgccaaggacaaggctgtgctcaacagcgtcagcaggactgccttaagtgagaagaagccaactgtgaagccaaaatcaccagaaaagagcaaaccagatgaaaaggacccagaaaagtcacctaccaaaaaacaagaagtccctgaggaaaaatacctgacgctggaaggatttcacaaatttgttattgaccgagccaggcaagatatccgtagcgtctggagggcgatcttgtcctgtggttacgatcttcactttgagaggtgcgcatgcatcgatgtccgacatgcacagaaggcctcaagaaagtggaccctggagatggacgtggcacttgtgcagtacatcaaccagctatgccgccacctcgccatcacacccgcacggctccatccccatgaggtgtacctggaccccgcggatgctgctgaccccagagtggcctgtctcctgaacgtgcccatcgagagcctgcgcctgcgcttcgccttgctgcagtccctcaacaccacactggagaccttcttcctgcccctggtggagctgcgccagacacccatgtatacccacagcatcgccgccctgctgaaggaggccaaaggtcagtgcctgcacctgccctggccctgcaggaagagagaggtgacctgcaagacaccagggccagaatccacgggcagcgtccttgggcagccccgccaggaagatgccaccccacctcaacctttcatgtagcaggcagggctcctctggagcaacaggcccacccaagggaagttactttaattataaaagtaacatgctctgaaaaataaaattatttttaaggttttcaaattaattagaaatcatatatgaaggtctgtttactatctggcctccacatccctacatcccagaagtgacattgttaacagatgagtctctctccttccagacttttctcttgacatataaacagacacatgtgtgcacacacacagctttttgtc

SEQ ID NO: 340432 - DNA, 2849 bp, Homo sapiens
gttctagaggatcccgcctaagtggaactgctccgccacggacctcttttaccagggcaactcccagacagtgagagagtggctcaacgtggccatcacccggaccctgcaccagggcgaggagagccttttagagctgacgaaacagatctgctctttcctgcagacagcaccagagcagttcccctccgaagagttcccaatttccgaatccaaagtcaacatggacgtgaatttccccggggcagcttttgttgttgtgtcttgtaaagaaagtcaatctggattccgcaaagactcctctctgtacaaggcaccgtgggcacgggtgctcgtatatggcctcggccacaaagtgaagcgaaatggccagctgaacctcatcgaggccgcctgttacccgcgggacgcgtccccagccaacactgggcttgcacctccccccaccgctgaccagtacccctctgtggtcctctccacagacagggtccacatcaaactgggggtgtctccacctcctggagcagtcctggtgttacattccctgcccctggagttcccactggctatggccttcgcagagcagctgctgtcctggaaatcagaggacagtgaagggaagtccgaagatgagcctgacaccattccgacatccgtcctcctgcaggtggtggagctgctaggaaacttcttgtggaccacggacatggcagcctgcgtgaaggagcttgttttccatctcctggcagagctcctgcgcacggtgcacaccctggagcagaggcggcaccccgctggcctgtcctcctcaatcgccctccagctgaacccctgcctggccatgctgatggccttgcagtcggagctccacaagctgtacgacgaggagacgcagaactgggtctcaggcggcgcctgcgggggctccgggggggcggcggccggtgaccagggcaggttctctacgtattttcatgcactcatggaagggtgcctggctgtggccgaagtgaccctgcctactaacatgagtgtcacagccagtggggtgacctcagcgaccgccccaaatctcagtgactcgtcctcctcctcctcgtcctccccaggacagaccccacagagtcccagcctcctctccaagaggaaaaaagtcaagatgaagcgggaaaaggcctcctcgtcgggcaagcgccagtcttcccgcaccgtggactcggaccccaccgtgctcagcatcggaggcagcaagcccgaggacatgctgtggttccaccgcgcactcaccctgctcatcatcctccgccacctcaccaggaaggacccacaggggctgggcgtgacgagtgacgccatcgccgatgcctgccaggccctggtgggccccaccgcccacagccgcttgctggtgatctccgggatccccacccacctggacgagggcgtagtcagaggcgccatccgcaaggcctgcaacgcccacggcggggtcttcaaagacgagatctacatcccgctgcaggaagaagacaccaagaagccaaaagacaaggccgagggcggggacgggaaagttgagcccgagaagacactggccttccccggcacagacagcatggaggtcagcacgtccagcagcctgacccccgccatgagcatcagcgcctccgcctccaccagccaggcctccatctgcagctcgcagggcatctcccaaaccgtcagcgacctctctgtggatccgctgcctgccggcctcgagctgcccatccctccgggcctgttggagccccacgcggtgtccagccaggaaagcctggacatttccctgtgcagcaccggcagcctgggcagcctgggcagcctgggggagcccctggacaatgcagagacggcctcggtgtcggacatgggctccatgtacacagtcacttccctggacaaccagcccctcgccgcccgccccatcaaaggcttcgcagtcgtggagataagatcccgagccaaaattgagaaaattcgagcaagtttatttaacaataatgacttgattggtttgtcaagtttggatggtgaagatgaattgatggaaatgtcaacagaagagattctaaccgtgtctgtagtaaatcagagtctctttgatactcaagggagcccagggttagaagattatttcaatgataagtcaattaaaggggagaagctggtgcccggagccagagaggttctgacggagatatttaagagttgtgcccattcagagcagacgctgagcctgacaccagcgaagcccatcagagtctctgacatttatcttagcaaagagcagatcaactcccagaccccaggcaacctcctccacctcttcttcaccaatgtccggccgccaaaaaaggtgctggaggatcagctcacccagatcctgaggaagtatggcgtgccaaagcccaagtttgacaagagcaagtacagcaaggccgggaaggagcagcaccccgtgaaggtggtgagcaccaagcggcctatcaccaagccgcccgccaaggacaaggctgtgctcaacagcgtcagcaggactgccttaagtgagaagaagccaactgtgaagccaaaatcaccagaaaagagcaaaccagatgaaaaggacccagaaaagtcacctaccaaaaaacaagaagtccctgaggaaaaatacctgacgctggaaggatttcacaaatttgttattgaccgagccaggcaagatatccgtagcgtctggagggcgatcttgtcctgtggttacgatcttcactttgagaggtaagagggttacccctcgactcagttggcaccttgcatagaaa

SEQ ID NO: 340433 - DNA, 2490 bp, Homo sapiens
gttctagaggatcccgcctaagtggaactgctccgccacggacctcttttaccagggcaactcccagacagtgagagagtggctcaacgtggccatcacccggaccctgcaccagggcgaggagagccttttagagctgacgaaacagatctgctctttcctgcagacagcaccagagcagttcccctccgaagagttcccaatttccgaatccaaagtcaacatggacgtgaatttccccggggcagcttttgttgttgtgtcttgtaaagaaagtcaatctggattccgcaaagactcctctctgtacaaggcaccgtgggcacgggtgctcgtatatggcctcggccacaaagtgaagcgaaatggccagctgaacctcatcgaggccgcctgttacccgcgggacgcgtccccagccaacactgggcttgcacctccccccaccgctgaccagtacccctctgtggtcctctccacagacagggtccacatcaaactgggggtgtctccacctcctggagcagtcctggtgttacattccctgcccctggagttcccactggctatggccttcgcagagcagctgctgtcctggaaatcagaggacagtgaagggaagtccgaagatgagcctgacaccattccgacatccgtcctcctgcaggtggtggagctgctaggaaacttcttgtggaccacggacatggcagcctgcgtgaaggagcttgttttccatctcctggcagagctcctgcgcacggtgcacaccctggagcagaggcggcaccccgctggcctgtcctcctcaatcgccctccagctgaacccctgcctggccatgctgatggccttgcagtcggagctccacaagctgtacgacgaggagacgcagaactgggtctcaggcggcgcctgcgggggctccgggggggcggcggccggtgaccagggcaggttctctacgtattttcatgcactcatggaagggtgcctggctgtggccgaagtgaccctgcctactaacatgagtgtcacagccagtggggtgacctcagcgaccgccccaaatctcagtgactcgtcctcctcctcctcgtcctccccaggacagaccccacagagtcccagcctcctctccaagaggaaaaaagtcaagatgaagcgggaaaaggcctcctcgtcgggcaagcgccagtcttcccgcaccgtggactcggaccccaccgtgctcagcatcggaggcagcaagcccgaggacatgctgtggttccaccgcgcactcaccctgctcatcatcctccgccacctcaccaggaaggacccacaggggctgggcgtgacgagtgacgccatcgccgatgcctgccaggccctggtgggccccaccgcccacagccgcttgctggtgatctccgggatccccacccacctggacgagggcgtagtcagaggcgccatccgcaaggcctgcaacgcccacggcggggtcttcaaagacgagatctacatcccgctgcaggaagaagacaccaagaagccaaaagacaaggccgagggcggggacgggaaagttgagcccgagaagacactggccttccccggcacagacagcatggaggtcagcacgtccagcagcctgacccccgccatgagcatcagcgcctccgcctccaccagccaggcctccatctgcagctcgcagggcatctcccaaaccgtcagcgacctctctgtggatccgctgcctgccggcctcgagctgcccatccctccgggcctgttggagccccacgcggtgtccagccaggaaagcctggacatttccctgtgcagcaccggcagcctgggcagcctgggcagcctgggggagcccctggacaatgcagagacggcctcggtgtcggacatgggctccatgtacacagtcacttccctggacaaccagcccctcgccgcccgccccatcaaaggcttcgcagtcgtggagataagatcccgagccaaaattgagaaaattcgagcaagtttatttaacaataatgacttgattggtttgtcaagtttggatggtgaagatgaattgatggaaatgtcaacagaagagattctaaccgtgtctgtagtaaatcagagtctctttgatactcaagggagcccagggttagaagattatttcaatgataagtcaattaaaggggagaagctggtgcccggagccagagaggttctgacggagatatttaagagttgtgcccattcagagcagacgctgagcctgacaccagcgaagcccatcagagtctctgacatttatcttagcaaagagcagatcaactcccagaccccaggcaacctcctccacctcttcttcaccaatgtccggccgccaaaaaaggtgctggaggatcagctcacccagatcctgaggaagtatggcgtgccaaagcccaagtttgaaccggcgtgcgcgtgaggtaccgagctcga

SEQ ID NO: 340434 - DNA, 6671 bp, Homo sapiens
gttctagaggatcccgcctaagtggaactgctccgccacggacctcttttaccagggcaactcccagacagtgagagagtggctcaacgtggccatcacccggaccctgcaccagggcgaggagagccttttagagctgacgaaacagatctgctctttcctgcagacagcaccagagcagttcccctccgaagagttcccaatttccgaatccaaagtcaacatggacgtgaatttccccggggcagcttttgttgttgtgtcttgtaaagaaagtcaatctggattccgcaaagactcctctctgtacaaggcaccgtgggcacgggtgctcgtatatggcctcggccacaaagtgaagcgaaatggccagctgaacctcatcgaggccgcctgttacccgcgggacgcgtccccagccaacactgggcttgcacctccccccaccgctgaccagtacccctctgtggtcctctccacagacagggtccacatcaaactgggggtgtctccacctcctggagcagtcctggtgttacattccctgcccctggagttcccactggctatggccttcgcagagcagctgctgtcctggaaatcagaggacagtgaagggaagtccgaagatgagcctgacaccattccgacatccgtcctcctgcaggtggtggagctgctaggaaacttcttgtggaccacggacatggcagcctgcgtgaaggagcttgttttccatctcctggcagagctcctgcgcacggtgcacaccctggagcagaggcggcaccccgctggcctgtcctcctcaatcgccctccagctgaacccctgcctggccatgctgatggccttgcagtcggagctccacaagctgtacgacgaggagacgcagaactgggtctcaggcggcgcctgcgggggctccgggggggcggcggccggtgaccagggcaggttctctacgtattttcatgcactcatggaagggtgcctggctgtggccgaagtgaccctgcctactaacatgagtgtcacagccagtggggtgacctcagcgaccgccccaaatctcagtgactcgtcctcctcctcctcgtcctccccaggacagaccccacagagtcccagcctcctctccaagaggaaaaaagtcaagatgaagcgggaaaaggcctcctcgtcgggcaagcgccagtcttcccgcaccgtggactcggaccccaccgtgctcagcatcggaggcagcaagcccgaggacatgctgtggttccaccgcgcactcaccctgctcatcatcctccgccacctcaccaggaaggacccacaggggctgggcgtgacgagtgacgccatcgccgatgcctgccaggccctggtgggccccaccgcccacagccgcttgctggtgatctccgggatccccacccacctggacgagggcgtagtcagaggcgccatccgcaaggcctgcaacgcccacggcggggtcttcaaagacgagatctacatcccgctgcaggaagaagacaccaagaagccaaaagacaaggccgagggcggggacgggaaagttgagcccgagaagacactggccttccccggcacagacagcatggaggtcagcacgtccagcagcctgacccccgccatgagcatcagcgcctccgcctccaccagccaggcctccatctgcagctcgcagggcatctcccaaaccgtcagcgacctctctgtggatccgctgcctgccggcctcgagctgcccatccctccgggcctgttggagccccacgcggtgtccagccaggaaagcctggacatttccctgtgcagcaccggcagcctgggcagcctgggcagcctgggggagcccctggacaatgcagagacggcctcggtgtcggacatgggctccatgtacacagtcacttccctggacaaccagcccctcgccgcccgccccatcaaaggcttcgcagtcgtggagataagatcccgagccaaaattgagaaaattcgagcaagtttatttaacaataatgacttgattggtttgtcaagtttggatggtgaagatgaattgatggaaatgtcaacagaagagattctaaccgtgtctgtagtaaatcagagtctctttgatactcaagggagcccagggttagaagattatttcaatgataagtcaattaaaggggagaagctggtgcccggagccagagaggttctgacggagatatttaagagttgtgcccattcagagcagacgctgagcctgacaccagcgaagcccatcagagtctctgacatttatcttagcaaagagcagatcaactcccagaccccaggcaacctcctccacctcttcttcaccaatgtccggccgccaaaaaaggtgctggaggatcagctcacccagatcctgaggaagtatggcgtgccaaagcccaagtttgacaagagcaagtacagcaaggccgggaaggagcagcaccccgtgaaggtggtgagcaccaagcggcctatcaccaagccgcccgccaaggacaaggctgtgctcaacagcgtcagcaggactgccttaagtgagaagaagccaactgtgaagccaaaatcaccagaaaagagcaaaccagatgaaaaggacccagaaaagtcacctaccaaaaaacaagaagtccctgaggaaaaatacctgacgctggaaggatttcacaaatttgttattgaccgagccaggcaagatatccgtagcgtctggagggcgatcttgtcctgtggttacgatcttcactttgagaggtgcgcatgcatcgatgtccgacatgcacagaaggcctcaagaaagtggaccctggagatggacgtggcacttgtgcagtacatcaaccagctatgccgccacctcgccatcacacccgcacggctccatccccatgaggtgtacctggaccccgcggatgctgctgaccccagagtggcctgtctcctgaacgtgcccatcgagagcctgcgcctgcgcttcgccttgctgcagtccctcaacaccacactggagaccttcttcctgcccctggtggagctgcgccagacacccatgtatacccacagcatcgccgccctgctgaaggaggccaaagggctgatcttctatgacacgaaggtgaccgtgatgaatcgagtgctgaatgccactgtgcagaggacagcggaccacgcggcccctgagatcaccttggacccactggaaattgtgggaggggaaatcagagcttctgaaaactcctacttctgtcaggctgccaggcagctggcctcagtgccgtcgtctcagctctgcgtcaagctggccagtggcggtgaccccacatatgccttcaacatccgcttcactggcgaggaggtccatggcaccagcggctctttccgccacttcctgtggcaggtgtgtaaggagctgcagagttcctcgctgtcgctgctgctgctgtgccccagctcagctgtcaataagaacaagggcaagtatatcctgaccccgagccccatcacctacggggaggagcagctgctgcacttcctggggcagctgctggggattgcaattcgggcagacgtcccgctgcccctggacctcctgccctccttctggaagacgctggtgggcgagcccttggaccctgagcaagacctgcaggaagcggatatcctcacctacaattacgtcaagaagtttgagagcatcaatgatgagaccgagctggaggccctgtgcgctgagatcgcctcccagcacctggccacggagagccctgacagccccaacaagccctgctgcaggttcacctacctgaccatgacgggcgaggaggtggagctgtgcagccggggccggcacatccttgtggcgtgggagaacaaggacatctacgcggcagccatccggagcctgcggctgcgggagctgcagaatgtggagtgcgtgacggccgtgcgggccggcctgggctccatcatccccctgcagctgctgaccatgctcagcccactggagatggagctgcgcacctgcggcctcccctacatcaacctcgagttcctcaaggcccacaccatgtaccaagtggggctgatggagacggaccagcacatcgagttcttctggggggccctggagatgttcacccaggaggagctgtgcaagttcatcaagtttgcctgcaaccaggagcgcatcccgttcacctgcccctgcaaagatgggggtcccgacactgcccatgtgcccccgtaccccatgaagatcgcccccccagatggcacagcaggttccccagactctcgctacatccgcgtggagacctgcatgttcatgatcaagcttccccagtactcctctctggaaatcatgctggagaaacttcgttgtgccattcactaccgtgaagaccccctcagtggctgatgggagggagccccagaattaggctgtcactgaggcacccactctgctggcttgggaagccaccactgcggcccgtccctccagggccctgcgtgaggagttggcaacattttgcttttccaaactttcgtccacattccagggcctcctggaagacttaaccttttgtctttgtacgtttcgtgatgggttggttcttttgctgcctgtttgtggtctatttgtaggatagtttagttcccagacagtttgtgtctaatttgatcttcttggacattgtccctcatggccaccagattctaatgccataaggccccagctggttccccatcacagaaccacccagcaggaagccgggggtacaatgacctcggccacacagagcgctcgtgctttcagcagagcgcctccacagacaagcctgtggccagccctgccctccagcctcgagctggagttgctccagaggcagccccagcaggcctccctccacatagaggtggctgggccaattgcccaaacacgtgagacacacagggagctttatgtgttcatcttcctgctttagaacttgctcccggtcttggtttttctgaggaaaagcccacagtggttcccctgcccctcccatacctccctatctgccgtctgtctctttgggccctggtctgacagttttcatctgaggcctcctcgggagcaggagacttaagggttcatcccgaccttagttcacagagcctagctgggtgcatcccagccgcagggggtgagaagacacccagagatgggggacaatgctcaggtgggggcctcctccgagactctggttgagaggaaagcacatgattcaagcctaccccacaaaaaaggagcacaaaatgctcagaaatggcccttcctccctgcagtgacgtaggacaagggaaagggccacacccattttcaaaagagtggactgaggtgctctgctcaatttggggtctgctttagtgacccagacactcaagtccagatggagactccaggggggtccttctgcccctctggccagccccacccagcactccccatcaccccatgtaagtgtgtatgccagggctgagctgcctccaggctcacccactgcatctttgccccaaataggtctttgtccagtggtactttgttcatgagcagcacaggccatcttgttggacactgtcactttgggccttgccaggtctcacagaatcacatcgctgtatttattgtataatattgtgaatattggaagttttgagtgagtgctgtctagaaggttttggagtgtggatgctggtccaagaaagaagatgtgccctggcctgctggaaagattgtgaattctagagatagagccgttagcatccatctcctccctgtaactcttaggaaatgcatcaaggaccattatagaaaggatcccctgacctaaggatgaaatcgacctagggttaatcatgacagctgcatcagttgtattggatgcaagtcaactctggaggtgagtgcccgcaagcagttcccctgctttgaaagaagatggtcagcccgctgcctccccagcggccacagctcctttgagtgtggggggtcacagccaggatgtattcctgacaataaggatccttttattttcatttctgcataatgaaagagcctttcgatttattagaagtggtttttcctccctacatctttaaattcttggttctctttagtcctcatcccttgaatggacttgtcagctacctccccaggaggagttcagaagcttctgttggccatcacttgagtagatgacaagctgtaaggtatctgctgctaacgtggctgcttctccgagagcacattgaggtccagacagatccaaaccttggccctaaaaaatgtgtgctgtaaagttacttgatgtatatttattataattatttatggttgcatttaacaaacttttcattcaatctgatgctatttacaccatgctgtgtaaaggaagctcactaaaggaaaaaagtcacaccaataaataaccttcatctaattttgatttaccttaagagttgtgtgatcatctactcttgctgagcaagttcaaaggctggcatgcttggatggctctgatatttaagtgctgccaagtggctaggaattaaagtgtttctaattattatggtctctt

SEQ ID NO: 340435 - DNA, 6532 bp, Homo sapiens
gttctagaggatcccgcctaagtggaactgctccgccacggacctcttttaccagggcaactcccagacagtgagagagtggctcaacgtggccatcacccggaccctgcaccagggcgaggagagccttttagagctgacgaaacagatctgctctttcctgcagacagcaccagagcagttcccctccgaagagttcccaatttccgaatccaaagtcaacatggacgtgaatttccccggggcagcttttgttgttgtgtcttgtaaagaaagtcaatctggattccgcaaagactcctctctgtacaaggcaccgtgggcacgggtgctcgtatatggcctcggccacaaagtgaagcgaaatggccagctgaacctcatcgaggccgcctgttacccgcgggacgcgtccccagccaacactgggcttgcacctccccccaccgctgaccagtacccctctgtggtcctctccacagacagggtccacatcaaactgggggtgtctccacctcctggagcagtcctggtgttacattccctgcccctggagttcccactggctatggccttcgcagagcagctgctgtcctggaaatcagaggacagtgaagggaagtccgaagatgagcctgacaccattccgacatccgtcctcctgcaggtggtggagctgctaggaaacttcttgtggaccacggacatggcagcctgcgtgaaggagcttgttttccatctcctggcagagctcctgcgcacggtgcacaccctggagcagaggcggcaccccgctggcctgtcctcctcaatcgccctccagctgaacccctgcctggccatgctgatggccttgcagtcggagctccacaagctgtacgacgaggagacgcagaactgggtctcaggcggcgcctgcgggggctccgggggggcggcggccggtgaccagggcaggttctctacgtattttcatgcactcatggaagggtgcctggctgtggccgaagtgaccctgcctactaacatgagtgtcacagccagtggggtgacctcagcgaccgccccaaatctcagtgactcgtcctcctcctcctcgtcctccccaggacagaccccacagagtcccagcctcctctccaagaggaaaaaagtcaagatgaagcgggaaaaggcctcctcgtcgggcaagcgccagtcttcccgcaccgtggactcggaccccaccgtgctcagcatcggaggcagcaagcccgaggacatgctgtggttccaccgcgcactcaccctgctcatcatcctccgccacctcaccaggaaggacccacaggggctgggcgtgacgagtgacgccatcgccgatgcctgccaggccctggtgggccccaccgcccacagccgcttgctggtgatctccgggatccccacccacctggacgagggcgtagtcagaggcgccatccgcaaggcctgcaacgcccacggcggggtcttcaaagacgagatctacatcccgctgcaggaagaagacaccaagaagccaaaagacaaggccgagggcggggacgggaaagttgagcccgagaagacactggccttccccggcacagacagcatggaggtcagcacgtccagcagcctgacccccgccatgagcatcagcgcctccgcctccaccagccaggcctccatctgcagctcgcagggcatctcccaaaccgtcagcgacctctctgtggatccgctgcctgccggcctcgagctgcccatccctccgggcctgttggagccccacgcggtgtccagccaggaaagcctggacatttccctgtgcagcaccggcagcctgggcagcctgggcagcctgggggagcccctggacaatgcagagacggcctcggtgtcggacatgggctccatgtacacagtcacttccctggacaaccagcccctcgccgcccgccccatcaaaggcttcgcagtcgtggagataagatcccgagccaaaattgagaaaattcgagcaagtttatttaacaataatgacttgattggtttgtcaagtttggatggtgaagatgaattgatggaaatgtcaacagaagagattctaaccgtgtctgtagtaaatcagagtctctttgatactcaagggagcccagggttagaagattatttcaatgataagtcaattaaaggggagaagctggtgcccggagccagagaggttctgacggagatatttaagagttgtgcccattcagagcagacgctgagcctgacaccagcgaagcccatcagagtctctgacatttatcttagcaaagagcagatcaactcccagaccccaggcaacctcctccacctcttcttcaccaatgtccggccgccaaaaaaggtgctggaggatcagctcacccagatcctgaggaagtatggcgtgccaaagcccaagtttgacaagagcaagtacagcaaggccgggaaggagcagcaccccgtgaaggtggtgagcaccaagcggcctatcaccaagccgcccgccaaggacaaggctgtgctcaacagcgtcagcaggactgccttaagtgagaagaagccaactgtgaagccaaaatcaccagaaaagagcaaaccagatgaaaaggacccagaaaagtcacctaccaaaaaacaagaagtccctgaggaaaaatacctgacgctggaaggatttcacaaatttgttattgaccgagccaggcaagatatccgtagcgtctggagggcgatcttgtcctgtggttacgatcttcactttgagaggtgcgcatgcatcgatgtccgacatgcacagaaggcctcaagaaagtggaccctggagatggacgtggcacttgtgcagtacatcaaccagctatgccgccacctcgccatcacacccgcacggctccatccccatgaggtgtacctggaccccgcggatgctgctgaccccagagtggcctgtctcctgaacgtgcccatcgagagcctgcgcctgcgcttcgccttgctgcagtccctcaacaccacactggagaccttcttcctgcccctggtggagctgcgccagacacccatgtatacccacagcatcgccgccctgctgaaggaggccaaagggctgatcttctatgacacgaaggtgaccgtgatgaatcgagtgctgaatgccactgtgcagaggacagcggaccacgcggcccctgagatcaccttggacccactggaaattgtgggaggggaaatcagagcttctgaaaactcctacttctgtcaggctgccaggcagctggcctcagtgccgtcgtctcagctctgcgtcaagctggccagtggcggtgaccccacatatgccttcaacatccgcttcactggcgaggaggtccatggcaccagcggctctttccgccacttcctgtggcaggtgtgtaaggagctgcagagttcctcgctgtcgctgctgctgctgtgccccagctcagctgtcaataagaacaagggcaagtatatcctgaccccgagccccatcacctacggggaggagcagctgctgcacttcctggggcagctgctggggattgcaattcgggcagacgtcccgctgcccctggacctcctgccctccttctggaagacgctggtgggcgagcccttggaccctgagcaagacctgcaggaagcggatatcctcacctacaattacgtcaagaagtttgagagcatcaatgatgagaccgagctggaggccctgtgcgctgagatcgcctcccagcacctggccacggagagccctgacagccccaacaagccctgctgcaggttcacctacctgaccatgacgggcgaggaggtggagctgtgcagccggggccggcacatccttgtggcgtgggagaacaaggacatctacgcggcagccatccggagcctgcggctgcgggagctgcagaatgtggagtgcgtgacggccgtgcgggccggcctgggctccatcatccccctgcagctgctgaccatgctcagcccactggagatggagctgcgcacctgcggcctcccctacatcaacctcgagttcctcaaggcccacaccatgtaccaagtggggctgatggagacggaccagcacatcgagttcttctggggggccctggagatgttcacccaggaggagctgtgcaagttcatcaagtttgcctgcaaccaggagcgcatcccgttcacctgcccctgcaaagatgggggtcccgacactgcccatgtgcccccgtaccccatgaagatcgcccccccagatggcacagcaggttccccagactctcgctacatccgcgtggagacctgcatgttcatgatcaagcttccccagtactcctctctggaaatcatgctggagaaacttcgttgtgccattcactaccgtgaagaccccctcagtggctgatgggagggagccccagaattaggctgtcactgaggcacccactctgctggcttgggaagccaccactgcggcccgtccctccagggccctgcgtgaggagttggcaacattttgcttttccaaactttcgtccacattccagggcctcctggaagacttaaccttttgtctttgtacgtttcgtgatgggttggttcttttgctgcctgtttgtggtctatttgtaggatagtttagttcccagacagtttgtgtctaatttgatcttcttggacattgtccctcatggccaccagattctaatgccataaggccccagctggttccccatcacagaaccacccagcaggaagccgggggtacaatgacctcggccacacagagcgctcgtgctttcagcagagcgcctccacagacaagcctgtggccagccctgccctccagcctcgagctggagttgctccagaggcagccccagcaggcctccctccacatagaggtggctgggccaattgcccaaacacgtgagacacacagggagctttatgtgttcatcttcctgctttagaacttgctcccggtcttggtttttctgaggaaaagcccacagtggttcccctgcccctcccatacctccctatctgccgtctgtctctttgggccctggtctgacagttttcatctgaggcctcctcgggagcaggagacttaagggttcatcccgaccttagttcacagagcctagctgggtgcatcccagccgcagggggtgagaagacacccagagatgggggacaatgctcaggtgggggcctcctccgagactctggttgagaggaaagcacatgattcaagcctaccccacaaaaaaggagcacaaaatgctcagaaatggcccttcctccctgcagtgacgtaggacaagggaaagggccacacccattttcaaaagagtggactgaggtgctctgctcaatttggggtctgctttagtgacccagacactcaagtccagatggagactccaggggggtccttctgcccctctggccagccccacccagcactccccatcaccccatgtaagtgtgtatgccagggctgagctgcctccaggctcacccactgcatctttgccccaaataggtctttgtccagtggtactttgttcatgagcagcacaggccatcttgttggacactgtcactttgggccttgccaggtctcacagaatcacatcgctgtatttattgtataatattgtgaatattggaagttttgagtgagtgctgtctagaaggttttggagtgtggatgctggtccaagaaagaagatgtgccctggcctgctggaaagattgtgaattctagagatagagccgttagcatccatctcctccctgtaactcttaggaaatgcatcaaggaccattatagaaaggatcccctgacctaaggatgaaatcgacctagggttaatcatgacagctgcatcagttgtattggatgcaagtcaactctggaggtgagtgcccgcaagcagttcccctgctttgaaagaagatggtcagcccgctgcctccccagcggccacagctcctttgagtgtggggggtcacagccaggatgtattcctgacaataaggatccttttattttcatttctgcataatgaaagagcctttcgatttattagaagtggtttttcctccctacatctttaaattcttggttctctttagtcctcatcccttgaatggacttgtcagctacctccccaggaggagttcagaagcttctgttggccatcacttgagtagatgacaagctgtaaggtatctgctgctaacgtggctgcttctccgagagcacattgaggtccagacagatccaaaccttggccctaaaaaatgtgtgctgtaaagttacttgatgtatatttattataattatttatggttgcatttaacaaacttttcattcaatctgatgctatttacaccatgctgtgtaaaggaagctcactaaaggaaaaaagtcacaccaataaataaccttcatcta

SEQ ID NO: 340436 - DNA, 5431 bp, Homo sapiens
gttctagaggatcccgcctaagtggaactgctccgccacggacctcttttaccagggcaactcccagacagtgagagagtggctcaacgtggccatcacccggaccctgcaccagggcgaggagagccttttagagctgacgaaacagatctgctctttcctgcagacagcaccagagcagttcccctccgaagagttcccaatttccgaatccaaagtcaacatggacgtgaatttccccggggcagcttttgttgttgtgtcttgtaaagaaagtcaatctggattccgcaaagactcctctctgtacaaggcaccgtgggcacgggtgctcgtatatggcctcggccacaaagtgaagcgaaatggccagctgaacctcatcgaggccgcctgttacccgcgggacgcgtccccagccaacactgggcttgcacctccccccaccgctgaccagtacccctctgtggtcctctccacagacagggtccacatcaaactgggggtgtctccacctcctggagcagtcctggtgttacattccctgcccctggagttcccactggctatggccttcgcagagcagctgctgtcctggaaatcagaggacagtgaagggaagtccgaagatgagcctgacaccattccgacatccgtcctcctgcaggtggtggagctgctaggaaacttcttgtggaccacggacatggcagcctgcgtgaaggagcttgttttccatctcctggcagagctcctgcgcacggtgcacaccctggagcagaggcggcaccccgctggcctgtcctcctcaatcgccctccagctgaacccctgcctggccatgctgatggccttgcagtcggagctccacaagctgtacgacgaggagacgcagaactgggtctcaggcggcgcctgcgggggctccgggggggcggcggccggtgaccagggcaggttctctacgtattttcatgcactcatggaagggtgcctggctgtggccgaagtgaccctgcctactaacatgagtgtcacagccagtggggtgacctcagcgaccgccccaaatctcagtgactcgtcctcctcctcctcgtcctccccaggacagaccccacagagtcccagcctcctctccaagaggaaaaaagtcaagatgaagcgggaaaaggcctcctcgtcgggcaagcgccagtcttcccgcaccgtggactcggaccccaccgtgctcagcatcggaggcagcaagcccgaggacatgctgtggttccaccgcgcactcaccctgctcatcatcctccgccacctcaccaggaaggacccacaggggctgggcgtgacgagtgacgccatcgccgatgcctgccaggccctggtgggccccaccgcccacagccgcttgctggtgatctccgggatccccacccacctggacgagggcgtagtcagaggcgccatccgcaaggcctgcaacgcccacggcggggtcttcaaagacgagatctacatcccgctgcaggaagaagacaccaagaagccaaaagacaaggccgagggcggggacgggaaagttgagcccgagaagacactggccttccccggcacagacagcatggaggtcagcacgtccagcagcctgacccccgccatgagcatcagcgcctccgcctccaccagccaggcctccatctgcagctcgcagggcatctcccaaaccgtcagcgacctctctgtggatccgctgcctgccggcctcgagctgcccatccctccgggcctgttggagccccacgcggtgtccagccaggaaagcctggacatttccctgtgcagcaccggcagcctgggcagcctgggcagcctgggggagcccctggacaatgcagagacggcctcggtgtcggacatgggctccatgtacacagtcacttccctggacaaccagcccctcgccgcccgccccatcaaaggcttcgcagtcgtggagataagatcccgagccaaaattgagaaaattcgagcaagtttatttaacaataatgacttgattggtttgtcaagtttggatggtgaagatgaattgatggaaatgtcaacagaagagattctaaccgtgtctgtagtaaatcagagtctctttgatactcaagggagcccagggttagaagattatttcaatgataagtcaattaaaggggagaagctggtgcccggagccagagaggttctgacggagatatttaagagttgtgcccattcagagcagacgctgagcctgacaccagcgaagcccatcagagtctctgacatttatcttagcaaagagcagatcaactcccagaccccaggcaacctcctccacctcttcttcaccaatgtccggccgccaaaaaaggtgctggaggatcagctcacccagatcctgaggaagtatggcgtgccaaagcccaagtttgacaagagcaagtacagcaaggccgggaaggagcagcaccccgtgaaggtggtgagcaccaagcggcctatcaccaagccgcccgccaaggacaaggctgtgctcaacagcgtcagcaggactgccttaagtgagaagaagccaactgtgaagccaaaatcaccagaaaagagcaaaccagatgaaaaggacccagaaaagtcacctaccaaaaaacaagaagtccctgaggaaaaatacctgacgctggaaggatttcacaaatttgttattgaccgagccaggcaagatatccgtagcgtctggagggcgatcttgtcctgtggttacgatcttcactttgagaggtgcgcatgcatcgatgtccgacatgcacagaaggcctcaagaaagtggaccctggagatggacgtggcacttgtgcagtacatcaaccagctatgccgccacctcgccatcacacccgcacggctccatccccatgaggtgtacctggaccccgcggatgctgctgaccccagagtggcctgtctcctgaacgtgcccatcgagagcctgcgcctgcgcttcgccttgctgcagtccctcaacaccacactggagaccttcttcctgcccctggtggagctgcgccagacacccatgtatacccacagcatcgccgccctgctgaaggaggccaaagggctgatcttctatgacacgaaggtgaccgtgatgaatcgagtgctgaatgccactgtgcagaggacagcggaccacgcggcccctgagatcaccttggacccactggaaattgtgggaggggaaatcagagcttctgaaaactcctacttctgtcaggctgccaggcagctggcctcagtgccgtcgtctcagctctgcgtcaagctggccagtggcggtgaccccacatatgccttcaacatccgcttcactggcgaggaggtccatggcaccagcggctctttccgccacttcctgtggcaggtgtgtaaggagctgcagagttcctcgctgtcgctgctgctgctgtgccccagctcagctgtcaataagaacaagggcaagtatatcctgaccccgagccccatcacctacggggaggagcagctgctgcacttcctggggcagctgctggggattgcaattcgggcagacgtcccgctgcccctggacctcctgccctccttctggaagacgctggtgggcgagcccttggaccctgagcaagacctgcaggaagcggatatcctcacctacaattacgtcaagaagtttgagagcatcaatgatgagaccgagctggaggccctgtgcgctgagatcgcctcccagcacctggccacggagagccctgacagccccaacaagccctgctgcaggttcacctacctgaccatgacgggcgaggaggtggagctgtgcagccggggccggcacatccttgtggcgtgggagaacaaggacatctacgcggcagccatccggagcctgcggctgcgggagctgcagaatgtggagtgcgtgacggccgtgcgggccggcctgggctccatcatccccctgcagctgctgaccatgctcagcccactggagatggagctgcgcacctgcggcctcccctacatcaacctcgagttcctcaaggcccacaccatgtaccaagtggggctgatggagacggaccagcacatcgagttcttctggggggccctggagatgttcacccaggaggagctgtgcaagttcatcaagtttgcctgcaaccaggagcgcatcccgttcacctgcccctgcaaagatgggggtcccgacactgcccatgtgcccccgtaccccatgaagatcgcccccccagatggcacagcaggttccccagactctcgctacatccgcgtggagacctgcatgttcatgatcaagcttccccagtactcctctctggaaatcatgctggagaaacttcgttgtgccattcactaccgtgaagaccccctcagtggctgatgggagggagccccagaattaggctgtcactgaggcacccactctgctggcttgggaagccaccactgcggcccgtccctccagggccctgcgtgaggagttggcaacattttgcttttccaaactttcgtccacattccagggcctcctggaagacttaaccttttgtctttgaaatgcatcaaggaccattatagaaaggatcccctgacctaaggatgaaatcgacctagggttaatcatgacagctgcatcagttgtattggatgcaagtcaactctggaggtgagtgcccgcaagcagttcccctgctttgaaagaagatggtcagcccgctgcctccccagcggccacagctcctttgagtgtggggggtcacagccaggatgtattcctgacaataaggatccttttattttcatttctgcataatgaaagagcctttcgatttattagaagtggtttttcctccctacatctttaaattcttggttctctttagtcctcatcccttgaatggacttgtcagctacctccccaggaggagttcagaagcttctgttggccatcacttgagtagatgacaagctgtaaggtatctgctgctaacgtggctgcttctccgagagcacattgaggtccagacagatccaaaccttggccctaaaaaatgtgtgctgtaaagttacttgatgtatatttattataattatttatggttgcatttaacaaacttttcattcaatctgatgctatttacaccatgctgtgtaaaggaagctcactaaaggaaaaaagtcacaccaataaataaccttcatctaattttgatttaccttaagagttgtgtgatcatctactcttgctgagcaagttcaaaggctggcatgcttggatggctctgatatttaagtgctgccaagtggctaggaattaaagtgtttctaattattatggtctctt

SEQ ID NO: 340437 - DNA, 5214 bp, Homo sapiens
gttctagaggatcccgcctaagtggaactgctccgccacggacctcttttaccagggcaactcccagacagtgagagagtggctcaacgtggccatcacccggaccctgcaccagggcgaggagagccttttagagctgacgaaacagatctgctctttcctgcagacagcaccagagcagttcccctccgaagagttcccaatttccgaatccaaagtcaacatggacgtgaatttccccggggcagcttttgttgttgtgtcttgtaaagaaagtcaatctggattccgcaaagactcctctctgtacaaggcaccgtgggcacgggtgctcgtatatggcctcggccacaaagtgaagcgaaatggccagctgaacctcatcgaggccgcctgttacccgcgggacgcgtccccagccaacactgggcttgcacctccccccaccgctgaccagtacccctctgtggtcctctccacagacagggtccacatcaaactgggggtgtctccacctcctggagcagtcctggtgttacattccctgcccctggagttcccactggctatggccttcgcagagcagctgctgtcctggaaatcagaggacagtgaagggaagtccgaagatgagcctgacaccattccgacatccgtcctcctgcaggtggtggagctgctaggaaacttcttgtggaccacggacatggcagcctgcgtgaaggagcttgttttccatctcctggcagagctcctgcgcacggtgcacaccctggagcagaggcggcaccccgctggcctgtcctcctcaatcgccctccagctgaacccctgcctggccatgctgatggccttgcagtcggagctccacaagctgtacgacgaggagacgcagaactgggtctcaggcggcgcctgcgggggctccgggggggcggcggccggtgaccagggcaggttctctacgtattttcatgcactcatggaagggtgcctggctgtggccgaagtgaccctgcctactaacatgagtgtcacagccagtggggtgacctcagcgaccgccccaaatctcagtgactcgtcctcctcctcctcgtcctccccaggacagaccccacagagtcccagcctcctctccaagaggaaaaaagtcaagatgaagcgggaaaaggcctcctcgtcgggcaagcgccagtcttcccgcaccgtggactcggaccccaccgtgctcagcatcggaggcagcaagcccgaggacatgctgtggttccaccgcgcactcaccctgctcatcatcctccgccacctcaccaggaaggacccacaggggctgggcgtgacgagtgacgccatcgccgatgcctgccaggccctggtgggccccaccgcccacagccgcttgctggtgatctccgggatccccacccacctggacgagggcgtagtcagaggcgccatccgcaaggcctgcaacgcccacggcggggtcttcaaagacgagatctacatcccgctgcaggaagaagacaccaagaagccaaaagacaaggccgagggcggggacgggaaagttgagcccgagaagacactggccttccccggcacagacagcatggaggtcagcacgtccagcagcctgacccccgccatgagcatcagcgcctccgcctccaccagccaggcctccatctgcagctcgcagggcatctcccaaaccgtcagcgacctctctgtggatccgctgcctgccggcctcgagctgcccatccctccgggcctgttggagccccacgcggtgtccagccaggaaagcctggacatttccctgtgcagcaccggcagcctgggcagcctgggcagcctgggggagcccctggacaatgcagagacggcctcggtgtcggacatgggctccatgtacacagtcacttccctggacaaccagcccctcgccgcccgccccatcaaaggcttcgcagtcgtggagataagatcccgagccaaaattgagaaaattcgagcaagtttatttaacaataatgacttgattggtttgtcaagtttggatggtgaagatgaattgatggaaatgtcaacagaagagattctaaccgtgtctgtagtaaatcagagtctctttgatactcaagggagcccagggttagaagattatttcaatgataagtcaattaaaggggagaagctggtgcccggagccagagaggttctgacggagatatttaagagttgtgcccattcagagcagacgctgagcctgacaccagcgaagcccatcagagtctctgacatttatcttagcaaagagcagatcaactcccagaccccaggcaacctcctccacctcttcttcaccaatgtccggccgccaaaaaaggtgctggaggatcagctcacccagatcctgaggaagtatggcgtgccaaagcccaagtttgacaagagcaagtacagcaaggccgggaaggagcagcaccccgtgaaggtggtgagcaccaagcggcctatcaccaagccgcccgccaaggacaaggctgtgctcaacagcgtcagcaggactgccttaagtgagaagaagccaactgtgaagccaaaatcaccagaaaagagcaaaccagatgaaaaggacccagaaaagtcacctaccaaaaaacaagaagtccctgaggaaaaatacctgacgctggaaggatttcacaaatttgttattgaccgagccaggcaagatatccgtagcgtctggagggcgatcttgtcctgtggttacgatcttcactttgagaggtgcgcatgcatcgatgtccgacatgcacagaaggcctcaagaaagtggaccctggagatggacgtggcacttgtgcagtacatcaaccagctatgccgccacctcgccatcacacccgcacggctccatccccatgaggtgtacctggaccccgcggatgctgctgaccccagagtggcctgtctcctgaacgtgcccatcgagagcctgcgcctgcgcttcgccttgctgcagtccctcaacaccacactggagaccttcttcctgcccctggtggagctgcgccagacacccatgtatacccacagcatcgccgccctgctgaaggaggccaaagggctgatcttctatgacacgaaggtgaccgtgatgaatcgagtgctgaatgccactgtgcagaggacagcggaccacgcggcccctgagatcaccttggacccactggaaattgtgggaggggaaatcagagcttctgaaaactcctacttctgtcaggctgccaggcagctggcctcagtgccgtcgtctcagctctgcgtcaagctggccagtggcggtgaccccacatatgccttcaacatccgcttcactggcgaggaggtccatggcaccagcggctctttccgccacttcctgtggcaggtgtgtaaggagctgcagagttcctcgctgtcgctgctgctgctgtgccccagctcagctgtcaataagaacaagggcaagtatatcctgaccccgagccccatcacctacggggaggagcagctgctgcacttcctggggcagctgctggggattgcaattcgggcagacgtcccgctgcccctggacctcctgccctccttctggaagacgctggtgggcgagcccttggaccctgagcaagacctgcaggaagcggatatcctcacctacaattacgtcaagaagtttgagagcatcaatgatgagaccgagctggaggccctgtgcgctgagatcgcctcccagcacctggccacggagagccctgacagccccaacaagccctgctgcaggttcacctacctgaccatgacgggcgaggaggtggagctgtgcagccggggccggcacatccttgtggcgtgggagaacaaggacatctacgcggcagccatccggagcctgcggctgcgggagctgcagaatgtggagtgcgtgacggccgtgcgggccggcctgggctccatcatccccctgcagctgctgaccatgctcagcccactggagatggagctgcgcacctgcggcctcccctacatcaacctcgagttcctcaaggcccacaccatgtaccaagtggggctgatggagacggaccagcacatcgagttcttctggggggccctggagatgttcacccaggaggagctgtgcaagttcatcaagtttgcctgcaaccaggagcgcatcccgttcacctgcccctgcaaagatgggggtcccgacactgcccatgtgcccccgtaccccatgaagatcgcccccccagatggcacagcaggttccccagactctcgctacatccgcgtggagacctgcatgttcatgatcaagcttccccagtactcctctctggaaatcatgctggagaaacttcgttgtgccattcactaccgtgaagaccccctcagtggctgatgggagggagccccagaattaggctgtcactgaggcacccactctgctggcttgggaagccaccactgcggcccgtccctccagggccctgcgtgaggagttggcaacattttgcttttccaaactttcgtccacattccagggcctcctggaagacttaaccttttgtctttgaaatgcatcaaggaccattatagaaaggatcccctgacctaaggatgaaatcgacctagggttaatcatgacagctgcatcagttgtattggatgcaagtcaactctggagtcctcatcccttgaatggacttgtcagctacctccccaggaggagttcagaagcttctgttggccatcacttgagtagatgacaagctgtaaggtatctgctgctaacgtggctgcttctccgagagcacattgaggtccagacagatccaaaccttggccctaaaaaatgtgtgctgtaaagttacttgatgtatatttattataattatttatggttgcatttaacaaacttttcattcaatctgatgctatttacaccatgctgtgtaaaggaagctcactaaaggaaaaaagtcacaccaataaataaccttcatctaattttgatttaccttaagagttgtgtgatcatctactcttgctgagcaagttcaaaggctggcatgcttggatggctctgatatttaagtgctgccaagtggctaggaattaaagtgtttctaattattatggtctctt

SEQ ID NO: 340438 - DNA, 2544 bp, Homo sapiens
  misc_feature (4)..(4): n is a, c, g, or t
tgtncacgctgccaggtgagtgccaagctgaagttgaagctgacggcctggagatgttcacccaggaggagctgtgcaagttcatcaagtttgcctgcaaccaggagcgcatcccgttcacctgcccctgcaaagatgggggtcccgacactgcccatgtgcccccgtaccccatgaagatcgcccccccagatggcacagcaggttccccagactctcgctacatccgcgtggagacctgcatgttcatgatcaagcttccccagtactcctctctggaaatcatgctggagaaacttcgttgtgccattcactaccgtgaagaccccctcagtggctgatgggagggagccccagaattaggctgtcactgaggcacccactctgctggcttgggaagccaccactgcggcccgtccctccagggccctgcgtgaggagttggcaacattttgcttttccaaactttcgtccacattccagggcctcctggaagacttaaccttttgtctttgtacgtttcgtgatgggttggttcttttgctgcctgtttgtggtctatttgtaggatagtttagttcccagacagtttgtgtctaatttgatcttcttggacattgtccctcatggccaccagattctaatgccataaggccccagctggttccccatcacagaaccacccagcaggaagccgggggtacaatgacctcggccacacagagcgctcgtgctttcagcagagcgcctccacagacaagcctgtggccagccctgccctccagcctcgagctggagttgctccagaggcagccccagcaggcctccctccacatagaggtggctgggccaattgcccaaacacgtgagacacacagggagctttatgtgttcatcttcctgctttagaacttgctcccggtcttggtttttctgaggaaaagcccacagtggttcccctgcccctcccatacctccctatctgccgtctgtctctttgggccctggtctgacagttttcatctgaggcctcctcgggagcaggagacttaagggttcatcccgaccttagttcacagagcctagctgggtgcatcccagccgcagggggtgagaagacacccagagatgggggacaatgctcaggtgggggcctcctccgagactctggttgagaggaaagcacatgattcaagcctaccccacaaaaaaggagcacaaaatgctcagaaatggcccttcctccctgcagtgacgtaggacaagggaaagggccacacccattttcaaaagagtggactgaggtgctctgctcaatttggggtctgctttagtgacccagacactcaagtccagatggagactccaggggggtccttctgcccctctggccagccccacccagcactccccatcaccccatgtaagtgtgtatgccagggctgagctgcctccaggctcacccactgcatctttgccccaaataggtctttgtccagtggtactttgttcatgagcagcacaggccatcttgttggacactgtcactttgggccttgccaggtctcacagaatcacatcgctgtatttattgtataatattgtgaatattggaagttttgagtgagtgctgtctagaaggttttggagtgtggatgctggtccaagaaagaagatgtgccctggcctgctggaaagattgtgaattctagagatagagccgttagcatccatctcctccctgtaactcttaggaaatgcatcaaggaccattatagaaaggatcccctgacctaaggatgaaatcgacctagggttaatcatgacagctgcatcagttgtattggatgcaagtcaactctggaggtgagtgcccgcaagcagttcccctgctttgaaagaagatggtcagcccgctgcctccccagcggccacagctcctttgagtgtggggggtcacagccaggatgtattcctgacaataaggatccttttattttcatttctgcataatgaaagagcctttcgatttattagaagtggtttttcctccctacatctttaaattcttggttctctttagtcctcatcccttgaatggacttgtcagctacctccccaggaggagttcagaagcttctgttggccatcacttgagtagatgacaagctgtaaggtatctgctgctaacgtggctgcttctccgagagcacattgaggtccagacagatccaaaccttggccctaaaaaatgtgtgctgtaaagttacttgatgtatatttattataattatttatggttgcatttaacaaacttttcattcaatctgatgctatttacaccatgctgtgtaaaggaagctcactaaaggaaaaaagtcacaccaataaataaccttcatctaattttgatttaccttaagagttgtgtgatcatctactcttgctgagcaagttcaaaggctggcatgcttggatggctctgatatttaagtgctgccaagtggctaggaattaaagtgtttctaattattatggtctctt

SEQ ID NO: 340439 - DNA, 4071 bp, Homo sapiens
gttctagaggatcccgcctaagtggaactgctccgccacggacctcttttaccagggcaactcccagacagtgagagagtggctcaacgtggccatcacccggaccctgcaccagggcgaggagagccttttagagctgacgaaacagatctgctctttcctgcagacagcaccagagcagttcccctccgaagagttcccaatttccgaatccaaagtcaacatggacgtgaatttccccggggcagcttttgttgttgtgtcttgtaaagaaagtcaatctggattccgcaaagactcctctctgtacaaggcaccgtgggcacgggtgctcgtatatggcctcggccacaaagtgaagcgaaatggccagctgaacctcatcgaggccgcctgttacccgcgggacgcgtccccagccaacactgggcttgcacctccccccaccgctgaccagtacccctctgtggtcctctccacagacagggtccacatcaaactgggggtgtctccacctcctggagcagtcctggtgttacattccctgcccctggagttcccactggctatggccttcgcagagcagctgctgtcctggaaatcagaggacagtgaagggaagtccgaagatgagcctgacaccattccgacatccgtcctcctgcaggtggtggagctgctaggaaacttcttgtggaccacggacatggcagcctgcgtgaaggagcttgttttccatctcctggcagagctcctgcgcacggtgcacaccctggagcagaggcggcaccccgctggcctgtcctcctcaatcgccctccagctgaacccctgcctggccatgctgatggccttgcagtcggagctccacaagctgtacgacgaggagacgcagaactgggtctcaggcggcgcctgcgggggctccgggggggcggcggccggtgaccagggcaggttctctacgtattttcatgcactcatggaagggtgcctggctgtggccgaagtgaccctgcctactaacatgagtgtcacagccagtggggtgacctcagcgaccgccccaaatctcagtgactcgtcctcctcctcctcgtcctccccaggacagaccccacagagtcccagcctcctctccaagaggaaaaaagtcaagatgaagcgggaaaaggcctcctcgtcgggcaagcgccagtcttcccgcaccgtggactcggaccccaccgtgctcagcatcggaggcagcaagcccgaggacatgctgtggttccaccgcgcactcaccctgctcatcatcctccgccacctcaccaggaaggacccacaggggctgggcgtgacgagtgacgccatcgccgatgcctgccaggccctggtgggccccaccgcccacagccgcttgctggtgatctccgggatccccacccacctggacgagggcgtagtcagaggcgccatccgcaaggcctgcaacgcccacggcggggtcttcaaagacgagatctacatcccgctgcaggaagaagacaccaagaagccaaaagacaaggccgagggcggggacgggaaagttgagcccgagaagacactggccttccccggcacagacagcatggaggtcagcacgtccagcagcctgacccccgccatgagcatcagcgcctccgcctccaccagccaggcctccatctgcagctcgcagggcatctcccaaaccgtcagcgacctctctgtggatccgctgcctgccggcctcgagctgcccatccctccgggcctgttggagccccacgcggtgtccagccaggaaagcctggacatttccctgtgcagcaccggcagcctgggcagcctgggcagcctgggggagcccctggacaatgcagagacggcctcggtgtcggacatgggctccatgtacacagtcacttccctggacaaccagcccctcgccgcccgccccatcaaaggcttcgcagtcgtggagataagatcccgagccaaaattgagaaaattcgagcaagtttatttaacaataatgacttgattggtttgtcaagtttggatggtgaagatgaattgatggaaatgtcaacagaagagattctaaccgtgtctgtagtaaatcagagtctctttgatactcaagggagcccagggttagaagattatttcaatgataagtcaattaaaggggagaagctggtgcccggagccagagaggttctgacggagatatttaagagttgtgcccattcagagcagacgctgagcctgacaccagcgaagcccatcagagtctctgacatttatcttagcaaagagcagatcaactcccagaccccaggcaacctcctccacctcttcttcaccaatgtccggccgccaaaaaaggtgctggaggatcagctcacccagatcctgaggaagtatggcgtgccaaagcccaagtttgacaagagcaagtacagcaaggccgggaaggagcagcaccccgtgaaggtggtgagcaccaagcggcctatcaccaagccgcccgccaaggacaaggctgtgctcaacagcgtcagcaggactgccttaagtgagaagaagccaactgtgaagccaaaatcaccagaaaagagcaaaccagatgaaaaggacccagaaaagtcacctaccaaaaaacaagaagtccctgaggaaaaatacctgacgctggaaggatttcacaaatttgttattgaccgagccaggcaagatatccgtagcgtctggagggcgatcttgtcctgtggttacgatcttcactttgagaggtgcgcatgcatcgatgtccgacatgcacagaaggcctcaagaaagtggaccctggagatggacgtggcacttgtgcagtacatcaaccagctatgccgccacctcgccatcacacccgcacggctccatccccatgaggtgtacctggaccccgcggatgctgctgaccccagagtggcctgtctcctgaacgtgcccatcgagagcctgcgcctgcgcttcgccttgctgcagtccctcaacaccacactggagaccttcttcctgcccctggtggagctgcgccagacacccatgtatacccacagcatcgccgccctgctgaaggaggccaaagggctgatcttctatgacacgaaggtgaccgtgatgaatcgagtgctgaatgccactgtgcagaggacagcggaccacgcggcccctgagatcaccttggacccactggaaattgtgggaggggaaatcagagcttctgaaaactcctacttctgtcaggctgccaggcagctggcctcagtgccgtcgtctcagctctgcgtcaagctggccagtggcggtgaccccacatatgccttcaacatccgcttcactggcgaggaggtccatggcaccagcggctctttccgccacttcctgtggcaggtgtgtaaggagctgcagagttcctcgctgtcgctgctgctgctgtgccccagctcagctgtcaataagaacaagggcaagtatatcctgaccccgagccccatcacctacggggaggagcagctgctgcacttcctggggcagctgctggggattgcaattcgggcagacgtcccgctgcccctggacctcctgccctccttctggaagacgctggtgggcgagcccttggaccctgagcaagacctgcaggaagcggatatcctcacctacaattacgtcaagaagtttgagagcgtgagtgcaaggcacagttctggggggctgcagaacccggggcctccccgccaccttgcttaggcctccatgcagacccgagctccccgctgaggctgggttgggatcccacagaggaccttaggggtgtgagccatgtgccaggaaggcttatttcatggggacagaggcctctggcctccctccctgctggcagcagagattggaggtgacatgaccagccctgctggccctcccctcccacattggtgctcattgcctggccatgggcaagggctcctggagctgagtgaacaggcactgggagaacagctgtaggggtgaag

SEQ ID NO: 340440 - DNA, 2625 bp, Homo sapiens
gttctagaggatcccgcctaagtggaactgctccgccacggacctcttttaccagggcaactcccagacagtgagagagtggctcaacgtggccatcacccggaccctgcaccagggcgaggagagccttttagagctgacgaaacagatctgctctttcctgcagacagcaccagagcagttcccctccgaagagttcccaatttccgaatccaaagtcaacatggacgtgaatttccccggggcagcttttgttgttgtgtcttgtaaagaaagtcaatctggattccgcaaagactcctctctgtacaaggcaccgtgggcacgggtgctcgtatatggcctcggccacaaagtgaagcgaaatggccagctgaacctcatcgaggccgcctgttacccgcgggacgcgtccccagccaacactgggcttgcacctccccccaccgctgaccagtacccctctgtggtcctctccacagacagggtccacatcaaactgggggtgtctccacctcctggagcagtcctggtgttacattccctgcccctggagttcccactggctatggccttcgcagagcagctgctgtcctggaaatcagaggacagtgaagggaagtccgaagatgagcctgacaccattccgacatccgtcctcctgcaggtggtggagctgctaggaaacttcttgtggaccacggacatggcagcctgcgtgaaggagcttgttttccatctcctggcagagctcctgcgcacggtgcacaccctggagcagaggcggcaccccgctggcctgtcctcctcaatcgccctccagctgaacccctgcctggccatgctgatggccttgcagtcggagctccacaagctgtacgacgaggagacgcagaactgggtctcaggcggcgcctgcgggggctccgggggggcggcggccggtgaccagggcaggttctctacgtattttcatgcactcatggaagggtgcctggctgtggccgaagtgaccctgcctactaacatgagtgtcacagccagtggggtgacctcagcgaccgccccaaatctcagtgactcgtcctcctcctcctcgtcctccccaggacagaccccacagagtcccagcctcctctccaagaggaaaaaagtcaagatgaagcgggaaaaggcctcctcgtcgggcaagcgccagtcttcccgcaccgtggactcggaccccaccgtgctcagcatcggaggcagcaagcccgaggacatgctgtggttccaccgcgcactcaccctgctcatcatcctccgccacctcaccaggaaggacccacaggggctgggcgtgacgagtgacgccatcgccgatgcctgccaggccctggtgggccccaccgcccacagccgcttgctggtgatctccgggatccccacccacctggacgagggcgtagtcagaggcgccatccgcaaggcctgcaacgcccacggcggggtcttcaaagacgagatctacatcccgctgcaggaagaagacaccaagaagccaaaagacaaggccgagggcggggacgggaaagttgagcccgagaagacactggccttccccggcacagacagcatggaggtcagcacgtccagcagcctgacccccgccatgagcatcagcgcctccgcctccaccagccaggcctccatctgcagctcgcagggcatctcccaaaccgtcagcgacctctctgtggatccgctgcctgccggcctcgagctgcccatccctccgggcctgttggagccccacgcggtgtccagccaggaaagcctggacatttccctgtgcagcaccggcagcctgggcagcctgggcagcctgggggagcccctggacaatgcagagacggcctcggtgtcggacatgggctccatgtacacagtcacttccctggacaaccagcccctcgccgcccgccccatcaaaggcttcgcagtcgtggagataagatcccgagccaaaattgagaaaattcgagcaagtttatttaacaataatgacttgattggtttgtcaagtttggatggtgaagatgaattgatggaaatgtcaacagaagagattctaaccgtgtctgtagtaaatcagagtctctttgatactcaagggagcccagggttagaagattatttcaatgataagtcaattaaaggggagaagctggtgcccggagccagagaggttctgacggagatatttaagagttgtgcccattcagagcagacgctgagcctgacaccagcgaagcccatcagagtctctgacatttatcttagcaaagagcagatcaactcccagaccccaggcaacctcctccacctcttcttcaccaatgtccggccgccaaaaaaggtgctggaggatcagctcacccagatcctgaggaagtatggcgtgccaaagcccaagtttgacaagagcaagtacagcaaggccgggaaggagcagcaccccgtgaaggtggtgagcaccaagcggcctatcaccaagccgcccgccaaggacaaggctgtgctcaacagcgtcaggactgcattaagtgagaagaagcatcttcagaatcaaatcagggccgagcc

SEQ ID NO: 340441 - DNA, 554 bp, Homo sapiens
gttctagaggatcccgcctaagtggaactgctccgccacggacctcttttaccagggcaactcccagacagtgagagagtggctcaacgtggccatcacccggaccctgcaccagggcgaggagagccttttagagctgacgaaacagatctgctctttcctgcagacagcaccagagcagttcccctccgaagagttcccaatttccgaatccaaagtcaacatggacgtgaatttccccggggcagcttttgttgttgtgtcttgtaaagaaagtcaatctggattccgcaaagactcctctctgtacaaggcaccgtgggcacgggtgctcgtatatggcctcggccacaaagtgaagcgaaatggccagctgaacctcatcgaggccgcctgttacccgcgggacgcgtccccagccaacactgggcttgcacctccccccaccgctgaccagtacccctctgtggtcctctccacagacagggtccacatcaaactgggggtgtctccacctcccggcagttccactataggcgggatactctagagtc

SEQ ID NO: 340442 - DNA, 174 bp, Homo sapiens
tgtattcttagtaacactttatagcagatatacattttatcccacaactctgggtgtgagaaatgttgccaccttctatttgtctaaatttgatttcatctacttcacactacctcttcctccctctacccacacacagaccagatttggggaaggccttgggaacatttggga

SEQ ID NO: 340443 - DNA, 185 bp, Homo sapiens
ggaggtgcatgccactgtttggatagccagatacttaaagcaagtaggcactctttttatgtcccccggagacttacaaagaaccaataccagcccctagatgataaatttgatggattcttggtattttgagggagaatcattgggaaacctttgccagtccccaggagcctgagcactgcatt

SEQ ID NO: 340444 - DNA, 464 bp, Homo sapiens
tcacctattagctgccagagaacaagaacccctatctgttttgccaatataaaacctacactttgaacaatgcctaacacacagcaggaatttgaattattgaacaaacaaatgacataaccctgagcctataaacacagcactaaaaattatattcctttccagagcaccaaatgcaaaggtttcaacgatagttcagttaacaatcaccctgacgagactcagaaggacaaactgaaaacttctgaaatcaggtatgccaactagaaaagaagttttacttcagcagttcatttctacttccactataaagttatcttcaataaaatttcatagaaaaagtatattctgccatgttatttttcttgaaaagatgttatgcacttgtagtaacaagtatgtaataatttatagtgtaaaagattaaatattaaatagaaaaggaatcactgatagggtgctac

SEQ ID NO: 340445 - DNA, 243 bp, Homo sapiens
aatcaaggtgtcagctggggctggggtctcctctgaaggctcaactggggaaggatctgcttccaagctcaatcagcattttttggccagattcagccctgcactggctgttggactggagcctcagtttccttggggcagttggccagaggttgccctcagttccttggcatggggcccttccaacatagcaacttgcttcatcaaagtatgcaagtcaagatagcaatagaaagagtcacc

SEQ ID NO: 340446 - DNA, 562 bp, Homo sapiens
tgctgggattacaggcgtgagccactgcgcctggcccctttttcttcttaacacactctcatggtattatgacttggaatggtcttttgaggttaatttgataatataggaaaacccaattgttggcccaaatttataaccgtttacactagtagttgatcatgttgacataatagtactaagtggcagaatctttgttaatatttgtgattctctttttggttatggatcaaaaacctcccaagagtccacataagagtacttttcatgctagtcaaaaattcagttctaaagcatttcattattttggaaaaggcagtctgttatacatctgtagtcaaaaagcagtgtatagctttcaaattttctgaaacattatcagtggccttagagtaagattctggtgttgttaaaggcttcttgatgctttgtaaggtcaacattttatgaataattttcttttgtagttttaaggggaaaagactagtggatcaaaactgattgctcatacattacaacttcccaagtcattgtgtatctgaattggcagcctagagtaaat

SEQ ID NO: 340447 - DNA, 212 bp, Homo sapiens
ctcttcagatgttacttcacctcttgctgttactgcatttctctactgtatgttacagcagaattccttttaaaaaatgtccacgttcactgactctagttttttatttctccttgtctcttgaacccagtccagtcaggtgccaccactccactgaaactcctgttttttttttttttttttttttgaaacaaagtcttgctctgttgccc

SEQ ID NO: 340448 - DNA, 406 bp, Homo sapiens
agtaaaggcaggaaggggaggacaccaaaagcatccatatattggactatgtttgcttcctactcagtcagcacaggccgcagtgtttgaggacatgcagtcaggtctgtgggcgtgatctctctctacaccgaaggaatgagcttcatcagcaccattccatcgaagggaattttgtgctgtatgttcccagggtcactcacaaacatccctacttacaagtgacttgatgctttccaaaataacagtttattgggattttggtttaagtttgcactaattcaaagcctgcagactgcagtatacttacacacctttattgtacttatgagtgtagaaactgtgatacggctgattcacttattcatttactaacatatagtgaggggtgtgtgtgtgtgtctgt

SEQ ID NO: 340449 - DNA, 545 bp, Homo sapiens
atgctggttctcctgtagctgctcctctttaggtgaccctggtgagtgatggtggtttggggactatgatggaagctatgacccacttcatttaaaatcatccctgaagattggccagaaccattctggattcatttctgagtgagacacatggcggctgccctattttcttccctaggccttggatctgaggcctctttttgaatcctgtcagccctgtcagcatttagaattcctaattatttttctaaaataaactctgagtcaagaggatctctcttccctctacatttccttctaacatcaattttctaaaattccaagagtagtctgtctcacctctgtcctcagattctgttttctacatgtggcaatggcaatgtctgtgcattttacacagctccttggagaacttccgcccatcttttctattagtttgttcattctgggagtatggaggaaaggggctgggccaagctggctttcagagtggggagagtacttctttctcatggtgaaattgcagggtgtgtgtgtgacggggt

SEQ ID NO: 340450 - DNA, 355 bp, Homo sapiens
gctatgaagtttacatgagaatgaggaagaaatggagatgataaaaatgaaggggagagaaagagatctcattcttaaaatttacatttaaaatatccccaattctaaaaggttttggtgggctactaagcatgggataaagggctattcttcagggtacccacccctttctctgtcctttagcctggtgctcagagcccttacgttatcaagatttgcatatacaattgaactaataagtttcctagggctgccttaaaaatttctacaaaacaggtagctaaaataacaggaatttttggtctcacggttgtggaagccagaagtcctaaatcaaggtgttggcaggactcgg

SEQ ID NO: 340451 - DNA, 345 bp, Homo sapiens
cctttaggccagagtttatattgggagtcatttatatgggtatagttatccacccacatggctgatcttcagtctccagtccctctagtggtcacattgatactgtctggcccaatgtcagacataatggaattatttgcatagattttctggccccaaggcttctaggtaaacagacactgttatcagggaggatattctaagggcttagaggttacctccagagtaagggtcatcctttctttggattgtgcaggatgtgaacaatctgctgagctgatcctttactatacagtttcattggggccacctataattcttaacttaaaaaactatttcattcaa

SEQ ID NO: 340452 - DNA, 550 bp, Homo sapiens
catacatgattaaagtgagaacaaacatgtgtttgcaaatgcttcaagttcctaaagaagacttcgcaaaagaattgagactttaactggtattaaatatttaaaggcaaaaagcaacagagaaagtgcactttaagcagctaagtaacaaaccaaaacagagcacagatgggagaagaatgaggaaggtaaaaatctagaacgttagattgaggtcaggagcagaaagccagaagtggacattagccagttggtagtgcgggacttctaagaattgtaaacaggaaagttattatgaaagacacattttaggacttatcacgttagagtgatattattctaaatttttttttaggaggattcatctggcgactcagcaggttagtgaagaaaaagttagaagaatattaccctaaatcacggtcaggtgataagggtctgcattatgacagctggaactgaagtgaatgacataaatgtgagcaccacaaaggaagtctcatcggggcttggctgaatataaagagagggaggaattaaaatgtgttct

SEQ ID NO: 340453 - DNA, 639 bp, Homo sapiens
tacaggcatgagccaccacgcccagccgatttaatttttaaaaagagactttccaagaagctttttaaaaagatttaactcaaaaagcaaggatatttttctactagtagtttcagaaagtgctaaaattgcaatgccttatgaagtttcaggttaattgatctggttcccccccacatctgtgcacaggattccagttaaaatatgtaaatcagcaagatcctctggttgcaaagatctagaatgattctgttaatacagtccttcccgctgtttgcatgtgtagccaccgtttctagactatactgttaataccttttttttctttttataactatgccttaaacttgcaatctgccacaagtgagctcaagaaaagaaaacttgtcacatgtattgttttcccatagcccacagctatgctgatttgtttgaagttgtgaattctttggtctggaaagcaaaactttcgctattctatttgtggttgtccttcattattctatctgtattctaactgtctggctagtaagctgtcacttttcgttgcacatgttccgtgtgttattttgacagaactcattcatactacttgctttcatcagtttcattattgcaaaattgaaaagttgggccctg

SEQ ID NO: 340454 - DNA, 947 bp, Homo sapiens
cgcgcagtcccgcgagcctggcctcggcggccccagcttctaaggagctcgtgagggccaggctgcgcctgcgtcgggcggctggtgggcggggcgagggccgctggggccgcgaagtggggcggccgggtgggctacaagccgggtctgggctgaggggcgcggcttcgcggtggaccccagcccggcaacgggaaggcgagctctcctccaccgtccaaagtaaactttgccgctccttccgcggcgctcccgagtcctcgccgccgccgggccgccgcagtccgcgaagagccgtcctgcgtcagggcctccttccctgccccggcgcggggccactgcgccatggacgccacagcactggagcgggacgctgtgcagttcgcccgtctggcggttcagcgcgaccacgaaggccgctactccgaggcggtgttttattacaaggaagctgcacaagccttaatttatgctgagatggcaggatcaagcctagaaaatattcaagaaaaaataactgagtatctggaaagagttcaagctctacattcagcagttcagtcaaagagtgctgatcctttgaagtcaaaacatcagttggacttagagcgtgctcatttccttgttacacaagcttttgatgaagatgaaaaagagaatgttgaagatgctatagaattgtacacagaagctgtggatctctgtctgaaaacatcttatgaaactgctgataaagtcctgcaaaataaactgaaacagttggctcgacaggcactagacagagccagaagcgctgggtgagcctttggaccaaggcaggtgggcaaaattcaggttcacccagtgttaaagccaaagtcccctccagagagagcccatttttcactggggcgcaaatcccttcttggaaagaccctcgcgcctctttagttctcaaggcatgttga

SEQ ID NO: 340455 - DNA, 1174 bp, Homo sapiens
cgcgcagtcccgcgagcctggcctcggcggccccagcttctaaggagctcgtgagggccaggctgcgcctgcgtcgggcggctggtgggcggggcgagggccgctggggccgcgaagtggggcggccgggtgggctacaagccgggtctgggctgaggggcgcggcttcgcggtggaccccagcccggcaacgggaaggcgagctctcctccaccgtccaaagtaaactttgccgctccttccgcggcgctcccgagtcctcgccgccgccgggccgccgcagtccgcgaagagccgtcctgcgtcagggcctccttccctgccccggcgcggggccactgcgccatggacgccacagcactggagcgggacgctgtgcagttcgcccgtctggcggttcagcgcgaccacgaaggccgctactccgaggcggtgttttattacaagttcagtcaaagagtgctgatcctttgaagtcaaaacatcagttggacttagagcgtgctcatttccttgttacacaagcttttgatgaagatgaaaaagagaatgttgaagatgctatagaattgtacacagaagctgtggatctctgtctgaaaacatcttatgaaactgctgataaagtcctgcaaaataaactgaaacagttggctcgacaggcactagacagagcagaagcgctgagtgagcctttgaccaagccagttggcaaaatcagttcaacaagtgttaagccaaagccacctccagtgagagcacattttccactgggcgctaatcccttccttgaaagacctcagtcatttataagtcctcagtcatgtgatgcacaaggacagagatacacagcagaagaaatagaagtactcaggacaacatcaaaaataaatggtatagaatatgttcctttcatgaatgttgacctgagagaacgttttgcctatccaatgcctttctgtgatagatggggcaagctaccattatcacctaaacaaaaaactacattttccaagtgggtacgaccagaagacctcaccaacaatcctacaatgatatatactgtgtccagttttagcataaagcagacaatagtatcggattgctcctttgtggcatcactggccatcagtgcagcttatgaaagacgttttaataagaagttaattaccgg

SEQ ID NO: 340456 - DNA, 1404 bp, Homo sapiens
cgcgcagtcccgcgagcctggcctcggcggccccagcttctaaggagctcgtgagggccaggctgcgcctgcgtcgggcggctggtgggcggggcgagggccgctggggccgcgaagtggggcggccgggtgggctacaagccgggtctgggctgaggggcgcggcttcgcggtggaccccagcccggcaacgggaaggcgagctctcctccaccgtccaaagtaaactttgccgctccttccgcggcgctcccgagtcctcgccgccgccgggccgccgcagtccgcgaagagccgtcctgcgtcagggcctccttccctgccccggcgcggggccactgcgccatggacgccacagcactggagcgggacgctgtgcagttcgcccgtctggcggttcagcgcgaccacgaaggccgctactccgaggcggtgttttattacaaggttcagtgaaacaactcctgctcaaacaactggattcaaaaagtgatgttcagtagatggcatctttggaaacaggcatgatgacccatgaagtgtacacgcttgggttactgcagagaaggaagctgcacaagccttaatttatgctgagatggcaggatcaagcctagaaaatattcaagaaaaaataactgagtatctggaaagagttcaagctctacattcagcagttcagtcaaagagtgctgatcctttgaagtcaaaacatcagttggacttagagcgtgctcatttccttgttacacaagcttttgatgaagatgaaaaagagaatgttgaagatgctatagaattgtacacagaagctgtggatctctgtctgaaaacatcttatgaaactgctgataaagtcctgcaaaataaactgaaacagttggctcgacaggcactagacagagcagaagcgctgagtgagcctttgaccaagccagttggcaaaatcagttcaacaagtgttaagccaaagccacctccagtgagagcacattttccactgggcgctaatcccttccttgaaagacctcagtcatttataagtcctcagtcatgtgatgcacaaggacagagatacacagcagaagaaatagaagtactcaggacaacatcaaaaataaatggtatagaatatgttcctttcatgaatgttgacctgagagaacgttttgcctatccaatgcctttctgtgatagatggggcaagctaccattatcacctaaacaaaaaactacattttccaagtgggtacgaccagaagacctcaccaacaatcctacaatgatatatactgtgtccagttttagcataaagcagacaatagtatcggattgctcctttgtggcatcactggccatcagtgcagcttatgaaagacgttttaataagaagttaattaccgg

SEQ ID NO: 340457 - DNA, 758 bp, Homo sapiens
tggtaagtcattaatcactttaagctatttccaaaaataattcctttaatagagttgttttaagaattaagtggattatgtatgtaaagcactttagcatgatgcctggcacatggttagtattcactaaattagctacactcattattagccttgccaagtggagtttgtaaaaaaccagctttgaatctttagcttcctaggtccttttgaatgaatcagcttgtactattgttaatggtttcattttattgctgaatttcttgaatacagttatgctaaatttaaaaaattatattcttaaatataaatgaatttaagttgttcttctgttttcaattatttaggtatattttttaattggaggggatgatcaggttgactggactctataaagagccagatttgaccagaaggttattttaagataatacagtactgctataatcactagaccaaaaaaaaaatctctaggaaatttaattttggctttgagtcatcttttaagattaatttttttattttaatttttattattacctcagtgatagatggggcaagctaccattatcacctaaacaaaaaactacattttccaagtgggtacgaccagaagacctcaccaacaatcctacaatgatatatactgtgtccagttttagcataaagcagacaatagtatcggattgctcctttgtggcatcactggccatcagtgcagcttatgaaagacgttttaataagaagttaattaccgg

SEQ ID NO: 340458 - DNA, 1283 bp, Homo sapiens
cgcgcagtcccgcgagcctggcctcggcggccccagcttctaaggagctcgtgagggccaggctgcgcctgcgtcgggcggctggtgggcggggcgagggccgctggggccgcgaagtggggcggccgggtgggctacaagccgggtctgggctgaggggcgcggcttcgcggtggaccccagcccggcaacgggaaggcgagctctcctccaccgtccaaagtaaactttgccgctccttccgcggcgctcccgagtcctcgccgccgccgggccgccgcagtccgcgaagagccgtcctgcgtcagggcctccttccctgccccggcgcggggccactgcgccatggacgccacagcactggagcgggacgctgtgcagttcgcccgtctggcggttcagcgcgaccacgaaggccgctactccgaggcggtgttttattacaaggaagctgcacaagccttaatttatgctgagatggcaggatcaagcctagaaaatattcaagaaaaaataactgagtatctggaaagagttcaagctctacattcagcagttcagtcaaagagtgctgatcctttgaagtcaaaacatcagttggacttagagcgtgctcatttccttgttacacaagcttttgatgaagatgaaaaagagaatgttgaagatgctatagaattgtacacagaagctgtggatctctgtctgaaaacatcttatgaaactgctgataaagtcctgcaaaataaactgaaacagttggctcgacaggcactagacagagcagaagcgctgagtgagcctttgaccaagccagttggcaaaatcagttcaacaagtgttaagccaaagccacctccagtgagagcacattttccactgggcgctaatcccttccttgaaagacctcagtcatttataagtcctcagtcatgtgatgcacaaggacagagatacacagcagaagaaatagaagtactcaggacaacatcaaaaataaatggtatagaatatgttcctttcatgaatgttgacctgagagaacgttttgcctatccaatgcctttctgtgatagatggggcaagctaccattatcacctaaacaaaaaactacattttccaagtgggtacgaccagaagacctcaccaacaatcctacaatgatatatactgtgtccagttttagcataaagcagacaatagtatcggattgctcctttgtggcatcactggccatcagtgcagcttatgaaagacgttttaataagaagttaattaccgg

SEQ ID NO: 340459 - DNA, 120 bp, Homo sapiens
tggaggctatctgagaccttctcagagagggctgctacttgagctcacctttgggaacggatggggcataccagcagaagacaagtgctggagaaaacacaaggcctggggagctagcca

SEQ ID NO: 340460 - DNA, 655 bp, Homo sapiens
tgattttctccagaaaactggttcagcagaaaccaagacactgccaacagccctccggcgtcctgccaaccgggctgttagagtctttatgtgggtaggtacaagttgccttgcttagcttccaaacttatttttgccctcttgtctggctcctaaaatgctggatccaggggcctggagagttggttttgtctctggttattgtttagtggcacacaaggtactgactgaaaacaagggcgtttttgtacatcccttttacccacatgcactcttggggaggtcagtgatggttggaagtccctgctggcaccgtctctgccatagcattgggggagcactttagttgtccgtttttccaggctaatccattccttaatgacttaagttgacatttgttgaattatggagtacgagttcgctagcactgctataacaaagtaccacaaactgggtggcttgaagaatctcagtgtatggtctcagctctggagaccagctgtctgagatcaaggtgtcttcagggttggttccttccaagggttgtgaggaaaagctggtcctgtgcttctctcctggctcctggaggtttgctggtaatctgtggcattccttggtttatagatacattgcctctgtctctgcggtcatcttc

SEQ ID NO: 340461 - DNA, 592 bp, Homo sapiens
atcatttcaaggattcatgtcatatcctcttgtgttaggatctcagaagcaggagttccatgggcccacatttcttggtttattccctttctttattggattctaccttttagtagcttcctgaaaagcgtgcatgggaatgaaatttgagtctctactaatctaaaaatgtttttttttttgtactttcaagcttcttttataacttaacccagcagaattctaggttgaaaattacatttctaagggctttgtttcatcctttttcagcctccaatgttcttgctgtcaagaaatccagtatgctggatgccatacctgtttttctttagaagcttttaggatcttctcctgatctctgatgttcagacagaaacttcacaatgtggctaggtatgagtccctttacatttgtagtacttgctgggtacactgctcggactctgaaatgttgttataatttttgaatattaagaaagaagtgtttcttttctctttctggaacatttattatttagatatttagctcctggagtgatctatctgttttgctcttgattcatttgttctattttttttttttttttttttt

SEQ ID NO: 340462 - DNA, 946 bp, Homo sapiens
ataaggctccgatattcgacctatccatgtgctgggtaggtaaggcacctgctggacatgggttcccgggccagatgagaacacttagaccaggtgaaagtacttgggtcatgtgactgtagccagctcaggtaaaggtattatggttcaggtgagggtgtacaagtcaggtaaataggagtatctggatcatgagaggaagtgagcgggtgtgtatctgaactctatgagtttgtacaggaaggcaggtgagggtgtacctggtagaagggtgaatgtgcaagccggttgagctggcctgcggtcagagttctctgggtctagtggggatacctgtctcagtgaaaacatttaaggtgatggtatacaggtcacctgagagggcatacctgccacacagacctgtccaaagcaggtgggtggatcaggtgaaggtacccaataatgtgtgtctggtatgtgaagttgtacagatcatgtgaggaggcacctgccacataaacttgtccaaggtaggtgagggtgtccaggccatatgagactatccatccaggtaaagatggtatataggtgatctcagtgtgtacctgccacacataggcctctctaaggtgagggtagggtgagttactgggctaggtgactctctgggacatgagatatgggtcaagtgagtgtgtacctggcccgcccaggtacaggtgacggtaaacaggccaagtctgggtgtacctgtggacaggagagtccaggctaggtgattagagtacacgtaggttcagggctgtctggggcagaagaggatgtgtctgttggtggaggtgcccagctgtctatgccaagcatgaatgcacgggtcaggtgatgtatccctgtagagagcatgtacctatggactaggctgcctgggccaggtgagagtgtacctgtggacaggtgtgtctgg

SEQ ID NO: 340463 - DNA, 319 bp, Homo sapiens
actctgtctcaaaaaaacaaaaaagaaaaacaaaaaagaaacgaggtcagatgggaatgtgttggttggttggttggctagaaaagggtgtttgggtcagtgaacaggtgctgggtaggtaaggcacctgctggacatgggttcccgggccagatgagaacacttagaccaggtgaaagtacttgggtcatgtgactgtagccagctcaggtaaaggtattatggttcaggtgagggtgtacaagtcaggtaaataggagtatctggatcatgagaggaagtgagcgggtgtgtatctgaactctatgagtttgtacag

SEQ ID NO: 340464 - DNA, 210 bp, Homo sapiens
gtgatcaccaggaaggaagaaaggaagatgtttacagtaagtgggagaccagcatgagtctgcagtctccctcagaccaagtccacaacagtttacccctcagagggggcttacacagtcaaactggagagaagtagaagcatgcttgaaggaatatgaacagctagtccttcagataagaaagattcaccaataaattctaattaccat

SEQ ID NO: 340465 - DNA, 598 bp, Homo sapiens
tcattttgaggaatactggagagaggctccttttttcctagcagccaaattgttttgagactattgctgtgacctggagacatgagatatatttactgactcatcttgcacaagtactacaacaatgtgggttaaatacaattctctagattctagccaccatttacatcacttttcacccggaagaatgtattgtgtctttcaaatatctgacttataagatgacttttgcaatatcatcttttgtaaattgagggtggcctgtaacttggttgccttagcaacaaattggactgaatgttaacagttgagtccagatgttcattccaggcagacaagaaaacacagcctggtccactttgaaatgcactcatcagtactgcccacatcagtgtttgacatggttctcagatgcctcatgttgtctttaacccaactcggagccatgggcattacccgtgccagattacattttttctttttactaaagagacagcaatgtggagtaaaactgatcattgatttttaaggcaaaactattccagtgtctaattcagggacatcatttaaaaaatcatatgggacttccatatgactt

SEQ ID NO: 340466 - DNA, 435 bp, Homo sapiens
ctccctcattagacactcatttgagcagtaccacctctatttcctgcagcgtcctaggaatagatctgctgtgctggttaccactggcactggtagggctgcatttgcattttaccagttatgtcatggccaaaagttgccttcaggctctgctccttgagatttggcattgatgttgggattttgctggaggccttctgcccactcccaagcataggcagctctgtaagagtcctcagccttttattttatccagtgttctgggtgtagttcatagtctttgaatttttgttttgcctttgggtgccatgcttccttagtttcaagtggtgatacatgtttctctcaatcccatttttcacccttcattttgatgacgttgttaaagggacaagtttaatgtgtggtttttttgttttgttttgttttggtttt

SEQ ID NO: 340467 - DNA, 281 bp, Homo sapiens
ctgtgaatccttagacgattcactctgagtccctgggatcagcctcgggccttccagggtgtgcggaggtcatgcatgaagtgtggctcagccagctctggcctttctctcactcttggccctctcagactctctattccacttgtcattctctgagcactccctacattgtttcctgattacgtgcctttgctcactctggcttgtacttttgctgggcatcagcccttcctgccccaccttcctcttttgtgtctgttctgtgtcagttaactgtgtat

SEQ ID NO: 340468 - DNA, 229 bp, Homo sapiens
acacacacacacacacacacacgcaaccatttcagacactgcatcttaaaatttgtggaccaaagatttttcactttttacctagtgactgttactagcattctgaatagcagagaaacaggaagattttatagaaaactttaaaatgattttctttaaaggtaaacctcagcattaattacctgcaagtgcagaatctcatgcctcttttatttagttagcttttttt

SEQ ID NO: 340469 - DNA, 349 bp, Homo sapiens
tccatttcaaaaaaaaaaaaaccagtaaaagggtaacatatataaaaagttcactacagtccccaacatgggttactatttaatcagtagcagataatgttattaggcaatgagtaacaggcttctgaggatggctaacttaacaatgttggatagagaggagacacctgagggagcgaaagcaggctattgtgataccaagcaaaaagtaatagcaaaggagaaaaaaggaaataatcattgaaactaggatgggagctggtgctaggatgaatgagaagagagggagggatgaatgaatgactacacagacagaaaacaggggctgttaactgagaggaagagaaag

SEQ ID NO: 340470 - DNA, 276 bp, Homo sapiens
ggcagtactaaatgagcacactgaatcatagcagctaagagaataccatgtccaaaagcaggctgaatttctgggacagagctcatcagtttcttcttttattctgcccattattggttctacctgcccatgctctttgctttcattatgcagaatcaacactgggaaagcctaagtcctgcacctctgccagaggctcaaagggccaagtcaaataccctgtgaaaagccctataggcacctgatcacagggaacacacaaagatgcagggcagt

SEQ ID NO: 340471 - DNA, 511 bp, Homo sapiens
cccctggggtagatcccagccccccatgtaggtcccttggctggaaaaggaagaaggagtggtcagatgaatctgaggaggagccggagaaggagctcgcccctgagcctgaggagacctgggtagtggagatgctgtgtgggctcaagatgaagctgaagcaacagcgagtgtcacccatcctccctgagcaccacaaggacttcaacagtcagcttgaggatcctgtcattaaaagattcctggcctgggacaaagatctgagggtgtcggacaagtatctcctggctatggtcatagcgtatttcagccgggccggcctcccctcctggcaataccaacgcattcatttcttcctggctctctacctggccaatgacatggaggaggacgacgaggaccccaaacaaaacatcttctacttcctgtatgggaagacccgctctcgcatacccttggtccgtaaccgtcggttccagttatgccgttgcttgaacccgagggccaggaa

SEQ ID NO: 340472 - DNA, 425 bp, Homo sapiens
cccctggggtagatcccagccccccatgtaggtcccttggctggaaaaggaagaaggagtggtcagatgaatctgaggaggagccggagaaggagctcgcccctgagcctgaggagacctgggtagtggagatgctgtgtgggctcaagatgaagctgaagcaacagcgagtgtcacccatcctccctgagcaccacaaggacttcaacagtcagcttgggaggaggacaccccagagagcacctccaatcctgttctttctaaaaagaggaaacttccaataaccacacttttccaatgggaaagatacgcccccagtgggtgagctctccacgcaggaggactcagaagtgatcactcatgagggacacttaggacacgatagaggactaggctagacttgataaaggttggcacttgggatg

SEQ ID NO: 340473 - DNA, 986 bp, Homo sapiens
ggctgaggcaggaggagcacttcagcccaggaggttgaggctgcagtgagtcgtgatcacaccactgcactccagcctgggtgacacagtgagattctgtctcaaaataataacaataaatatctataaaataaagataatgatatctttattttatagataagaaaaatgaggcactgaaaaaattaagtagtttgagttttcacaggtaggaaaatgacagagctatgatttgaataaggcagttcggtgctagaatccatgtacttaaccacaatgcctgaagcataattctgaactgggcaatcaaaaggggatcacccacatttcactgtgtgaagcatgaattgcctgatagaggaaattttttttggttctaaattcagggagaaggctgttaagcccaggcctctgtgggggatgggagttctttgttctgtgatgcaatgatgacctcagggtaaactgccagaaggctaagggaaatggaatggctgctggaggacctgcttggggctaagggggatatggggcttctctggggccaactgacccatgccctagcctgcagacactgcggcagcagctgcttccagagtccaggaaatctggtgacactattcttattcgtggtttggcagattcagagatggtggcagcttgggaggttgcgacagcttcatccctggtgctctgggaatatggtgcaaggcaaggtgggtgacctgtgactgtacagctggatgaatgacgagcagaagtttaccacataaagatggtaaggagggaatttctgggcagagggaacagcatgtacagagaggcccagaggactgggaaagtgtgctgaattaagagaggtgcataacactagtccatatgttagctgtcgtgtatggcagaaggcgagacaagcctggggagattagcaggggcctgttatgaagatacttcattgctgcactgttgaactttaggatcaggaa

SEQ ID NO: 340474 - DNA, 1553 bp, Homo sapiens
ggctgaggcaggaggagcacttcagcccaggaggttgaggctgcagtgagtcgtgatcacaccactgcactccagcctgggtgacacagtgagattctgtctcaaaataataacaataaatatctataaaataaagataatgatatctttattttatagataagaaaaatgaggcactgaaaaaattaagtagtttgagttttcacaggtaggaaaatgacagagctatgatttgaataaggcagttcggtgctagaatccatgtacttaaccacaatgcctgaagcataattctgaactgggcaatcaaaaggggatcacccacatttcactgtgtgaagcatgaattgcctgatagaggaaattttttttggttctaaattcagggagaaggctgttaagcccaggcctctgtgggggatgggagttctttgttctgtgatgcaatgatgacctcagggtaaactgccagaaggctaagggaaatggaatggctgctggaggacctgcttggggctaagggggatatggggcttctctggggccaactgacccatgccctagcctgcagacactgcggcagcagctgcttccagagtccaggaaatctggtgacactattcttattcgtggtttggcagattcagagatggtggcagcttgggaggttgcgacagcttcatccctggtgctctgggaatatggtgcaaggcaaggaactaccacttctgcaccgtgtggccttccttgatcacctgtgtaagcagaaatcagaagtggaggaagaaggggaagaagaggaagagggggaagacgaggcatctctggatccactgaagccatgttctcctaccaaagaagctcccactggagagcaagccactccagccccaccccagccatcctgtggttctgagggcctcctcaaggctatagggataccagagcaaacagtcatgcagcccgtgagcccttccagatccttccccatcttccagattctgaccagctttcctgtgaggcacaagatagcatcagggaaccgccagcagcagagaaaaagccagctcttctggggtctcccctctctgcacagcgagtccttggaggccatcttcctgagctcaggtggcccctctcctctgaagttgtctgtttgttcttctgtcttcttcaacaagcttgccttcctacctaggtccaacctgttgcttccccagtatcactcctcagcccagttttctacccatggggcccatactatggaagatctagaagggatggccccgatcctcagctgcttccacctccatcttctccttctgttatggataatttgttttctcttttttcctaattgttctgttttatcaactttgttgatatttttaaagaatccatttttagacttcgttaatttttgctgttacttggattttatttcttttctctttttaatagttactattttcttctttttacttcgtattaacttagtcatctttttctagcttcccttttttagctgtaatacacggcagtgactaaatttt

SEQ ID NO: 340475 - DNA, 370 bp, Homo sapiens
ctagatgtagaatgagggaatactgatctccaaatgaggactgggtaatgaccattaacactagatgaggagctgtgtaggtgactggccacacacgtgggattaggtgagtaactgtccactctggatatggagcagactgagtgcctcatagcaaaccttgtgtatctgaaaaggcttcatgcctgagaatatctttatctacttcccaggaactaccacttctgcaccgtgtggccttccttgatcacctgtgtaagcagaaatcagaagtggaggaagaaggggaagaagaggaagagggggaagacgaggcatctctggatccactgaagccatgttctcctaccaaagaagctcccactggaga

SEQ ID NO: 340476 - DNA, 1357 bp, Homo sapiens
ggctgaggcaggaggagcacttcagcccaggaggttgaggctgcagtgagtcgtgatcacaccactgcactccagcctgggtgacacagtgagattctgtctcaaaataataacaataaatatctataaaataaagataatgatatctttattttatagataagaaaaatgaggcactgaaaaaattaagtagtttgagttttcacaggtaggaaaatgacagagctatgatttgaataaggcagttcggtgctagaatccatgtacttaaccacaatgcctgaagcataattctgaactgggcaatcaaaaggggatcacccacatttcactgtgtgaagcatgaattgcctgatagaggaaattttttttggttctaaattcagggagaaggctgttaagcccaggcctctgtgggggatgggagttctttgttctgtgatgcaatgatgacctcagggtaaactgccagaaggctaagggaaatggaatggctgctggaggacctgcttggggctaagggggatatggggcttctctggggccaactgacccatgccctagcctgcagacactgcggcagcagctgcttccagagtccaggaaatctggaactaccacttctgcaccgtgtggccttccttgatcacctgtgtaagcagaaatcagaagtggaggaagaaggggaagaagaggaagagggggaagacgaggcatctctggatccactgaagccatgttctcctaccaaagaagctcccactggagagcaagccactccagccccaccccagccatcctgtggttctgagggcctcctcaaggctatagggataccagagcaaacagtcatgcagcccgtgagcccttccagatccttccccatcttccagattctgaccagctttcctgtgaggcacaagatagcatcagggaaccgccagcagcagagaaaaagccagctcttctggggtctcccctctctgcacagcgagtccttggaggccatcttcctgagctcaggtggcccctctcctctgaagttgtctgtttgttcttctgtcttcttcaacaagcttgccttcctacctaggtccaacctgttgcttccccagtatcactcctcagcccagttttctacccatggggcccatactatggaagatctagaagggatggccccgatcctcagctgcttccacctccatcttctccttctgtctcatcactactcctccatctgaggcccttccctgtggaccacaagggagttttatctggcgctgaggcacccacacagtcccctggaactagccccctggaagttctccctggatatgagactcatttggaaacc

SEQ ID NO: 340477 - DNA, 1462 bp, Homo sapiens
ggctgaggcaggaggagcacttcagcccaggaggttgaggctgcagtgagtcgtgatcacaccactgcactccagcctgggtgacacagtgagattctgtctcaaaataataacaataaatatctataaaataaagataatgatatctttattttatagataagaaaaatgaggcactgaaaaaattaagtagtttgagttttcacaggtaggaaaatgacagagctatgatttgaataaggcagttcggtgctagaatccatgtacttaaccacaatgcctgaagcataattctgaactgggcaatcaaaaggggatcacccacatttcactgtgtgaagcatgaattgcctgatagaggaaattttttttggttctaaattcagggagaaggctgttaagcccaggcctctgtgggggatgggagttctttgttctgtgatgcaatgatgacctcagggtaaactgccagaaggctaagggaaatggaatggctgctggaggacctgcttggggctaagggggatatggggcttctctggggccaactgacccatgccctagcctgcagacactgcggcagcagctgcttccagagtccaggaaatctggtgacactattcttattcgtggtttggcagattcagagatggtggcagcttgggaggttgcgacagcttcatccctggtgctctgggaatatggtgcaaggcaaggaactaccacttctgcaccgtgtggccttccttgatcacctgtgtaagcagaaatcagaagtggaggaagaaggggaagaagaggaagagggggaagacgaggcatctctggatccactgaagccatgttctcctaccaaagaagctcccactggagagcaagccactccagccccaccccagccatcctgtggttctgagggcctcctcaaggctatagggataccagagcaaacagtcatgcagcccgtgagcccttccagatccttccccatcttccagattctgaccagctttcctgtgaggcacaagatagcatcagggaaccgccagcagcagagaaaaagccagctcttctggggtctcccctctctgcacagcgagtccttggaggccatcttcctgagctcaggtggcccctctcctctgaagttgtctgtttgttcttctgtcttcttcaacaagcttgccttcctacctaggtccaacctgttgcttccccagtatcactcctcagcccagttttctacccatggggcccatactatggaagatctagaagggatggccccgatcctcagctgcttccacctccatcttctccttctgtctcatcactactcctccatctgaggcccttccctgtggaccacaagggagttttatctggcgctgaggcacccacacagtcccctggaactagccccctggaagttctccctggatatgagactcatttggaaacc

SEQ ID NO: 340478 - DNA, 439 bp, Homo sapiens
cataaagaaatgggtaaccttggaaaggagaatattccacataagaacgttaaccttttaaaaattaagtcccggggcttcatgttaacagtgtgttaaatgtcgtttttccctcctcctttcacgttgcatgtggatgcagcagctgtgccttgagcagctactgagatcagacgcccctttcccacccagaccccagagctgccctagctttgcctctttggactggcccagttttccccaccagagtcattagtgatcattgtacttatcactctattcggggcctctcctgctacccttctcttcccactgagatctcttctcactgaccgtttccatctgttaccaaaccaatcaacattccttttccttttccaattggcaaacataaataggttttatttttattttgaaatggagtcttgttctgtcaccc

SEQ ID NO: 340479 - DNA, 112 bp, Homo sapiens
acaaatcaatgagtttagtaaaatcaggataaaagctcaatatacagaaaacaattgtatttctaaatcctaggaacaaataatccagaaatgaaattaagaaaacagtccc

SEQ ID NO: 340480 - DNA, 298 bp, Homo sapiens
agtagtagattgggggtgaggaatgaatatagtcaactataaaatagcatatctgaacagcattagtataaaaatgtagtccttcatatacctttttaatgtaacttgtttattggtaaaattaagaaggaggtgtatatagaggcttagttattatgcaacacataatcttcaagaagctgaacaagggaaatgatacaccaggtttattacaggaaagtgtatacgctacacttcatccaccattagggtgagtgtcaggctaaccagcagaatcagtggaaagacaagaacaagc

SEQ ID NO: 340481 - DNA, 464 bp, Homo sapiens
gggatgatggtatgtcagcctgaacccaaagccatctctttgagatttacccatttttcccttggtagatggggaaaccatgtatatatacaaggtatgcatgtggataaacttctatttcttttttctcttgttaatctactttttgttacaggggtagctttcaactaagaacaatgaagggtggggagaaaactaggtttcctcactgatatggtttgcctgtgtccccacccaaatcccatcttgaattgtagctcccataattcccacgtgttgttggagggacccagtgggagataactgaatcatgggggtggtttccctgttgtgaataagatctgatggttttataaggggaaactcctttcgcttggttctcattctctcttgtctgctgccatgtaagacttgccttttgccttctgccatgacggtgaggcctccccagccacttggaactg

SEQ ID NO: 340482 - DNA, 353 bp, Homo sapiens
tgttaacagtttactgtgtttactttctcttttagccaaagaaaaagaacaaaaactgttcttctcatcaatgcttgatatcgtcaatatgttttatttaaggtgctctggtcagtgtgcagggctgtttcactgtgtttttcagtcatcatttttaaacgtttgtctgataactctaatatctggccaccatgttgatctgtttctgttgttcttggctttcagtcatgtcttgttttctcacatgcctggttagttttggctgactagcagacattttatgtgaaaaattgtggaggttgagatctagatagtgtgatgtgtctctggaaaggatttacctttgcttctag

SEQ ID NO: 340483 - DNA, 172 bp, Homo sapiens
tcagaatttatcttgtatcttctttaatactaccaacaatacattttagttgaatattttctaattcaaaataattactaaatgtttgttgtttactcaaatgtcattcatattataaatagtatgggtcttggtggacaaccggaccatgaaaagcatcaaacatgcagat

SEQ ID NO: 340484 - DNA, 597 bp, Homo sapiens
ttttttaaaggctgaggctcatctgaatgtgtcctggtgggatggggaaggattatctatacctttttttcttctaatgaaaagggtgtgggcagaatggaaactgaccaagctctgctcaaggagccagggtagctgtggtttagagaggctggacgaaggtcccccttccctcgtcaacttgtctgcattttgtccccaaacaatatcatgttttcagaatctgctaacaaggccttgaagtttaaagctggttttgttatttgggcccctcccatcttcctctccttacaagggacttgatatgagacctgttaaaatcgtggaatttgcagactttaatgcaatgggccattctcatgaccggggcgatgcaaggaacaggcagtgtgctgacacgcccttctctgttttttacagctatttgccgacaaggctgcagtcctaagcatgggtcttgcaaactcccaggtgactgcaggtaaatcaactggtcttttgtgagatttcttttaattttcctttatgtaagagaggaactgactttattgtgactatgcctcttttttccttggagaacaagaaagcttttttaaa

SEQ ID NO: 340485 - DNA, 715 bp, Homo sapiens
ctcatgtaagaggtgatgttaaaggatctaattgtcagatggattgaattaaattgtcaaccccctccttttcttgttgaccagacattgatgactgttctcctaataactgttcccacgggggcacctgccaggacctggttaacggatttaagtgtgtgtgccccccacagtggactgggaaaacgtgccagttaggtaagaacatccctgtgactgtaatttttataccaaggttggctttgattgtcaaagccattacagaagacgagcgtgtggccggcagtgtgagttcacactccatcatgctaagaagtaatttattatcaagagtctagcaggcctgggagaaataacttgaatgcaaatggactagctcttttaggccctgtgggaaagtcgtgggattccttgaaccatgtcaatcgtctgtccgaggagtgttcagctgggttccaaaaggggatgatctcatgaggaatgagctgtctgcattctttttgccacatttaaatcccagcaactaggctgcctgggttttgcacagaaatgcctggtggctttctgctgttttgttgggggctggttaactagcagctggaaagttatcaattagggttcttattggataatagctagggagagggatcagatgcttaaaatagagggaacctctagtatcttttatttagctagcttattaaaatgtctcatg

SEQ ID NO: 340486 - DNA, 570 bp, Homo sapiens
ccaccggcaggttgtactccaccggcaggttgtactccaccggcaggttgtactccaccggcaggttgtactccacaggcaggtgatctgctgcagagcagtaagggaacaagttgagctatgacttaacatagccaaaatgtgagtggttgaatatgattaaaaatatcaaattaattgtgtgaacttggaagcacaccaatcttactttgtaaattctgatttcttttcaccattcgtacataatactgaaccacttgtagatttgatttttttttttaatctactgcatttagggagtattctaataagctagttgaatacttgaaccataaaatgtccagtaagatcactgtttagatttgccatagagtacaacctgccgtggagtacaacctgccggtggagtacaacctgccggtggagtacaacctgccggtggagtacaacctgccggtggagtacaacctgccggtggagtacaacctgccggtggagtacaacctgccggtggggtacaacctgccggtggagtacaacctgccggtggagtacaacctgccggtggag

SEQ ID NO: 340487 - DNA, 632 bp, Homo sapiens
gctcggtaccctgtgtccctttgtctggtgtttccctttgtctctagaacctgacagtattattgaaaaggcttctcactcgggcatgatcaaccccagccggcagtggcagacgctgaagcagaacacgggcgttgcccactttgagtatcagatccgcgtgacctgtgatgactactactatggctttggctgcaataagttctgccgccccagagatgacttctttggacactatgcctgtgaccagaatggcaacaaaacttgcatggaaggctggatgggccccgaatgtaacagaggtatgtgtgtgtgtgtgcatgtgcacgtgtgcctgttgcttttagtgtccatttatcaccccaccagcaggcaggtggcatgcggctatctcaggtggggtgggattttggctgttattctgggcctgcagtatgaagatgcggagtgtagaagatgctgttggtgccccatccagatcccctttactggcatccccatcccccaggtgctgtgttggctgccaacagctcacagctgctccttgctcaggagactcgtccttggccaaaacagtgcatgccccattcctccagctcacagtcagtgagtgacagacaaagggaacaccg

SEQ ID NO: 340488 - DNA, 5380 bp, Homo sapiens
gggaggggcgtgcccagggtgagcacgccctctcatgaatattaataagcgcgcatgcgccctgcccggcgtgctgggtagaggtggccagccccggccgctgctgccagacgggctctccgggtccttctccgagagccgggcgggcacgcgtcattgtgttacctgcggccggcccgcgagctaggctgggtttttttttttctcccctccctcccccctttttccatgcagctgatctaaaagggaataaaaggctgcgcataatcataataataaaagaaggggagcgcgagagaaggaaagaaagccgggaggtggaagaggagggggagcgtctcaaagaagcgatcagaataataaaaggaggccgggctctttgccttctggaacgggccgctcttgaaagggcttttgaaaagtggtgttgttttccagtcgtgcatgctccaatcggcggagtatattagagccgggacgcggcggccgcaggggcagcggcgacggcagcaccggcggcagcaccagcgcgaacagcagcggcggcgtcccgagtgcccgcggcgcgcggcgcagcgatgcgttccccacggacgcgcggccggtccgggcgccccctaagcctcctgctcgccctgctctgtgccctgcgagccaaggtgtgtggggcctcgggtcagttcgagttggagatcctgtccatgcagaacgtgaacggggagctgcagaacgggaactgctgcggcggcgcccggaacccgggagaccgcaagtgcacccgcgacgagtgtgacacatacttcaaagtgtgcctcaaggagtatcagtcccgcgtcacggccggggggccctgcagcttcggctcagggtccacgcctgtcatcgggggcaacaccttcaacctcaaggccagccgcggcaacgaccgcaaccgcatcgtgctgcctttcagtttcgcctggccgaggtcctatacgttgcttgtggaggcgtgggattccagtaatgacaccgttcaacctgacagtattattgaaaaggcttctcactcgggcatgatcaaccccagccggcagtggcagacgctgaagcagaacacgggcgttgcccactttgagtatcagatccgcgtgacctgtgatgactactactatggctttggctgcaataagttctgccgccccagagatgacttctttggacactatgcctgtgaccagaatggcaacaaaacttgcatggaaggctggatgggccccgaatgtaacagagctatttgccgacaaggctgcagtcctaagcatgggtcttgcaaactcccaggtgactgcaggtgccagtacggctggcaaggcctgtactgtgataagtgcatcccacacccgggatgcgtccacggcatctgtaatgagccctggcagtgcctctgtgagaccaactggggcggccagctctgtgacaaagatctcaattactgtgggactcatcagccgtgtctcaacgggggaacttgtagcaacacaggccctgacaaatatcagtgttcctgccctgaggggtattcaggacccaactgtgaaattggtaagtggtccaagatgaatgagagccctttgtctaatttttctgtactcagcttttaaaaaatatacttaaggacttgtttaaggaaaaaaaagtgaaaatagcttccaaagataggccttatcccaaccattctataagcctttgtaactttcaagtctctaaagttttttgggtgatgctgattcgtataggaggcagcgggagatgaaatgaccccagctctgagatgtcttggaatgtggttagagacagctcagcgagaaagatgacttcctttctttcctagacacagcagggttctatcacacgcttgcttttggtttttgaaatatgcttgcactagtggctgtggtgtgggattcggttggaggggggtgtggggaggtaacggtgtgcaggcatccctctctgactgccatcctggtttttgcagctgagcacgcctgcctctctgatccctgtcacaacagaggcagctgtaaggagacctccctgggctttgagtgtgagtgttccccaggctggaccggccccacatgctctacaaacattgatgactgttctcctaataactgttcccacgggggcacctgccaggacctggttaacggatttaagtgtgtgtgccccccacagtggactgggaaaacgtgccagttagatgcaaatgaatgtgaggccaaaccttttacaacagcggcacctgtgtggatggagacaactggtaccggtgcgaatgtgccccgggttttgctgggcccgactgcagaataaacatcaatgaatgccagtcttcaccttgtgcctttggagcgacctgtgtggatgagatcaatggctaccggtgtgtctgccctccagggcacagtggtgccaagtgccaggaagtttcagggagaccttgcatcaccatggggagtgtgataccagatggggccaaatgggatgatgactgtaatacctgccagtgcctgaatggacggatcgcctgctcaaaggtctggtgtggccctcgaccttgcctgctccacaaagggcacagcgagtgccccagcgggcagagctgcatccccatcctggacgaccagtgcttcgtccacccctgcactggtgtgggcgagtgtcggtcttccagtctccagccggtgaagacaaagtgcacctctgactcctattaccaggataactgtgcgaacatcacatttacctttaacaaggagatgatgtcaccaggtcttactacggagcacatttgcagtgaattgaggaatttgaatattttgaagaatgtttccgctgaatattcaatctacatcgcttgcgagccttccccttcagcgaacaatgaaatacatgtggccatttctgctgaagatatacgggatgatgggaacccgatcaaggaaatcactgacaaaataatcgatcttgttagtaaacgtgatggaaacagctcgctgattgctgccgttgcagaagtaagagttcagaggcggcctctgaagaacagaacagatttccttgttcccttgctgagctctgtcttaactgtggcttggatctgttgcttggtgacggccttctactggtgcctgcggaagcggcggaagccgggcagccacacacactcagcctctgaggacaacaccaccaacaacgtgcgggagcagctgaaccagatcaaaaaccccattgagaaacatggggccaacacggtccccatcaaggattacgagaacaagaactccaaaatgtctaaaataaggacacacaattctgaagtagaagaggacgacatggacaaacaccagcagaaagcccggtttgccaagcagccggcgtacacgctggtagacagagaagagaagccccccaacggcacgccgacaaaacacccaaactggacaaacaaacaggacaacagagacttggaaagtgcccagagcttaaaccgaatggagtacatcgtatagcagaccgcgggcactgccgccgctaggtagagtctgagggcttgtagttctttaaactgtcgtgtcatactcgagtctgaggccgttgctgacttagaatccctgtgttaatttaagttttgacaagctggcttacactggcaatggtagtttctgtggttggctgggaaatcgagtgccgcatctcacagctatgcaaaaagctagtcaacagtaccctggttgtgtgtccccttgcagccgacacggtctcggatcaggctcccaggagcctgcccagccccctggtctttgagctcccacttctgccagatgtcctaatggtgatgcagtcttagatcatagttttatttatatttattgactcttgagttgtttttgtatattggttttatgatgacgtacaagtagttctgtatttgaaagtgcctttgcagctcagaaccacagcaacgatcacaaatgactttattatttattttttttaattgtatttttgttgttgggggaggggagactttgatgtcagcagttgctggtaaaatgaagaatttaaagaaaaaaatgtcaaaagtagaactttgtatagttatgtaaataattcttttttattaatcactgtgtatatttgatttattaacttaataatcaagagccttaaaacatcattcctttttatttatatgtatgtgtttagaattgaaggtttttgatagcattgtaagcgtatggctttatttttttgaactcttctcattacttgttgcctataagccaaaattaaggtgtttgaaaatagtttattttaaaacaataggatgggcttctgtgcccagaatactgatggaatttttttgtacgacgtcagatgtttaaaacaccttctatagcatcacttaaaacacgttttaaggactgactgaggcagtttgaggattagtttagaacaggtttttttgtttgtttgttttttgtttttctgctttagacttgaaaagagacaggcaggtgatctgctgcagagcagtaagggaacaagttgagctatgacttaacatagccaaaatgtgagtggttgaatatgattaaaaatatcaaattaattgtgtgaacttggaagcacaccaatcttactttgtaaattctgatttcttttcaccattcgtacataatactgaaccacttgtagatttgatttttttttttaatctactgcatttagggagtattctaataagctagttgaatacttgaaccataaaatgtccagtaagatcactgtttagatttgccatagagtacactgcctgccttaagtgaggaaatcaaagtgctattacgaagttcaagatcaaaaaggcttataaaacagagtaatcttgttggttcaccattgagaccgtgaagatactttgtattgtcctattagtgttatatgaacatacaaatgcatctttgatgtgttgttcttggcaataaattttgaaaagtaatatttattaaatttttttgtatgaaaacatggaacagtgtggcctcttctgagcttacgtagttctaccggctttgccgtgtgcttctgccaccctgctgagtctgttctggtaatcggggtataataggctctgcctgacagagggatggaggaagaactgaaaggcttttcaaccacaaaactcatctggagttctcaaagacctggggctgctgtgaagctggaactgcgggagccccatctaggggagccttgattcccttgttattcaacagcaagtgtgaatactgcttgaataaacaccactggattaatggccagtagt

SEQ ID NO: 340489 - DNA, 5525 bp, Homo sapiens
tatatcgtcgacccacgctgttcgtgtggattcctagtaatgacaccgttcaacctgacagtattattgaaaaggcttctcactcgggcatgatcaaccccagccggcagtggcagacgctgaagcagaacacgggcgttgcccactttgagtatcagatccgcgtgacctgtgatgactactactatggctttggctgcaataagttctgccgccccagagatgacttctttggacactatgcctgtgaccagaatggcaacaaaacttgcatggaaggctggatgggccccgaatgtaacagagctatttgccgacaaggctgcagtcctaagcatgggtcttgcaaactcccaggtgactgcaggtgccagtacggctggcaaggcctgtactgtgataagtgcatcccacacccgggatgcgtccacggcatctgtaatgagccctggcagtgcctctgtgagaccaactggggcggccagctctgtgacaaagatctcaattactgtgggactcatcagccgtgtctcaacgggggaacttgtagcaacacaggccctgacaaatatcagtgttcctgccctgaggggtattcaggacccaactgtgaaattggtaagtggtccaagatgaatgagagccctttgtctaatttttctgtactcagcttttaaaaaatatacttaaggacttgtttaaggaaaaaaaagtgaaaatagcttccaaagataggccttatcccaaccattctataagcctttgtaactttcaagtctctaaagttttttgggtgatgctgattcgtataggaggcagcgggagatgaaatgaccccagctctgagatgtcttggaatgtggttagagacagctcagcgagaaagatgacttcctttctttcctagacacagcagggttctatcacacgcttgcttttggtttttgaaatatgcttgcactagtggctgtggtgtgggattcggttggaggggggtgtggggaggtaacggtgtgcaggcatccctctctgactgccatcctggtttttgcagctgagcacgcctgcctctctgatccctgtcacaacagaggcagctgtaaggagacctccctgggctttgagtgtgagtgttccccaggctggaccggccccacatgctctacaaacattgatgactgttctcctaataactgttcccacgggggcacctgccaggacctggttaacggatttaagtgtgtgtgccccccacagtggactgggaaaacgtgccagttagatgcaaatgaatgtgaggccaaaccttgtgtaaacgccaaatcctgtaagaatctcattgccagctactactgcgactgtcttcccggctggatgggtcagaattgtgacataaatattaatgactgccttggccagtgtcagaatgacgcctcctgtcgggatttggttaatggttatcgctgtatctgtccacctggctatgcaggcgatcactgtgagagagacatcgatgaatgtgccagcaacccctgtttgaatgggggtcactgtcagaatgaaatcaacagattccagtgtctgtgtcccactggtttctctggaaacctctgtcagctggacatcgattattgtgagcctaatccctgccagaacggtgcccagtgctacaaccgtgccagtgactatttctgcaagtgccccgaggactatgagggcaagaactgctcacacctgaaagaccactgccgcacgaccccctgtgaagtgattgacagctgcacagtggccatggcttccaacgacacacctgaaggggtgcggtatatttcctccaacgtctgtggtcctcacgggaagtgcaagagtcagtcgggaggcaaattcacctgtgactgtaacaaaggcttcacgggaacatactgccatgaaaatattaatgactgtgagagcaacccttgtagaaacggtggcacttgcatcgatggtgtcaactcctacaagtgcatctgtagtgacggctgggagggggcctactgtgaaaccaatattaatgactgcagccagaacccctgccacaatgggggcacgtgtcgcgacctggtcaatgacttctactgtgactgtaaaaatgggtggaaaggaaagacctgccactcacgtgacagtcagtgtgatgaggccacgtgcaacaacggtggcacctgctatgatgagggggatgcttttaagtgcatgtgtcctggcggctgggaaggaacaacctgtaacatagcccgaaacagtagctgcctgcccaacccctgccataatgggggcacatgtgtggtcaacggcgagtcctttacgtgcgtctgcaaggaaggctgggaggggcccatctgtgctcagaataccaatgactgcagccctcatccctgttacaacagcggcacctgtgtggatggagacaactggtaccggtgcgaatgtgccccgggttttgctgggcccgactgcagaataaacatcaatgaatgccagtcttcaccttgtgcctttggagcgacctgtgtggatgagatcaatggctaccggtgtgtctgccctccagggcacagtggtgccaagtgccaggaagtttcagggagaccttgcatcaccatggggagtgtgataccagatggggccaaatgggatgatgactgtaatacctgccagtgcctgaatggacggatcgcctgctcaaaggtctggtgtggccctcgaccttgcctgctccacaaagggcacagcgagtgccccagcgggcagagctgcatccccatcctggacgaccagtgcttcgtccacccctgcactggtgtgggcgagtgtcggtcttccagtctccagccggtgaagacaaagtgcacctctgactcctattaccaggataactgtgcgaacatcacatttacctttaacaaggagatgatgtcaccaggtcttactacggagcacatttgcagtgaattgaggaatttgaatattttgaagaatgtttccgctgaatattcaatctacatcgcttgcgagccttccccttcagcgaacaatgaaatacatgtggccatttctgctgaagatatacgggatgatgggaacccgatcaaggaaatcactgacaaaataatcgatcttgttagtaaacgtgatggaaacagctcgctgattgctgccgttgcagaagtaagagttcagaggcggcctctgaagaacagaacagatttccttgttcccttgctgagctctgtcttaactgtggcttggatctgttgcttggtgacggccttctactggtgcctgcggaagcggcggaagccgggcagccacacacactcagcctctgaggacaacaccaccaacaacgtgcgggagcagctgaaccagatcaaaaaccccattgagaaacatggggccaacacggtccccatcaaggattacgagaacaagaactccaaaatgtctaaaataaggacacacaattctgaagtagaagaggacgacatggacaaacaccagcagaaagcccggtttgccaagcagccggcgtacacgctggtagacagagaagagaagccccccaacggcacgccgacaaaacacccaaactggacaaacaaacaggacaacagagacttggaaagtgcccagagcttaaaccgaatggagtacatcgtatagcagaccgcgggcactgccgccgctaggtagagtctgagggcttgtagttctttaaactgtcgtgtcatactcgagtctgaggccgttgctgacttagaatccctgtgttaatttaagttttgacaagctggcttacactggcaatggtagtttctgtggttggctgggaaatcgagtgccgcatctcacagctatgcaaaaagctagtcaacagtaccctggttgtgtgtccccttgcagccgacacggtctcggatcaggctcccaggagcctgcccagccccctggtctttgagctcccacttctgccagatgtcctaatggtgatgcagtcttagatcatagttttatttatatttattgactcttgagttgtttttgtatattggttttatgatgacgtacaagtagttctgtatttgaaagtgcctttgcagctcagaaccacagcaacgatcacaaatgactttattatttattttttttaattgtatttttgttgttgggggaggggagactttgatgtcagcagttgctggtaaaatgaagaatttaaagaaaaaaatgtcaaaagtagaactttgtatagttatgtaaataattcttttttattaatcactgtgtatatttgatttattaacttaataatcaagagccttaaaacatcattcctttttatttatatgtatgtgtttagaattgaaggtttttgatagcattgtaagcgtatggctttatttttttgaactcttctcattacttgttgcctataagccaaaattaaggtgtttgaaaatagtttattttaaaacaataggatgggcttctgtgcccagaatactgatggaatttttttgtacgacgtcagatgtttaaaacaccttctatagcatcacttaaaacacgttttaaggactgactgaggcagtttgaggattagtttagaacaggtttttttgtttgtttgttttttgtttttctgctttagacttgaaaagagacaggcaggtgatctgctgcagagcagtaagggaacaagttgagctatgacttaacatagccaaaatgtgagtggttgaatatgattaaaaatatcaaattaattgtgtgaacttggaagcacaccaatcttactttgtaaattctgatttcttttcaccattcgtacataatactgaaccacttgtagatttgatttttttttttaatctactgcatttagggagtattctaataagctagttgaatacttgaaccataaaatgtccagtaagatcactgtttagatttgccatagagtacactgcctgccttaagtgaggaaatcaaagtgctattacgaagttcaagatcaaaaaggcttataaaacagagtaatcttgttggttcaccattgagaccgtgaagatactttgtattgtcctattagtgttatatgaacatacaaatgcatctttgatgtgttgttcttggcaataaattttgaaaagtaatatttattaaatttttttgtatgaaaacatggaacagtgtggcctcttctgagcttacgtagttctaccggctttgccgtgtgcttctgccaccctgctgagtctgttctggtaatcggggtataataggctctgcctgacagagggatggaggaagaactgaaaggcttttcaaccacaaaactcatctggagttctcaaagacctggggctgctgtgaagctggaactgcgggagccccatctaggggagccttgattcccttgttattcaacagcaagtgtgaatactgcttgaataaacaccactggattaatggccagtagt

SEQ ID NO: 340490 - DNA, 5282 bp, Homo sapiens
gtctaccttcctgtccccagaaacaaaacagaaaaagcctggactttgcagtcttccatttgaattgtacaggtgtctcttaacgttcaaaaggctaacctggaggtgtgctgtgtgtctccaggtgccagtacggctggcaaggcctgtactgtgataagtgcatcccacacccgggatgcgtccacggcatctgtaatgagccctggcagtgcctctgtgagaccaactggggcggccagctctgtgacaaagatctcaattactgtgggactcatcagccgtgtctcaacgggggaacttgtagcaacacaggccctgacaaatatcagtgttcctgccctgaggggtattcaggacccaactgtgaaattggtaagtggtccaagatgaatgagagccctttgtctaatttttctgtactcagcttttaaaaaatatacttaaggacttgtttaaggaaaaaaaagtgaaaatagcttccaaagataggccttatcccaaccattctataagcctttgtaactttcaagtctctaaagttttttgggtgatgctgattcgtataggaggcagcgggagatgaaatgaccccagctctgagatgtcttggaatgtggttagagacagctcagcgagaaagatgacttcctttctttcctagacacagcagggttctatcacacgcttgcttttggtttttgaaatatgcttgcactagtggctgtggtgtgggattcggttggaggggggtgtggggaggtaacggtgtgcaggcatccctctctgactgccatcctggtttttgcagctgagcacgcctgcctctctgatccctgtcacaacagaggcagctgtaaggagacctccctgggctttgagtgtgagtgttccccaggctggaccggccccacatgctctacaaacattgatgactgttctcctaataactgttcccacgggggcacctgccaggacctggttaacggatttaagtgtgtgtgccccccacagtggactgggaaaacgtgccagttagatgcaaatgaatgtgaggccaaaccttgtgtaaacgccaaatcctgtaagaatctcattgccagctactactgcgactgtcttcccggctggatgggtcagaattgtgacataaatattaatgactgccttggccagtgtcagaatgacgcctcctgtcgggatttggttaatggttatcgctgtatctgtccacctggctatgcaggcgatcactgtgagagagacatcgatgaatgtgccagcaacccctgtttgaatgggggtcactgtcagaatgaaatcaacagattccagtgtctgtgtcccactggtttctctggaaacctctgtcagctggacatcgattattgtgagcctaatccctgccagaacggtgcccagtgctacaaccgtgccagtgactatttctgcaagtgccccgaggactatgagggcaagaactgctcacacctgaaagaccactgccgcacgaccccctgtgaagtgattgacagctgcacagtggccatggcttccaacgacacacctgaaggggtgcggtatatttcctccaacgtctgtggtcctcacgggaagtgcaagagtcagtcgggaggcaaattcacctgtgactgtaacaaaggcttcacgggaacatactgccatgaaaatattaatgactgtgagagcaacccttgtagaaacggtggcacttgcatcgatggtgtcaactcctacaagtgcatctgtagtgacggctgggagggggcctactgtgaaaccaatattaatgactgcagccagaacccctgccacaatgggggcacgtgtcgcgacctggtcaatgacttctactgtgactgtaaaaatgggtggaaaggaaagacctgccactcacgtgacagtcagtgtgatgaggccacgtgcaacaacggtggcacctgctatgatgagggggatgcttttaagtgcatgtgtcctggcggctgggaaggaacaacctgtaacatagcccgaaacagtagctgcctgcccaacccctgccataatgggggcacatgtgtggtcaacggcgagtcctttacgtgcgtctgcaaggaaggctgggaggggcccatctgtgctcagaataccaatgactgcagccctcatccctgttacaacagcggcacctgtgtggatggagacaactggtaccggtgcgaatgtgccccgggttttgctgggcccgactgcagaataaacatcaatgaatgccagtcttcaccttgtgcctttggagcgacctgtgtggatgagatcaatggctaccggtgtgtctgccctccagggcacagtggtgccaagtgccaggaagtttcagggagaccttgcatcaccatggggagtgtgataccagatggggccaaatgggatgatgactgtaatacctgccagtgcctgaatggacggatcgcctgctcaaaggtctggtgtggccctcgaccttgcctgctccacaaagggcacagcgagtgccccagcgggcagagctgcatccccatcctggacgaccagtgcttcgtccacccctgcactggtgtgggcgagtgtcggtcttccagtctccagccggtgaagacaaagtgcacctctgactcctattaccaggataactgtgcgaacatcacatttacctttaacaaggagatgatgtcaccaggtcttactacggagcacatttgcagtgaattgaggaatttgaatattttgaagaatgtttccgctgaatattcaatctacatcgcttgcgagccttccccttcagcgaacaatgaaatacatgtggccatttctgctgaagatatacgggatgatgggaacccgatcaaggaaatcactgacaaaataatcgatcttgttagtaaacgtgatggaaacagctcgctgattgctgccgttgcagaagtaagagttcagaggcggcctctgaagaacagaacagatttccttgttcccttgctgagctctgtcttaactgtggcttggatctgttgcttggtgacggccttctactggtgcctgcggaagcggcggaagccgggcagccacacacactcagcctctgaggacaacaccaccaacaacgtgcgggagcagctgaaccagatcaaaaaccccattgagaaacatggggccaacacggtccccatcaaggattacgagaacaagaactccaaaatgtctaaaataaggacacacaattctgaagtagaagaggacgacatggacaaacaccagcagaaagcccggtttgccaagcagccggcgtacacgctggtagacagagaagagaagccccccaacggcacgccgacaaaacacccaaactggacaaacaaacaggacaacagagacttggaaagtgcccagagcttaaaccgaatggagtacatcgtatagcagaccgcgggcactgccgccgctaggtagagtctgagggcttgtagttctttaaactgtcgtgtcatactcgagtctgaggccgttgctgacttagaatccctgtgttaatttaagttttgacaagctggcttacactggcaatggtagtttctgtggttggctgggaaatcgagtgccgcatctcacagctatgcaaaaagctagtcaacagtaccctggttgtgtgtccccttgcagccgacacggtctcggatcaggctcccaggagcctgcccagccccctggtctttgagctcccacttctgccagatgtcctaatggtgatgcagtcttagatcatagttttatttatatttattgactcttgagttgtttttgtatattggttttatgatgacgtacaagtagttctgtatttgaaagtgcctttgcagctcagaaccacagcaacgatcacaaatgactttattatttattttttttaattgtatttttgttgttgggggaggggagactttgatgtcagcagttgctggtaaaatgaagaatttaaagaaaaaaatgtcaaaagtagaactttgtatagttatgtaaataattcttttttattaatcactgtgtatatttgatttattaacttaataatcaagagccttaaaacatcattcctttttatttatatgtatgtgtttagaattgaaggtttttgatagcattgtaagcgtatggctttatttttttgaactcttctcattacttgttgcctataagccaaaattaaggtgtttgaaaatagtttattttaaaacaataggatgggcttctgtgcccagaatactgatggaatttttttgtacgacgtcagatgtttaaaacaccttctatagcatcacttaaaacacgttttaaggactgactgaggcagtttgaggattagtttagaacaggtttttttgtttgtttgttttttgtttttctgctttagacttgaaaagagacaggcaggtgatctgctgcagagcagtaagggaacaagttgagctatgacttaacatagccaaaatgtgagtggttgaatatgattaaaaatatcaaattaattgtgtgaacttggaagcacaccaatcttactttgtaaattctgatttcttttcaccattcgtacataatactgaaccacttgtagatttgatttttttttttaatctactgcatttagggagtattctaataagctagttgaatacttgaaccataaaatgtccagtaagatcactgtttagatttgccatagagtacactgcctgccttaagtgaggaaatcaaagtgctattacgaagttcaagatcaaaaaggcttataaaacagagtaatcttgttggttcaccattgagaccgtgaagatactttgtattgtcctattagtgttatatgaacatacaaatgcatctttgatgtgttgttcttggcaataaattttgaaaagtaatatttattaaatttttttgtatgaaaacatggaacagtgtggcctcttctgagcttacgtagttctaccggctttgccgtgtgcttctgccaccctgctgagtctgttctggtaatcggggtataataggctctgcctgacagagggatggaggaagaactgaaaggcttttcaaccacaaaactcatctggagttctcaaagacctggggctgctgtgaagctggaactgcgggagccccatctaggggagccttgattcccttgttattcaacagcaagtgtgaatactgcttgaataaacaccactggattaatggccagtagt

SEQ ID NO: 340491 - DNA, 3874 bp, Homo sapiens
ctaggttgggtgattcctcttttctgtaggagtttcttccccactttcacctagtaccggtgactaaatgcccatgtgagggcattaagtgggtaaggcactctctggaagcttctgcttgataagccgcctgtctaatttgagaaacagccctgatggagggtagcaggtggaggtgccaggtgcattgtgtcaggagggagccatgaaaactgctgaacagtgcttgtctatggcttcacaagtccttcagttctttttttgctttactttgtttcatagatattaatgactgtgagagcaacccttgtagaaacggtggcacttgcatcgatggtgtcaactcctacaagtgcatctgtagtgacggctgggagggggcctactgtgaaaccaatattaatgactgcagccagaacccctgccacaatgggggcacgtgtcgcgacctggtcaatgacttctactgtgactgtaaaaatgggtggaaaggaaagacctgccactcacgtgacagtcagtgtgatgaggccacgtgcaacaacggtggcacctgctatgatgagggggatgcttttaagtgcatgtgtcctggcggctgggaaggaacaacctgtaacatagcccgaaacagtagctgcctgcccaacccctgccataatgggggcacatgtgtggtcaacggcgagtcctttacgtgcgtctgcaaggaaggctgggaggggcccatctgtgctcagaataccaatgactgcagccctcatccctgttacaacagcggcacctgtgtggatggagacaactggtaccggtgcgaatgtgccccgggttttgctgggcccgactgcagaataaacatcaatgaatgccagtcttcaccttgtgcctttggagcgacctgtgtggatgagatcaatggctaccggtgtgtctgccctccagggcacagtggtgccaagtgccaggaagtttcagggagaccttgcatcaccatggggagtgtgataccagatggggccaaatgggatgatgactgtaatacctgccagtgcctgaatggacggatcgcctgctcaaaggtctggtgtggccctcgaccttgcctgctccacaaagggcacagcgagtgccccagcgggcagagctgcatccccatcctggacgaccagtgcttcgtccacccctgcactggtgtgggcgagtgtcggtcttccagtctccagccggtgaagacaaagtgcacctctgactcctattaccaggataactgtgcgaacatcacatttacctttaacaaggagatgatgtcaccaggtcttactacggagcacatttgcagtgaattgaggaatttgaatattttgaagaatgtttccgctgaatattcaatctacatcgcttgcgagccttccccttcagcgaacaatgaaatacatgtggccatttctgctgaagatatacgggatgatgggaacccgatcaaggaaatcactgacaaaataatcgatcttgttagtaaacgtgatggaaacagctcgctgattgctgccgttgcagaagtaagagttcagaggcggcctctgaagaacagaacagatttccttgttcccttgctgagctctgtcttaactgtggcttggatctgttgcttggtgacggccttctactggtgcctgcggaagcggcggaagccgggcagccacacacactcagcctctgaggacaacaccaccaacaacgtgcgggagcagctgaaccagatcaaaaaccccattgagaaacatggggccaacacggtccccatcaaggattacgagaacaagaactccaaaatgtctaaaataaggacacacaattctgaagtagaagaggacgacatggacaaacaccagcagaaagcccggtttgccaagcagccggcgtacacgctggtagacagagaagagaagccccccaacggcacgccgacaaaacacccaaactggacaaacaaacaggacaacagagacttggaaagtgcccagagcttaaaccgaatggagtacatcgtatagcagaccgcgggcactgccgccgctaggtagagtctgagggcttgtagttctttaaactgtcgtgtcatactcgagtctgaggccgttgctgacttagaatccctgtgttaatttaagttttgacaagctggcttacactggcaatggtagtttctgtggttggctgggaaatcgagtgccgcatctcacagctatgcaaaaagctagtcaacagtaccctggttgtgtgtccccttgcagccgacacggtctcggatcaggctcccaggagcctgcccagccccctggtctttgagctcccacttctgccagatgtcctaatggtgatgcagtcttagatcatagttttatttatatttattgactcttgagttgtttttgtatattggttttatgatgacgtacaagtagttctgtatttgaaagtgcctttgcagctcagaaccacagcaacgatcacaaatgactttattatttattttttttaattgtatttttgttgttgggggaggggagactttgatgtcagcagttgctggtaaaatgaagaatttaaagaaaaaaatgtcaaaagtagaactttgtatagttatgtaaataattcttttttattaatcactgtgtatatttgatttattaacttaataatcaagagccttaaaacatcattcctttttatttatatgtatgtgtttagaattgaaggtttttgatagcattgtaagcgtatggctttatttttttgaactcttctcattacttgttgcctataagccaaaattaaggtgtttgaaaatagtttattttaaaacaataggatgggcttctgtgcccagaatactgatggaatttttttgtacgacgtcagatgtttaaaacaccttctatagcatcacttaaaacacgttttaaggactgactgaggcagtttgaggattagtttagaacaggtttttttgtttgtttgttttttgtttttctgctttagacttgaaaagagacaggcaggtgatctgctgcagagcagtaagggaacaagttgagctatgacttaacatagccaaaatgtgagtggttgaatatgattaaaaatatcaaattaattgtgtgaacttggaagcacaccaatcttactttgtaaattctgatttcttttcaccattcgtacataatactgaaccacttgtagatttgatttttttttttaatctactgcatttagggagtattctaataagctagttgaatacttgaaccataaaatgtccagtaagatcactgtttagatttgccatagagtacactgcctgccttaagtgaggaaatcaaagtgctattacgaagttcaagatcaaaaaggcttataaaacagagtaatcttgttggttcaccattgagaccgtgaagatactttgtattgtcctattagtgttatatgaacatacaaatgcatctttgatgtgttgttcttggcaataaattttgaaaagtaatatttattaaatttttttgtatgaaaacatggaacagtgtggcctcttctgagcttacgtagttctaccggctttgccgtgtgcttctgccaccctgctgagtctgttctggtaatcggggtataataggctctgcctgacagagggatggaggaagaactgaaaggcttttcaaccacaaaactcatctggagttctcaaagacctggggctgctgtgaagctggaactgcgggagccccatctaggggagccttgattcccttgttattcaacagcaagtgtgaatactgcttgaataaacaccactggattaatggccagtagt

SEQ ID NO: 340492 - DNA, 3152 bp, Homo sapiens
  misc_feature (23)..(23): n is a, c, g, or t
ctgcaggtgactctccaggattnttcatatcagcgctttcatccctgttacaacagcggcacctgtgtggatggagacaactggtaccggtgcgaatgtgccccgggttttgctgggcccgactgcagaataaacatcaatgaatgccagtcttcaccttgtgcctttggagcgacctgtgtggatgagatcaatggctaccggtgtgtctgccctccagggcacagtggtgccaagtgccaggaagtttcagggagaccttgcatcaccatggggagtgtgataccagatggggccaaatgggatgatgactgtaatacctgccagtgcctgaatggacggatcgcctgctcaaaggtctggtgtggccctcgaccttgcctgctccacaaagggcacagcgagtgccccagcgggcagagctgcatccccatcctggacgaccagtgcttcgtccacccctgcactggtgtgggcgagtgtcggtcttccagtctccagccggtgaagacaaagtgcacctctgactcctattaccaggataactgtgcgaacatcacatttacctttaacaaggagatgatgtcaccaggtcttactacggagcacatttgcagtgaattgaggaatttgaatattttgaagaatgtttccgctgaatattcaatctacatcgcttgcgagccttccccttcagcgaacaatgaaatacatgtggccatttctgctgaagatatacgggatgatgggaacccgatcaaggaaatcactgacaaaataatcgatcttgttagtaaacgtgatggaaacagctcgctgattgctgccgttgcagaagtaagagttcagaggcggcctctgaagaacagaacagatttccttgttcccttgctgagctctgtcttaactgtggcttggatctgttgcttggtgacggccttctactggtgcctgcggaagcggcggaagccgggcagccacacacactcagcctctgaggacaacaccaccaacaacgtgcgggagcagctgaaccagatcaaaaaccccattgagaaacatggggccaacacggtccccatcaaggattacgagaacaagaactccaaaatgtctaaaataaggacacacaattctgaagtagaagaggacgacatggacaaacaccagcagaaagcccggtttgccaagcagccggcgtacacgctggtagacagagaagagaagccccccaacggcacgccgacaaaacacccaaactggacaaacaaacaggacaacagagacttggaaagtgcccagagcttaaaccgaatggagtacatcgtatagcagaccgcgggcactgccgccgctaggtagagtctgagggcttgtagttctttaaactgtcgtgtcatactcgagtctgaggccgttgctgacttagaatccctgtgttaatttaagttttgacaagctggcttacactggcaatggtagtttctgtggttggctgggaaatcgagtgccgcatctcacagctatgcaaaaagctagtcaacagtaccctggttgtgtgtccccttgcagccgacacggtctcggatcaggctcccaggagcctgcccagccccctggtctttgagctcccacttctgccagatgtcctaatggtgatgcagtcttagatcatagttttatttatatttattgactcttgagttgtttttgtatattggttttatgatgacgtacaagtagttctgtatttgaaagtgcctttgcagctcagaaccacagcaacgatcacaaatgactttattatttattttttttaattgtatttttgttgttgggggaggggagactttgatgtcagcagttgctggtaaaatgaagaatttaaagaaaaaaatgtcaaaagtagaactttgtatagttatgtaaataattcttttttattaatcactgtgtatatttgatttattaacttaataatcaagagccttaaaacatcattcctttttatttatatgtatgtgtttagaattgaaggtttttgatagcattgtaagcgtatggctttatttttttgaactcttctcattacttgttgcctataagccaaaattaaggtgtttgaaaatagtttattttaaaacaataggatgggcttctgtgcccagaatactgatggaatttttttgtacgacgtcagatgtttaaaacaccttctatagcatcacttaaaacacgttttaaggactgactgaggcagtttgaggattagtttagaacaggtttttttgtttgtttgttttttgtttttctgctttagacttgaaaagagacaggcaggtgatctgctgcagagcagtaagggaacaagttgagctatgacttaacatagccaaaatgtgagtggttgaatatgattaaaaatatcaaattaattgtgtgaacttggaagcacaccaatcttactttgtaaattctgatttcttttcaccattcgtacataatactgaaccacttgtagatttgatttttttttttaatctactgcatttagggagtattctaataagctagttgaatacttgaaccataaaatgtccagtaagatcactgtttagatttgccatagagtacactgcctgccttaagtgaggaaatcaaagtgctattacgaagttcaagatcaaaaaggcttataaaacagagtaatcttgttggttcaccattgagaccgtgaagatactttgtattgtcctattagtgttatatgaacatacaaatgcatctttgatgtgttgttcttggcaataaattttgaaaagtaatatttattaaatttttttgtatgaaaacatggaacagtgtggcctcttctgagcttacgtagttctaccggctttgccgtgtgcttctgccaccctgctgagtctgttctggtaatcggggtataataggctctgcctgacagagggatggaggaagaactgaaaggcttttcaaccacaaaactcatctggagttctcaaagacctggggctgctgtgaagctggaactgcgggagccccatctaggggagccttgattcccttgttattcaacagcaagtgtgaatactgcttgaataaacaccactggattaatggccagtagt

SEQ ID NO: 340493 - DNA, 2624 bp, Homo sapiens
aatcggatttctagttctgaaaaccaactcctgtactgagctgcctcagtagccagacttaacaagacactgctctccccatgcgaagtcaaagagcctgtaggagctgccgctccacccagtctctccagggataagagtatcaaggtctacaggggcctgatcccagcatttgcttatcaagttgtgaagtgaccatatgcaatgatgaaaagggacttgtccctgtggcccccctcttagggataaagggcaggagaaccactgttggtattcttttgttcctgcgatgatgcttttttctttctttcttggagagttaattggttttgtgcctgccttacagatttccttgttcccttgctgagctctgtcttaactgtggcttggatctgttgcttggtgacggccttctactggtgcctgcggaagcggcggaagccgggcagccacacacactcagcctctgaggacaacaccaccaacaacgtgcgggagcagctgaaccagatcaaaaaccccattgagaaacatggggccaacacggtccccatcaaggattacgagaacaagaactccaaaatgtctaaaataaggacacacaattctgaagtagaagaggacgacatggacaaacaccagcagaaagcccggtttgccaagcagccggcgtacacgctggtagacagagaagagaagccccccaacggcacgccgacaaaacacccaaactggacaaacaaacaggacaacagagacttggaaagtgcccagagcttaaaccgaatggagtacatcgtatagcagaccgcgggcactgccgccgctaggtagagtctgagggcttgtagttctttaaactgtcgtgtcatactcgagtctgaggccgttgctgacttagaatccctgtgttaatttaagttttgacaagctggcttacactggcaatggtagtttctgtggttggctgggaaatcgagtgccgcatctcacagctatgcaaaaagctagtcaacagtaccctggttgtgtgtccccttgcagccgacacggtctcggatcaggctcccaggagcctgcccagccccctggtctttgagctcccacttctgccagatgtcctaatggtgatgcagtcttagatcatagttttatttatatttattgactcttgagttgtttttgtatattggttttatgatgacgtacaagtagttctgtatttgaaagtgcctttgcagctcagaaccacagcaacgatcacaaatgactttattatttattttttttaattgtatttttgttgttgggggaggggagactttgatgtcagcagttgctggtaaaatgaagaatttaaagaaaaaaatgtcaaaagtagaactttgtatagttatgtaaataattcttttttattaatcactgtgtatatttgatttattaacttaataatcaagagccttaaaacatcattcctttttatttatatgtatgtgtttagaattgaaggtttttgatagcattgtaagcgtatggctttatttttttgaactcttctcattacttgttgcctataagccaaaattaaggtgtttgaaaatagtttattttaaaacaataggatgggcttctgtgcccagaatactgatggaatttttttgtacgacgtcagatgtttaaaacaccttctatagcatcacttaaaacacgttttaaggactgactgaggcagtttgaggattagtttagaacaggtttttttgtttgtttgttttttgtttttctgctttagacttgaaaagagacaggcaggtgatctgctgcagagcagtaagggaacaagttgagctatgacttaacatagccaaaatgtgagtggttgaatatgattaaaaatatcaaattaattgtgtgaacttggaagcacaccaatcttactttgtaaattctgatttcttttcaccattcgtacataatactgaaccacttgtagatttgatttttttttttaatctactgcatttagggagtattctaataagctagttgaatacttgaaccataaaatgtccagtaagatcactgtttagatttgccatagagtacactgcctgccttaagtgaggaaatcaaagtgctattacgaagttcaagatcaaaaaggcttataaaacagagtaatcttgttggttcaccattgagaccgtgaagatactttgtattgtcctattagtgttatatgaacatacaaatgcatctttgatgtgttgttcttggcaataaattttgaaaagtaatatttattaaatttttttgtatgaaaacatggaacagtgtggcctcttctgagcttacgtagttctaccggctttgccgtgtgcttctgccaccctgctgagtctgttctggtaatcggggtataataggctctgcctgacagagggatggaggaagaactgaaaggcttttcaaccacaaaactcatctggagttctcaaagacctggggctgctgtgaagctggaactgcgggagccccatctaggggagccttgattcccttgttattcaacagcaagtgtgaatactgcttgaataaacaccactggattaatggccagtagt

SEQ ID NO: 340494 - DNA, 894 bp, Homo sapiens
ccaccggcaggttgtactccaccggcaggttgtactccaccggcaggttgtactccaccggcaggttgtactccacaggcaggtgatctgctgcagagcagtaagggaacaagttgagctatgacttaacatagccaaaatgtgagtggttgaatatgattaaaaatatcaaattaattgtgtgaacttggaagcacaccaatcttactttgtaaattctgatttcttttcaccattcgtacataatactgaaccacttgtagatttgatttttttttttaatctactgcatttagggagtattctaataagctagttgaatacttgaaccataaaatgtccagtaagatcactgtttagatttgccatagagtacactgcctgccttaagtgaggaaatcaaagtgctattacgaagttcaagatcaaaaaggcttataaaacagagtaatcttgttggttcaccattgagaccgtgaagatactttgtattgtcctattagtgttatatgaacatacaaatgcatctttgatgtgttgttcttggcaataaattttgaaaagtaatatttattaaatttttttgtatgaaaacatggaacagtgtggcctcttctgagcttacgtagttctaccggctttgccgtgtgcttctgccaccctgctgagtctgttctggtaatcggggtataataggctctgcctgacagagggatggaggaagaactgaaaggcttttcaaccacaaaactcatctggagttctcaaagacctggggctgctgtgaagctggaactgcgggagccccatctaggggagccttgattcccttgttattcaacagcaagtgtgaatactgcttgaataaacaccactggattaatggccagtagt

SEQ ID NO: 340495 - DNA, 5171 bp, Homo sapiens
gggaggggcgtgcccagggtgagcacgccctctcatgaatattaataagcgcgcatgcgccctgcccggcgtgctgggtagaggtggccagccccggccgctgctgccagacgggctctccgggtccttctccgagagccgggcgggcacgcgtcattgtgttacctgcggccggcccgcgagctaggctgggtttttttttttctcccctccctcccccctttttccatgcagctgatctaaaagggaataaaaggctgcgcataatcataataataaaagaaggggagcgcgagagaaggaaagaaagccgggaggtggaagaggagggggagcgtctcaaagaagcgatcagaataataaaaggaggccgggctctttgccttctggaacgggccgctcttgaaagggcttttgaaaagtggtgttgttttccagtcgtgcatgctccaatcggcggagtatattagagccgggacgcggcggccgcaggggcagcggcgacggcagcaccggcggcagcaccagcgcgaacagcagcggcggcgtcccgagtgcccgcggcgcgcggcgcagcgatgcgttccccacggacgcgcggccggtccgggcgccccctaagcctcctgctcgccctgctctgtgccctgcgagccaaggtgtgtggggcctcgggtcagttcgagttggagatcctgtccatgcagaacgtgaacggggagctgcagaacgggaactgctgcggcggcgcccggaacccgggagaccgcaagtgcacccgcgacgagtgtgacacatacttcaaagtgtgcctcaaggagtatcagtcccgcgtcacggccggggggccctgcagcttcggctcagggtccacgcctgtcatcgggggcaacaccttcaacctcaaggccagccgcggcaacgaccgcaaccgcatcgtgctgcctttcagtttcgcctggccgaggtcctatacgttgcttgtggaggcgtgggattccagtaatgacaccgttcaacctgacagtattattgaaaaggcttctcactcgggcatgatcaaccccagccggcagtggcagacgctgaagcagaacacgggcgttgcccactttgagtatcagatccgcgtgacctgtgatgactactactatggctttggctgcaataagttctgccgccccagagatgacttctttggacactatgcctgtgaccagaatggcaacaaaacttgcatggaaggctggatgggccccgaatgtaacagagctatttgccgacaaggctgcagtcctaagcatgggtcttgcaaactcccaggtgactgcaggtgccagtacggctggcaaggcctgtactgtgataagtgcatcccacacccgggatgcgtccacggcatctgtaatgagccctggcagtgcctctgtgagaccaactggggcggccagctctgtgacaaagatctcaattactgtgggactcatcagccgtgtctcaacgggggaacttgtagcaacacaggccctgacaaatatcagtgttcctgccctgaggggtattcaggacccaactgtgaaattggtaagtggtccaagatgaatgagagccctttgtctaatttttctgtactcagcttttaaaaaatatacttaaggacttgtttaaggaaaaaaaagtgaaaatagcttccaaagataggccttatcccaaccattctataagcctttgtaactttcaagtctctaaagttttttgggtgatgctgattcgtataggaggcagcgggagatgaaatgaccccagctctgagatgtcttggaatgtggttagagacagctcagcgagaaagatgacttcctttctttcctagacacagcagggttctatcacacgcttgcttttggtttttgaaatatgcttgcactagtggctgtggtgtgggattcggttggaggggggtgtggggaggtaacggtgtgcaggcatccctctctgactgccatcctggtttttgcagctgagcacgcctgcctctctgatccctgtcacaacagaggcagctgtaaggagacctccctgggctttgagtgtgagtgttccccaggctggaccggccccacatgctctacaaacattgatgactgttctcctaataactgttcccacgggggcacctgccaggacctggttaacggatttaagtgtgtgtgccccccacagtggactgggaaaacgtgccagttagatgcaaatgaatgtgaggccaaaccttgtgtaaacgccaaatcctgtaagaatctcattgccagctactactgcgactgtcttcccggctggatgggtcagaattgtgacataaatattaatgactgccttggccagtgtcagaatgacgcctcctgtcgggatttggttaatggttatcgctgtatctgtccacctggctatgcaggcgatcactgtgagagagacatcgatgaatgtgccagcaacccctgtttgaatgggggtcactgtcagaatgaaatcaacagattccagtgtctgtgtcccactggtttctctggaaacctctgtcagctggacatcgattattgtgagcctaatccctgccagaacggtgcccagtgctacaaccgtgccagtgactatttctgcaagtgccccgaggactatgagggcaagaactgctcacacctgaaagaccactgccgcacgaccccctgtgaagtgattgacagctgcacagtggccatggcttccaacgacacacctgaaggggtgcggtatatttcctccaacgtctgtggtcctcacgggaagtgcaagagtcagtcgggaggcaaattcacctgtgactgtaacaaaggcttcacgggaacatactgccatgaaaatattaatgactgtgagagcaacccttgtagaaacggtggcacttgcatcgatggtgtcaactcctacaagtgcatctgtagtgacggctgggagggggcctactgtgaaaccaatattaatgactgcagccagaacccctgccacaatgggggcacgtgtcgcgacctggtcaatgacttctactgtgactgtaaaaatgggtggaaaggaaagacctgccactcacgtgacagtcagtgtgatgaggccacgtgcaacaacggtggcacctgctatgatgagggggatgcttttaagtgcatgtgtcctggcggctgggaaggaacaacctgtaacatagcccgaaacagtagctgcctgcccaacccctgccataatgggggcacatgtgtggtcaacggcgagtcctttacgtgcgtctgcaaggaaggctgggaggggcccatctgtgctcagaataccaatgactgcagccctcatccctgttacaacagcggcacctgtgtggatggagacaactggtaccggtgcgaatgtgccccgggttttgctgggcccgactgcagaataaacatcaatgaatgccagtcttcaccttgtgcctttggagcgacctgtgtggatgagatcaatggctaccggtgtgtctgccctccagggcacagtggtgccaagtgccaggaagtttcagggagaccttgcatcaccatggggagtgtgataccagatggggccaaatgggatgatgactgtaatacctgccagtgcctgaatggacggatcgcctgctcaaaggtctggtgtggccctcgaccttgcctgctccacaaagggcacagcgagtgccccagcgggcagagctgcatccccatcctggacgaccagtgcttcgtccacccctgcactggtgtgggcgagtgtcggtcttccagtctccagccggtgaagacaaagtgcacctctgactcctattaccaggataactgtgcgaacatcacatttacctttaacaaggagatgatgtcaccaggtcttactacggagcacatttgcagtgaattgaggaatttgaatattttgaagaatgtttccgctgaatattcaatctacatcgcttgcgagccttccccttcagcgaacaatgaaatacatgtggccatttctgctgaagatatacgggatgatgggaacccgatcaaggaaatcactgacaaaataatcgatcttgttagtaaacgtgatggaaacagctcgctgattgctgccgttgcagaagtaagagttcagaggcggcctctgaagaacagaacagatttccttgttcccttgctgagctctgtcttaactgtggcttggatctgttgcttggtgacggccttctactggtgcctgcggaagcggcggaagccgggcagccacacacactcagcctctgaggacaacaccaccaacaacgtgcgggagcagctgaaccagatcaaaaaccccattgagaaacatggggccaacacggtccccatcaaggattacgagaacaagaactccaaaatgtctaaaataaggacacacaattctgaagtagaagaggacgacatggacaaacaccagcagaaagcccggtttgccaagcagccggcgtacacgctggtagacagagaagagaagccccccaacggcacgccgacaaaacacccaaactggacaaacaaacaggacaacagagacttggaaagtgcccagagcttaaaccgaatggagtacatcgtatagcagaccgcgggcactgccgccgctaggtagagtctgagggcttgtagttctttaaactgtcgtgtcatactcgagtctgaggccgttgctgacttagaatccctgtgttaatttaagttttgacaagctggcttacactggcaatggtagtttctgtggttggctgggaaatcgagtgccgcatctcacagctatgcaaaaagctagtcaacagtaccctggttgtgtgtccccttgcagccgacacggtctcggatcaggctcccaggagcctgcccagccccctggtctttgagctcccacttctgcctgacagagggatggaggaagaactgaaaggcttttcaaccacaaaactcatctggagttctcaaagacctggggctgctgtgaagctggaactgcgggagccccatctaggggagccttgattcccttgttattcaacagcaagtgtgaatactgcttgaataaacaccactggattaatggccagtagt

SEQ ID NO: 340496 - DNA, 5076 bp, Homo sapiens
gggaggggcgtgcccagggtgagcacgccctctcatgaatattaataagcgcgcatgcgccctgcccggcgtgctgggtagaggtggccagccccggccgctgctgccagacgggctctccgggtccttctccgagagccgggcgggcacgcgtcattgtgttacctgcggccggcccgcgagctaggctgggtttttttttttctcccctccctcccccctttttccatgcagctgatctaaaagggaataaaaggctgcgcataatcataataataaaagaaggggagcgcgagagaaggaaagaaagccgggaggtggaagaggagggggagcgtctcaaagaagcgatcagaataataaaaggaggccgggctctttgccttctggaacgggccgctcttgaaagggcttttgaaaagtggtgttgttttccagtcgtgcatgctccaatcggcggagtatattagagccgggacgcggcggccgcaggggcagcggcgacggcagcaccggcggcagcaccagcgcgaacagcagcggcggcgtcccgagtgcccgcggcgcgcggcgcagcgatgcgttccccacggacgcgcggccggtccgggcgccccctaagcctcctgctcgccctgctctgtgccctgcgagccaaggtgtgtggggcctcgggtcagttcgagttggagatcctgtccatgcagaacgtgaacggggagctgcagaacgggaactgctgcggcggcgcccggaacccgggagaccgcaagtgcacccgcgacgagtgtgacacatacttcaaagtgtgcctcaaggagtatcagtcccgcgtcacggccggggggccctgcagcttcggctcagggtccacgcctgtcatcgggggcaacaccttcaacctcaaggccagccgcggcaacgaccgcaaccgcatcgtgctgcctttcagtttcgcctggccgaggtcctatacgttgcttgtggaggcgtgggattccagtaatgacaccgttcaacctgacagtattattgaaaaggcttctcactcgggcatgatcaaccccagccggcagtggcagacgctgaagcagaacacgggcgttgcccactttgagtatcagatccgcgtgacctgtgatgactactactatggctttggctgcaataagttctgccgccccagagatgacttctttggacactatgcctgtgaccagaatggcaacaaaacttgcatggaaggctggatgggccccgaatgtaacagagctatttgccgacaaggctgcagtcctaagcatgggtcttgcaaactcccaggtgactgcaggtgccagtacggctggcaaggcctgtactgtgataagtgcatcccacacccgggatgcgtccacggcatctgtaatgagccctggcagtgcctctgtgagaccaactggggcggccagctctgtgacaaagatctcaattactgtgggactcatcagccgtgtctcaacgggggaacttgtagcaacacaggccctgacaaatatcagtgttcctgccctgaggggtattcaggacccaactgtgaaattggtaagtggtccaagatgaatgagagccctttgtctaatttttctgtactcagcttttaaaaaatatacttaaggacttgtttaaggaaaaaaaagtgaaaatagcttccaaagataggccttatcccaaccattctataagcctttgtaactttcaagtctctaaagttttttgggtgatgctgattcgtataggaggcagcgggagatgaaatgaccccagctctgagatgtcttggaatgtggttagagacagctcagcgagaaagatgacttcctttctttcctagacacagcagggttctatcacacgcttgcttttggtttttgaaatatgcttgcactagtggctgtggtgtgggattcggttggaggggggtgtggggaggtaacggtgtgcaggcatccctctctgactgccatcctggtttttgcagctgagcacgcctgcctctctgatccctgtcacaacagaggcagctgtaaggagacctccctgggctttgagtgtgagtgttccccaggctggaccggccccacatgctctacaaacattgatgactgttctcctaataactgttcccacgggggcacctgccaggacctggttaacggatttaagtgtgtgtgccccccacagtggactgggaaaacgtgccagttagatgcaaatgaatgtgaggccaaaccttgtgtaaacgccaaatcctgtaagaatctcattgccagctactactgcgactgtcttcccggctggatgggtcagaattgtgacataaatattaatgactgccttggccagtgtcagaatgacgcctcctgtcgggatttggttaatggttatcgctgtatctgtccacctggctatgcaggcgatcactgtgagagagacatcgatgaatgtgccagcaacccctgtttgaatgggggtcactgtcagaatgaaatcaacagattccagtgtctgtgtcccactggtttctctggaaacctctgtcagctggacatcgattattgtgagcctaatccctgccagaacggtgcccagtgctacaaccgtgccagtgactatttctgcaagtgccccgaggactatgagggcaagaactgctcacacctgaaagaccactgccgcacgaccccctgtgaagtgattgacagctgcacagtggccatggcttccaacgacacacctgaaggggtgcggtatatttcctccaacgtctgtggtcctcacgggaagtgcaagagtcagtcgggaggcaaattcacctgtgactgtaacaaaggcttcacgggaacatactgccatgaaaatattaatgactgtgagagcaacccttgtagaaacggtggcacttgcatcgatggtgtcaactcctacaagtgcatctgtagtgacggctgggagggggcctactgtgaaaccaatattaatgactgcagccagaacccctgccacaatgggggcacgtgtcgcgacctggtcaatgacttctactgtgactgtaaaaatgggtggaaaggaaagacctgccactcacgtgacagtcagtgtgatgaggccacgtgcaacaacggtggcacctgctatgatgagggggatgcttttaagtgcatgtgtcctggcggctgggaaggaacaacctgtaacatagcccgaaacagtagctgcctgcccaacccctgccataatgggggcacatgtgtggtcaacggcgagtcctttacgtgcgtctgcaaggaaggctgggaggggcccatctgtgctcagaataccaatgactgcagccctcatccctgttacaacagcggcacctgtgtggatggagacaactggtaccggtgcgaatgtgccccgggttttgctgggcccgactgcagaataaacatcaatgaatgccagtcttcaccttgtgcctttggagcgacctgtgtggatgagatcaatggctaccggtgtgtctgccctccagggcacagtggtgccaagtgccaggaagtttcagggagaccttgcatcaccatggggagtgtgataccagatggggccaaatgggatgatgactgtaatacctgccagtgcctgaatggacggatcgcctgctcaaaggtctggtgtggccctcgaccttgcctgctccacaaagggcacagcgagtgccccagcgggcagagctgcatccccatcctggacgaccagtgcttcgtccacccctgcactggtgtgggcgagtgtcggtcttccagtctccagccggtgaagacaaagtgcacctctgactcctattaccaggataactgtgcgaacatcacatttacctttaacaaggagatgatgtcaccaggtcttactacggagcacatttgcagtgaattgaggaatttgaatattttgaagaatgtttccgctgaatattcaatctacatcgcttgcgagccttccccttcagcgaacaatgaaatacatgtggccatttctgctgaagatatacgggatgatgggaacccgatcaaggaaatcactgacaaaataatcgatcttgttagtaaacgtgatggaaacagctcgctgattgctgccgttgcagaagtaagagttcagaggcggcctctgaagaacagaacagatttccttgttcccttgctgagctctgtcttaactgtggcttggatctgttgcttggtgacggccttctactggtgcctgcggaagcggcggaagccgggcagccacacacactcagcctctgaggacaacaccaccaacaacgtgcgggagcagctgaaccagatcaaaaaccccattgagaaacatggggccaacacggtccccatcaaggattacgagaacaagaactccaaaatgtctaaaataaggacacacaattctgaagtagaagaggacgacatggacaaacaccagcagaaagcccggtttgccaagcagccggcgtacacgctggtagacagagaagagaagccccccaacggcacgccgacaaaacacccaaactggacaaacaaacaggacaacagagacttggaaagtgcccagagcttaaaccgaatggagtacatcgtatagcagaccgcgggcactgccgccgctaggtagagtctgagggcttgtagttctttaaactgtcgtgtcatactcgagtctgaggccgttgctgacttagaatccctgtgttaatttaagttttgacaagctggcttacactggcaatggtagtttctgtggttggctgggaaatcgagtgccgcatctcacagctatgcaaaaagctagtcaacagtaccctggttgtgtgtccccttgcagccgacacggtctcggatcaggctcccaggagcctgcccagccccctggtctttgagctcccactcgttgttggtggcgttgtcctcagaggctgagtgtgtgtggctgcccggcttccgccgcttccgcaggcaccagtagaaggccgtcaccaagcaacagatc

SEQ ID NO: 340497 - DNA, 3266 bp, Homo sapiens
gggaggggcgtgcccagggtgagcacgccctctcatgaatattaataagcgcgcatgcgccctgcccggcgtgctgggtagaggtggccagccccggccgctgctgccagacgggctctccgggtccttctccgagagccgggcgggcacgcgtcattgtgttacctgcggccggcccgcgagctaggctgggtttttttttttctcccctccctcccccctttttccatgcagctgatctaaaagggaataaaaggctgcgcataatcataataataaaagaaggggagcgcgagagaaggaaagaaagccgggaggtggaagaggagggggagcgtctcaaagaagcgatcagaataataaaaggaggccgggctctttgccttctggaacgggccgctcttgaaagggcttttgaaaagtggtgttgttttccagtcgtgcatgctccaatcggcggagtatattagagccgggacgcggcggccgcaggggcagcggcgacggcagcaccggcggcagcaccagcgcgaacagcagcggcggcgtcccgagtgcccgcggcgcgcggcgcagcgatgcgttccccacggacgcgcggccggtccgggcgccccctaagcctcctgctcgccctgctctgtgccctgcgagccaaggtgtgtggggcctcgggtcagttcgagttggagatcctgtccatgcagaacgtgaacggggagctgcagaacgggaactgctgcggcggcgcccggaacccgggagaccgcaagtgcacccgcgacgagtgtgacacatacttcaaagtgtgcctcaaggagtatcagtcccgcgtcacggccggggggccctgcagcttcggctcagggtccacgcctgtcatcgggggcaacaccttcaacctcaaggccagccgcggcaacgaccgcaaccgcatcgtgctgcctttcagtttcgcctggccgaggtcctatacgttgcttgtggaggcgtgggattccagtaatgacaccgttcaacctgacagtattattgaaaaggcttctcactcgggcatgatcaaccccagccggcagtggcagacgctgaagcagaacacgggcgttgcccactttgagtatcagatccgcgtgacctgtgatgactactactatggctttggctgcaataagttctgccgccccagagatgacttctttggacactatgcctgtgaccagaatggcaacaaaacttgcatggaaggctggatgggccccgaatgtaacagagctatttgccgacaaggctgcagtcctaagcatgggtcttgcaaactcccaggtgactgcaggtgccagtacggctggcaaggcctgtactgtgataagtgcatcccacacccgggatgcgtccacggcatctgtaatgagccctggcagtgcctctgtgagaccaactggggcggccagctctgtgacaaagatctcaattactgtgggactcatcagccgtgtctcaacgggggaacttgtagcaacacaggccctgacaaatatcagtgttcctgccctgaggggtattcaggacccaactgtgaaattggtaagtggtccaagatgaatgagagccctttgtctaatttttctgtactcagcttttaaaaaatatacttaaggacttgtttaaggaaaaaaaagtgaaaatagcttccaaagataggccttatcccaaccattctataagcctttgtaactttcaagtctctaaagttttttgggtgatgctgattcgtataggaggcagcgggagatgaaatgaccccagctctgagatgtcttggaatgtggttagagacagctcagcgagaaagatgacttcctttctttcctagacacagcagggttctatcacacgcttgcttttggtttttgaaatatgcttgcactagtggctgtggtgtgggattcggttggaggggggtgtggggaggtaacggtgtgcaggcatccctctctgactgccatcctggtttttgcagctgagcacgcctgcctctctgatccctgtcacaacagaggcagctgtaaggagacctccctgggctttgagtgtgagtgttccccaggctggaccggccccacatgctctacaaacattgatgactgttctcctaataactgttcccacgggggcacctgccaggacctggttaacggatttaagtgtgtgtgccccccacagtggactgggaaaacgtgccagttagatgcaaatgaatgtgaggccaaaccttgtgtaaacgccaaatcctgtaagaatctcattgccagctactactgcgactgtcttcccggctggatgggtcagaattgtgacataaatattaatgactgccttggccagtgtcagaatgacgcctcctgtcgggatttggttaatggttatcgctgtatctgtccacctggctatgcaggcgatcactgtgagagagacatcgatgaatgtgccagcaacccctgtttgaatgggggtcactgtcagaatgaaatcaacagattccagtgtctgtgtcccactggtttctctggaaacctctgtcagctggacatcgattattgtgagcctaatccctgccagaacggtgcccagtgctacaaccgtgccagtgactatttctgcaagtgccccgaggactatgagggcaagaactgctcacacctgaaagaccactgccgcacgaccccctgtgaagtgattgacagctgcacagtggccatggcttccaacgacacacctgaaggggtgcggtatatttcctccaacgtctgtggtcctcacgggaagtgcaagagtcagtcgggaggcaaattcacctgtgactgtaacaaaggcttcacgggaacatactgccatgaaaatattaatgactgtgagagcaacccttgtagaaacggtggcacttgcatcgatggtgtcaactcctacaagtgcatctgtagtgacggctgggagggggcctactgtgaaaccagtgagtctgccactctttggggagctctgggatgtatgggtcatgttggagggatcccacttcaacgtgggaaaactttctttgtactggaaatctctggaagcaagaccgcagtgatttctgcactgggacagtatcacttgtgtctcatttgcatttatgagtcctgatgatagcttatggggaggagcttctgctgaggacctatagaattagactgtgtaataaatattcctgcttgcaaggaaagtca

SEQ ID NO: 340498 - DNA, 3778 bp, Homo sapiens
gggaggggcgtgcccagggtgagcacgccctctcatgaatattaataagcgcgcatgcgccctgcccggcgtgctgggtagaggtggccagccccggccgctgctgccagacgggctctccgggtccttctccgagagccgggcgggcacgcgtcattgtgttacctgcggccggcccgcgagctaggctgggtttttttttttctcccctccctcccccctttttccatgcagctgatctaaaagggaataaaaggctgcgcataatcataataataaaagaaggggagcgcgagagaaggaaagaaagccgggaggtggaagaggagggggagcgtctcaaagaagcgatcagaataataaaaggaggccgggctctttgccttctggaacgggccgctcttgaaagggcttttgaaaagtggtgttgttttccagtcgtgcatgctccaatcggcggagtatattagagccgggacgcggcggccgcaggggcagcggcgacggcagcaccggcggcagcaccagcgcgaacagcagcggcggcgtcccgagtgcccgcggcgcgcggcgcagcgatgcgttccccacggacgcgcggccggtccgggcgccccctaagcctcctgctcgccctgctctgtgccctgcgagccaaggtgtgtggggcctcgggtcagttcgagttggagatcctgtccatgcagaacgtgaacggggagctgcagaacgggaactgctgcggcggcgcccggaacccgggagaccgcaagtgcacccgcgacgagtgtgacacatacttcaaagtgtgcctcaaggagtatcagtcccgcgtcacggccggggggccctgcagcttcggctcagggtccacgcctgtcatcgggggcaacaccttcaacctcaaggccagccgcggcaacgaccgcaaccgcatcgtgctgcctttcagtttcgcctggccgaggtcctatacgttgcttgtggaggcgtgggattccagtaatgacaccgttcaacctgacagtattattgaaaaggcttctcactcgggcatgatcaaccccagccggcagtggcagacgctgaagcagaacacgggcgttgcccactttgagtatcagatccgcgtgacctgtgatgactactactatggctttggctgcaataagttctgccgccccagagatgacttctttggacactatgcctgtgaccagaatggcaacaaaacttgcatggaaggctggatgggccccgaatgtaacagagctatttgccgacaaggctgcagtcctaagcatgggtcttgcaaactcccaggtgactgcaggtgccagtacggctggcaaggcctgtactgtgataagtgcatcccacacccgggatgcgtccacggcatctgtaatgagccctggcagtgcctctgtgagaccaactggggcggccagctctgtgacaaagatctcaattactgtgggactcatcagccgtgtctcaacgggggaacttgtagcaacacaggccctgacaaatatcagtgttcctgccctgaggggtattcaggacccaactgtgaaattggtaagtggtccaagatgaatgagagccctttgtctaatttttctgtactcagcttttaaaaaatatacttaaggacttgtttaaggaaaaaaaagtgaaaatagcttccaaagataggccttatcccaaccattctataagcctttgtaactttcaagtctctaaagttttttgggtgatgctgattcgtataggaggcagcgggagatgaaatgaccccagctctgagatgtcttggaatgtggttagagacagctcagcgagaaagatgacttcctttctttcctagacacagcagggttctatcacacgcttgcttttggtttttgaaatatgcttgcactagtggctgtggtgtgggattcggttggaggggggtgtggggaggtaacggtgtgcaggcatccctctctgactgccatcctggtttttgcagctgagcacgcctgcctctctgatccctgtcacaacagaggcagctgtaaggagacctccctgggctttgagtgtgagtgttccccaggctggaccggccccacatgctctacaaacattgatgactgttctcctaataactgttcccacgggggcacctgccaggacctggttaacggatttaagtgtgtgtgccccccacagtggactgggaaaacgtgccagttagatgcaaatgaatgtgaggccaaaccttgtgtaaacgccaaatcctgtaagaatctcattgccagctactactgcgactgtcttcccggctggatgggtcagaattgtgacataaatattaatgactgccttggccagtgtcagaatgacgcctcctgtcgggatttggttaatggttatcgctgtatctgtccacctggctatgcaggcgatcactgtgagagagacatcgatgaatgtgccagcaacccctgtttgaatgggggtcactgtcagaatgaaatcaacagattccagtgtctgtgtcccactggtttctctggaaacctctgtcagctggacatcgattattgtgagcctaatccctgccagaacggtgcccagtgctacaaccgtgccagtgactatttctgcaagtgccccgaggactatgagggcaagaactgctcacacctgaaagaccactgccgcacgaccccctgtgaagtgattgacagctgcacagtggccatggcttccaacgacacacctgaaggggtgcggtatatttcctccaacgtctgtggtcctcacgggaagtgcaagagtcagtcgggaggcaaattcacctgtgactgtaacaaaggcttcacgggaacatactgccatgaaaatattaatgactgtgagagcaacccttgtagaaacggtggcacttgcatcgatggtgtcaactcctacaagtgcatctgtagtgacggctgggagggggcctactgtgaaaccaatattaatgactgcagccagaacccctgccacaatgggggcacgtgtcgcgacctggtcaatgacttctactgtgactgtaaaaatgggtggaaaggaaagacctgccactcacgtgacagtcagtgtgatgaggccacgtgcaacaacggtggcacctgctatgatgagggggatgcttttaagtgcatgtgtcctggcggctgggaaggaacaacctgtaacatagcccgaaacagtagctgcctgcccaacccctgccataatgggggcacatgtgtggtcaacggcgagtcctttacgtgcgtctgcaaggaaggctgggaggggcccatctgtgctcagagtgagtgtcctccccccttgaactctcccagggctgtcggagcagatcctgacacccttggggacttgcaatggaaaccagaagcagagctgtttgatgtctgcttttgtatcacctgggtctgcattaatgacttgatgggatacagccctgacctgggcatgagaaagtcgccaataagataagtggagacagatggcgtctcagttcccagctctgggtctgaccagcagcctgtctccttccattctcacccccacccctatcccctaccagggcctcttcctgtgtacatgtgtcccacagcaaatgaaactaagtgtggtgcgggcctggttccaatttagcaaaggtattttgctggtgttaactacgactttatcatttgggtattaggaaaataagtggtggttttactta

SEQ ID NO: 340499 - DNA, 2056 bp, Homo sapiens
gggaggggcgtgcccagggtgagcacgccctctcatgaatattaataagcgcgcatgcgccctgcccggcgtgctgggtagaggtggccagccccggccgctgctgccagacgggctctccgggtccttctccgagagccgggcgggcacgcgtcattgtgttacctgcggccggcccgcgagctaggctgggtttttttttttctcccctccctcccccctttttccatgcagctgatctaaaagggaataaaaggctgcgcataatcataataataaaagaaggggagcgcgagagaaggaaagaaagccgggaggtggaagaggagggggagcgtctcaaagaagcgatcagaataataaaaggaggccgggctctttgccttctggaacgggccgctcttgaaagggcttttgaaaagtggtgttgttttccagtcgtgcatgctccaatcggcggagtatattagagccgggacgcggcggccgcaggggcagcggcgacggcagcaccggcggcagcaccagcgcgaacagcagcggcggcgtcccgagtgcccgcggcgcgcggcgcagcgatgcgttccccacggacgcgcggccggtccgggcgccccctaagcctcctgctcgccctgctctgtgccctgcgagccaaggtgtgtggggcctcgggtcagttcgagttggagatcctgtccatgcagaacgtgaacggggagctgcagaacgggaactgctgcggcggcgcccggaacccgggagaccgcaagtgcacccgcgacgagtgtgacacatacttcaaagtgtgcctcaaggagtatcagtcccgcgtcacggccggggggccctgcagcttcggctcagggtccacgcctgtcatcgggggcaacaccttcaacctcaaggccagccgcggcaacgaccgcaaccgcatcgtgctgcctttcagtttcgcctggccgaggtcctatacgttgcttgtggaggcgtgggattccagtaatgacaccgttcaacctgacagtattattgaaaaggcttctcactcgggcatgatcaaccccagccggcagtggcagacgctgaagcagaacacgggcgttgcccactttgagtatcagatccgcgtgacctgtgatgactactactatggctttggctgcaataagttctgccgccccagagatgacttctttggacactatgcctgtgaccagaatggcaacaaaacttgcatggaaggctggatgggccccgaatgtaacagagctatttgccgacaaggctgcagtcctaagcatgggtcttgcaaactcccaggtgactgcaggtgccagtacggctggcaaggcctgtactgtgataagtgcatcccacacccgggatgcgtccacggcatctgtaatgagccctggcagtgcctctgtgagaccaactggggcggccagctctgtgacaaagatctcaattactgtgggactcatcagccgtgtctcaacgggggaacttgtagcaacacaggccctgacaaatatcagtgttcctgccctgaggggtattcaggacccaactgtgaaattgctgagcacgcctgcctctctgatccctgtcacaacagaggcagctgtaaggagacctccctgggctttgagtgtgagtgttccccaggctggaccggccccacatgctctacaagtaagtccaattttcagcctgtgtccattctaaggatccttgtgccaagataccacgctggggagaggtacctaggcttgtccagtgtgaatgtctcggtgagagaggggcgggtgcaggcctaagtctggtaagcagtctggtggcttgtgtgtttggaagtctcccagcacccccatcctgtcccactaaggtagcgcatgtatctgttcttggaaggaacgtcctcgtggaatcgcttgttcctttgcatctgcttcctggagctggccaccttccaattgtggttattcttcttgcagccatggagaggctgccttcaggggaggttgtcacttactactggattctgtcatag

SEQ ID NO: 340500 - DNA, 320 bp, Homo sapiens
atgcaacaaccaacagaatttttattttggcattatggttttgtttggtggggtattctgggaggccaagaatgtacgagattttggaaagtcgaccctgtttctgaattgctaaattgtttgtttgtcttgcagaggtcctatacgttgcttgtggaggcgtgggattccagtaatgacaccgttcgtaagtatcgcttctgtggacttttctctaaacacacgtggaagtgtggggcttggccaaccagttggagctggatctgtctccttagtacttagcatttctgccacctcttgccttctgttctcccctgtac

SEQ ID NO: 340501 - DNA, 490 bp, Homo sapiens
gaatggtggatgtctgcttgcttgctttaaaggaggaatgccatgagctaggatctacttctccctagcttacattcctgttttataataaagtaagcttgaacttagccagcctcaaagagaacatctcagccttttgttcttcctctcaatcttacacgtgtgtgggtttttaaaaatcgttttagggtcttactacggagcacatttgcagtgaattgaggaatttgaatattttgaagaatgtttccgctgaatattcaatctacatcgcttgcgagccttccccttcagcgaacaatgaaatacatgtggccattgtaagtataagacccattcacacctcattattcgatggcaaggcagttcggttaaccagtgtctgaatggagcaaattcactgacaaaaagctttgcagacacagattgtcgagtaattttgaagaaaggctgctttgagtattcctctgactctcaagtctgacaattg

SEQ ID NO: 340502 - DNA, 6055 bp, Homo sapiens
gggaggggcgtgcccagggtgagcacgccctctcatgaatattaataagcgcgcatgcgccctgcccggcgtgctgggtagaggtggccagccccggccgctgctgccagacgggctctccgggtccttctccgagagccgggcgggcacgcgtcattgtgttacctgcggccggcccgcgagctaggctgggtttttttttttctcccctccctcccccctttttccatgcagctgatctaaaagggaataaaaggctgcgcataatcataataataaaagaaggggagcgcgagagaaggaaagaaagccgggaggtggaagaggagggggagcgtctcaaagaagcgatcagaataataaaaggaggccgggctctttgccttctggaacgggccgctcttgaaagggcttttgaaaagtggtgttgttttccagtcgtgcatgctccaatcggcggagtatattagagccgggacgcggcggccgcaggggcagcggcgacggcagcaccggcggcagcaccagcgcgaacagcagcggcggcgtcccgagtgcccgcggcgcgcggcgcagcgatgcgttccccacggacgcgcggccggtccgggcgccccctaagcctcctgctcgccctgctctgtgccctgcgagccaaggtgtgtggggcctcgggtcagttcgagttggagatcctgtccatgcagaacgtgaacggggagctgcagaacgggaactgctgcggcggcgcccggaacccgggagaccgcaagtgcacccgcgacgagtgtgacacatacttcaaagtgtgcctcaaggagtatcagtcccgcgtcacggccggggggccctgcagcttcggctcagggtccacgcctgtcatcgggggcaacaccttcaacctcaaggccagccgcggcaacgaccgcaaccgcatcgtgctgcctttcagtttcgcctggccgaggtcctatacgttgcttgtggaggcgtgggattccagtaatgacaccgttcaacctgacagtattattgaaaaggcttctcactcgggcatgatcaaccccagccggcagtggcagacgctgaagcagaacacgggcgttgcccactttgagtatcagatccgcgtgacctgtgatgactactactatggctttggctgcaataagttctgccgccccagagatgacttctttggacactatgcctgtgaccagaatggcaacaaaacttgcatggaaggctggatgggccccgaatgtaacagagctatttgccgacaaggctgcagtcctaagcatgggtcttgcaaactcccaggtgactgcaggtgccagtacggctggcaaggcctgtactgtgataagtgcatcccacacccgggatgcgtccacggcatctgtaatgagccctggcagtgcctctgtgagaccaactggggcggccagctctgtgacaaagatctcaattactgtgggactcatcagccgtgtctcaacgggggaacttgtagcaacacaggccctgacaaatatcagtgttcctgccctgaggggtattcaggacccaactgtgaaattgctgagcacgcctgcctctctgatccctgtcacaacagaggcagctgtaaggagacctccctgggctttgagtgtgagtgttccccaggctggaccggccccacatgctctacaaacattgatgactgttctcctaataactgttcccacgggggcacctgccaggacctggttaacggatttaagtgtgtgtgccccccacagtggactgggaaaacgtgccagttagatgcaaatgaatgtgaggccaaaccttgtgtaaacgccaaatcctgtaagaatctcattgccagctactactgcgactgtcttcccggctggatgggtcagaattgtgacataaatattaatgactgccttggccagtgtcagaatgacgcctcctgtcgggatttggttaatggttatcgctgtatctgtccacctggctatgcaggcgatcactgtgagagagacatcgatgaatgtgccagcaacccctgtttgaatgggggtcactgtcagaatgaaatcaacagattccagtgtctgtgtcccactggtttctctggaaacctctgtcagctggacatcgattattgtgagcctaatccctgccagaacggtgcccagtgctacaaccgtgccagtgactatttctgcaagtgccccgaggactatgagggcaagaactgctcacacctgaaagaccactgccgcacgaccccctgtgaagtgattgacagctgcacagtggccatggcttccaacgacacacctgaaggggtgcggtatatttcctccaacgtctgtggtcctcacgggaagtgcaagagtcagtcgggaggcaaattcacctgtgactgtaacaaaggcttcacgggaacatactgccatgaaaatattaatgactgtgagagcaacccttgtagaaacggtggcacttgcatcgatggtgtcaactcctacaagtgcatctgtagtgacggctgggagggggcctactgtgaaaccaatattaatgactgcagccagaacccctgccacaatgggggcacgtgtcgcgacctggtcaatgacttctactgtgactgtaaaaatgggtggaaaggaaagacctgccactcacgtgacagtcagtgtgatgaggccacgtgcaacaacggtggcacctgctatgatgagggggatgcttttaagtgcatgtgtcctggcggctgggaaggaacaacctgtaacatagcccgaaacagtagctgcctgcccaacccctgccataatgggggcacatgtgtggtcaacggcgagtcctttacgtgcgtctgcaaggaaggctgggaggggcccatctgtgctcagaataccaatgactgcagccctcatccctgttacaacagcggcacctgtgtggatggagacaactggtaccggtgcgaatgtgccccgggttttgctgggcccgactgcagaataaacatcaatgaatgccagtcttcaccttgtgcctttggagcgacctgtgtggatgagatcaatggctaccggtgtgtctgccctccagggcacagtggtgccaagtgccaggaagtttcagggagaccttgcatcaccatggggagtgtgataccagatggggccaaatgggatgatgactgtaatacctgccagtgcctgaatggacggatcgcctgctcaaaggtctggtgtggccctcgaccttgcctgctccacaaagggcacagcgagtgccccagcgggcagagctgcatccccatcctggacgaccagtgcttcgtccacccctgcactggtgtgggcgagtgtcggtcttccagtctccagccggtgaagacaaagtgcacctctgactcctattaccaggataactgtgcgaacatcacatttacctttaacaaggagatgatgtcaccaggtcttactacggagcacatttgcagtgaattgaggaatttgaatattttgaagaatgtttccgctgaatattcaatctacatcgcttgcgagccttccccttcagcgaacaatgaaatacatgtggccatttctgctgaagatatacgggatgatgggaacccgatcaaggaaatcactgacaaaataatcgatcttgttagtaaacgtgatggaaacagctcgctgattgctgccgttgcagaagtaagagttcagaggcggcctctgaagaacagaacagatttccttgttcccttgctgagctctgtcttaactgtggcttggatctgttgcttggtgacggccttctactggtgcctgcggaagcggcggaagccgggcagccacacacactcagcctctgaggacaacaccaccaacaacgtgcgggagcagctgaaccagatcaaaaaccccattgagaaacatggggccaacacggtccccatcaaggattacgagaacaagaactccaaaatgtctaaaataaggacacacaattctgaagtagaagaggacgacatggacaaacaccagcagaaagcccggtttgccaagcagccggcgtacacgctggtagacagagaagagaagccccccaacggcacgccgacaaaacacccaaactggacaaacaaacaggacaacagagacttggaaagtgcccagagcttaaaccgaatggagtacatcgtatagcagaccgcgggcactgccgccgctaggtagagtctgagggcttgtagttctttaaactgtcgtgtcatactcgagtctgaggccgttgctgacttagaatccctgtgttaatttaagttttgacaagctggcttacactggcaatggtagtttctgtggttggctgggaaatcgagtgccgcatctcacagctatgcaaaaagctagtcaacagtaccctggttgtgtgtccccttgcagccgacacggtctcggatcaggctcccaggagcctgcccagccccctggtctttgagctcccacttctgccagatgtcctaatggtgatgcagtcttagatcatagttttatttatatttattgactcttgagttgtttttgtatattggttttatgatgacgtacaagtagttctgtatttgaaagtgcctttgcagctcagaaccacagcaacgatcacaaatgactttattatttattttttttaattgtatttttgttgttgggggaggggagactttgatgtcagcagttgctggtaaaatgaagaatttaaagaaaaaaatgtcaaaagtagaactttgtatagttatgtaaataattcttttttattaatcactgtgtatatttgatttattaacttaataatcaagagccttaaaacatcattcctttttatttatatgtatgtgtttagaattgaaggtttttgatagcattgtaagcgtatggctttatttttttgaactcttctcattacttgttgcctataagccaaaattaaggtgtttgaaaatagtttattttaaaacaataggatgggcttctgtgcccagaatactgatggaatttttttgtacgacgtcagatgtttaaaacaccttctatagcatcacttaaaacacgttttaaggactgactgaggcagtttgaggattagtttagaacaggtttttttgtttgtttgttttttgtttttctgctttagacttgaaaagagacaggcaggtgatctgctgcagagcagtaagggaacaagttgagctatgacttaacatagccaaaatgtgagtggttgaatatgattaaaaatatcaaattaattgtgtgaacttggaagcacaccaatcttactttgtaaattctgatttcttttcaccattcgtacataatactgaaccacttgtagatttgatttttttttttaatctactgcatttagggagtattctaataagctagttgaatacttgaaccataaaatgtccagtaagatcactgtttagatttgccatagagtacactgcctgccttaagtgaggaaatcaaagtgctattacgaagttcaagatcaaaaaggcttataaaacagagtaatcttgttggttcaccattgagaccgtgaagatactttgtattgtcctattagtgttatatgaacatacaaatgcatctttgatgtgttgttcttggcaataaattttgaaaagtaatatttattaaatttttttgtatgaaaacatggaacagtgtggcctcttctgagcttacgtagttctaccggctttgccgtgtgcttctgccaccctgctgagtctgttctggtaatcggggtataataggctctgcctgacagagggatggaggaagaactgaaaggcttttcaaccacaaaactcatctggagttctcaaagacctggggctgctgtgaagctggaactgcgggagccccatctaggggagccttgattcccttgttattcaacagcaagtgtgaatactgcttgaataaacaccactggattaatggccagtagt

SEQ ID NO: 340503 - DNA, 6491 bp, Homo sapiens
gggaggggcgtgcccagggtgagcacgccctctcatgaatattaataagcgcgcatgcgccctgcccggcgtgctgggtagaggtggccagccccggccgctgctgccagacgggctctccgggtccttctccgagagccgggcgggcacgcgtcattgtgttacctgcggccggcccgcgagctaggctgggtttttttttttctcccctccctcccccctttttccatgcagctgatctaaaagggaataaaaggctgcgcataatcataataataaaagaaggggagcgcgagagaaggaaagaaagccgggaggtggaagaggagggggagcgtctcaaagaagcgatcagaataataaaaggaggccgggctctttgccttctggaacgggccgctcttgaaagggcttttgaaaagtggtgttgttttccagtcgtgcatgctccaatcggcggagtatattagagccgggacgcggcggccgcaggggcagcggcgacggcagcaccggcggcagcaccagcgcgaacagcagcggcggcgtcccgagtgcccgcggcgcgcggcgcagcgatgcgttccccacggacgcgcggccggtccgggcgccccctaagcctcctgctcgccctgctctgtgccctgcgagccaaggtgtgtggggcctcgggtcagttcgagttggagatcctgtccatgcagaacgtgaacggggagctgcagaacgggaactgctgcggcggcgcccggaacccgggagaccgcaagtgcacccgcgacgagtgtgacacatacttcaaagtgtgcctcaaggagtatcagtcccgcgtcacggccggggggccctgcagcttcggctcagggtccacgcctgtcatcgggggcaacaccttcaacctcaaggccagccgcggcaacgaccgcaaccgcatcgtgctgcctttcagtttcgcctggccgaggtcctatacgttgcttgtggaggcgtgggattccagtaatgacaccgttcaacctgacagtattattgaaaaggcttctcactcgggcatgatcaaccccagccggcagtggcagacgctgaagcagaacacgggcgttgcccactttgagtatcagatccgcgtgacctgtgatgactactactatggctttggctgcaataagttctgccgccccagagatgacttctttggacactatgcctgtgaccagaatggcaacaaaacttgcatggaaggctggatgggccccgaatgtaacagagctatttgccgacaaggctgcagtcctaagcatgggtcttgcaaactcccaggtgactgcaggtgccagtacggctggcaaggcctgtactgtgataagtgcatcccacacccgggatgcgtccacggcatctgtaatgagccctggcagtgcctctgtgagaccaactggggcggccagctctgtgacaaagatctcaattactgtgggactcatcagccgtgtctcaacgggggaacttgtagcaacacaggccctgacaaatatcagtgttcctgccctgaggggtattcaggacccaactgtgaaattggtaagtggtccaagatgaatgagagccctttgtctaatttttctgtactcagcttttaaaaaatatacttaaggacttgtttaaggaaaaaaaagtgaaaatagcttccaaagataggccttatcccaaccattctataagcctttgtaactttcaagtctctaaagttttttgggtgatgctgattcgtataggaggcagcgggagatgaaatgaccccagctctgagatgtcttggaatgtggttagagacagctcagcgagaaagatgacttcctttctttcctagacacagcagggttctatcacacgcttgcttttggtttttgaaatatgcttgcactagtggctgtggtgtgggattcggttggaggggggtgtggggaggtaacggtgtgcaggcatccctctctgactgccatcctggtttttgcagctgagcacgcctgcctctctgatccctgtcacaacagaggcagctgtaaggagacctccctgggctttgagtgtgagtgttccccaggctggaccggccccacatgctctacaaacattgatgactgttctcctaataactgttcccacgggggcacctgccaggacctggttaacggatttaagtgtgtgtgccccccacagtggactgggaaaacgtgccagttagatgcaaatgaatgtgaggccaaaccttgtgtaaacgccaaatcctgtaagaatctcattgccagctactactgcgactgtcttcccggctggatgggtcagaattgtgacataaatattaatgactgccttggccagtgtcagaatgacgcctcctgtcgggatttggttaatggttatcgctgtatctgtccacctggctatgcaggcgatcactgtgagagagacatcgatgaatgtgccagcaacccctgtttgaatgggggtcactgtcagaatgaaatcaacagattccagtgtctgtgtcccactggtttctctggaaacctctgtcagctggacatcgattattgtgagcctaatccctgccagaacggtgcccagtgctacaaccgtgccagtgactatttctgcaagtgccccgaggactatgagggcaagaactgctcacacctgaaagaccactgccgcacgaccccctgtgaagtgattgacagctgcacagtggccatggcttccaacgacacacctgaaggggtgcggtatatttcctccaacgtctgtggtcctcacgggaagtgcaagagtcagtcgggaggcaaattcacctgtgactgtaacaaaggcttcacgggaacatactgccatgaaaatattaatgactgtgagagcaacccttgtagaaacggtggcacttgcatcgatggtgtcaactcctacaagtgcatctgtagtgacggctgggagggggcctactgtgaaaccaatattaatgactgcagccagaacccctgccacaatgggggcacgtgtcgcgacctggtcaatgacttctactgtgactgtaaaaatgggtggaaaggaaagacctgccactcacgtgacagtcagtgtgatgaggccacgtgcaacaacggtggcacctgctatgatgagggggatgcttttaagtgcatgtgtcctggcggctgggaaggaacaacctgtaacatagcccgaaacagtagctgcctgcccaacccctgccataatgggggcacatgtgtggtcaacggcgagtcctttacgtgcgtctgcaaggaaggctgggaggggcccatctgtgctcagaataccaatgactgcagccctcatccctgttacaacagcggcacctgtgtggatggagacaactggtaccggtgcgaatgtgccccgggttttgctgggcccgactgcagaataaacatcaatgaatgccagtcttcaccttgtgcctttggagcgacctgtgtggatgagatcaatggctaccggtgtgtctgccctccagggcacagtggtgccaagtgccaggaagtttcagggagaccttgcatcaccatggggagtgtgataccagatggggccaaatgggatgatgactgtaatacctgccagtgcctgaatggacggatcgcctgctcaaaggtctggtgtggccctcgaccttgcctgctccacaaagggcacagcgagtgccccagcgggcagagctgcatccccatcctggacgaccagtgcttcgtccacccctgcactggtgtgggcgagtgtcggtcttccagtctccagccggtgaagacaaagtgcacctctgactcctattaccaggataactgtgcgaacatcacatttacctttaacaaggagatgatgtcaccaggtcttactacggagcacatttgcagtgaattgaggaatttgaatattttgaagaatgtttccgctgaatattcaatctacatcgcttgcgagccttccccttcagcgaacaatgaaatacatgtggccatttctgctgaagatatacgggatgatgggaacccgatcaaggaaatcactgacaaaataatcgatcttgttagtaaacgtgatggaaacagctcgctgattgctgccgttgcagaagtaagagttcagaggcggcctctgaagaacagaacagatttccttgttcccttgctgagctctgtcttaactgtggcttggatctgttgcttggtgacggccttctactggtgcctgcggaagcggcggaagccgggcagccacacacactcagcctctgaggacaacaccaccaacaacgtgcgggagcagctgaaccagatcaaaaaccccattgagaaacatggggccaacacggtccccatcaaggattacgagaacaagaactccaaaatgtctaaaataaggacacacaattctgaagtagaagaggacgacatggacaaacaccagcagaaagcccggtttgccaagcagccggcgtacacgctggtagacagagaagagaagccccccaacggcacgccgacaaaacacccaaactggacaaacaaacaggacaacagagacttggaaagtgcccagagcttaaaccgaatggagtacatcgtatagcagaccgcgggcactgccgccgctaggtagagtctgagggcttgtagttctttaaactgtcgtgtcatactcgagtctgaggccgttgctgacttagaatccctgtgttaatttaagttttgacaagctggcttacactggcaatggtagtttctgtggttggctgggaaatcgagtgccgcatctcacagctatgcaaaaagctagtcaacagtaccctggttgtgtgtccccttgcagccgacacggtctcggatcaggctcccaggagcctgcccagccccctggtctttgagctcccacttctgccagatgtcctaatggtgatgcagtcttagatcatagttttatttatatttattgactcttgagttgtttttgtatattggttttatgatgacgtacaagtagttctgtatttgaaagtgcctttgcagctcagaaccacagcaacgatcacaaatgactttattatttattttttttaattgtatttttgttgttgggggaggggagactttgatgtcagcagttgctggtaaaatgaagaatttaaagaaaaaaatgtcaaaagtagaactttgtatagttatgtaaataattcttttttattaatcactgtgtatatttgatttattaacttaataatcaagagccttaaaacatcattcctttttatttatatgtatgtgtttagaattgaaggtttttgatagcattgtaagcgtatggctttatttttttgaactcttctcattacttgttgcctataagccaaaattaaggtgtttgaaaatagtttattttaaaacaataggatgggcttctgtgcccagaatactgatggaatttttttgtacgacgtcagatgtttaaaacaccttctatagcatcacttaaaacacgttttaaggactgactgaggcagtttgaggattagtttagaacaggtttttttgtttgtttgttttttgtttttctgctttagacttgaaaagagacaggcaggtgatctgctgcagagcagtaagggaacaagttgagctatgacttaacatagccaaaatgtgagtggttgaatatgattaaaaatatcaaattaattgtgtgaacttggaagcacaccaatcttactttgtaaattctgatttcttttcaccattcgtacataatactgaaccacttgtagatttgatttttttttttaatctactgcatttagggagtattctaataagctagttgaatacttgaaccataaaatgtccagtaagatcactgtttagatttgccatagagtacactgcctgccttaagtgaggaaatcaaagtgctattacgaagttcaagatcaaaaaggcttataaaacagagtaatcttgttggttcaccattgagaccgtgaagatactttgtattgtcctattagtgttatatgaacatacaaatgcatctttgatgtgttgttcttggcaataaattttgaaaagtaatatttattaaatttttttgtatgaaaacatggaacagtgtggcctcttctgagcttacgtagttctaccggctttgccgtgtgcttctgccaccctgctgagtctgttctggtaatcggggtataataggctctgcctgacagagggatggaggaagaactgaaaggcttttcaaccacaaaactcatctggagttctcaaagacctggggctgctgtgaagctggaactgcgggagccccatctaggggagccttgattcccttgttattcaacagcaagtgtgaatactgcttgaataaacaccactggattaatggccagtagt

SEQ ID NO: 340504 - DNA, 5159 bp, Homo sapiens
gggaggggcgtgcccagggtgagcacgccctctcatgaatattaataagcgcgcatgcgccctgcccggcgtgctgggtagaggtggccagccccggccgctgctgccagacgggctctccgggtccttctccgagagccgggcgggcacgcgtcattgtgttacctgcggccggcccgcgagctaggctgggtttttttttttctcccctccctcccccctttttccatgcagctgatctaaaagggaataaaaggctgcgcataatcataataataaaagaaggggagcgcgagagaaggaaagaaagccgggaggtggaagaggagggggagcgtctcaaagaagcgatcagaataataaaaggaggccgggctctttgccttctggaacgggccgctcttgaaagggcttttgaaaagtggtgttgttttccagtcgtgcatgctccaatcggcggagtatattagagccgggacgcggcggccgcaggggcagcggcgacggcagcaccggcggcagcaccagcgcgaacagcagcggcggcgtcccgagtgcccgcggcgcgcggcgcagcgatgcgttccccacggacgcgcggccggtccgggcgccccctaagcctcctgctcgccctgctctgtgccctgcgagccaaggtgtgtggggcctcgggtcagttcgagttggagatcctgtccatgcagaacgtgaacggggagctgcagaacgggaactgctgcggcggcgcccggaacccgggagaccgcaagtgcacccgcgacgagtgtgacacatacttcaaagtgtgcctcaaggagtatcagtcccgcgtcacggccggggggccctgcagcttcggctcagggtccacgcctgtcatcgggggcaacaccttcaacctcaaggccagccgcggcaacgaccgcaaccgcatcgtgctgcctttcagtttcgcctggccgaggtcctatacgttgcttgtggaggcgtgggattccagtaatgacaccgttcaacctgacagtattattgaaaaggcttctcactcgggcatgatcaaccccagccggcagtggcagacgctgaagcagaacacgggcgttgcccactttgagtatcagatccgcgtgacctgtgatgactactactatggctttggctgcaataagttctgccgccccagagatgacttctttggacactatgcctgtgaccagaatggcaacaaaacttgcatggaaggctggatgggccccgaatgtaacagagctatttgccgacaaggctgcagtcctaagcatgggtcttgcaaactcccaggtgactgcaggtgccagtacggctggcaaggcctgtactgtgataagtgcatcccacacccgggatgcgtccacggcatctgtaatgagccctggcagtgcctctgtgagaccaactggggcggccagctctgtgacaaagatctcaattactgtgggactcatcagccgtgtctcaacgggggaacttgtagcaacacaggccctgacaaatatcagtgttcctgccctgaggggtattcaggacccaactgtgaaattggtaagtggtccaagatgaatgagagccctttgtctaatttttctgtactcagcttttaaaaaatatacttaaggacttgtttaaggaaaaaaaagtgaaaatagcttccaaagataggccttatcccaaccattctataagcctttgtaactttcaagtctctaaagttttttgggtgatgctgattcgtataggaggcagcgggagatgaaatgaccccagctctgagatgtcttggaatgtggttagagacagctcagcgagaaagatgacttcctttctttcctagacacagcagggttctatcacacgcttgcttttggtttttgaaatatgcttgcactagtggctgtggtgtgggattcggttggaggggggtgtggggaggtaacggtgtgcaggcatccctctctgactgccatcctggtttttgcagctgagcacgcctgcctctctgatccctgtcacaacagaggcagctgtaaggagacctccctgggctttgagtgtgagtgttccccaggctggaccggccccacatgctctacaaacattgatgactgttctcctaataactgttcccacgggggcacctgccaggacctggttaacggatttaagtgtgtgtgccccccacagtggactgggaaaacgtgccagttagatgcaaatgaatgtgaggccaaaccttgtgtaaacgccaaatcctgtaagaatctcattgccagctactactgcgactgtcttcccggctggatgggtcagaattgtgacataaatattaatgactgccttggccagtgtcagaatgacgcctcctgtcgggatttggttaatggttatcgctgtatctgtccacctggctatgcaggcgatcactgtgagagagacatcgatgaatgtgccagcaacccctgtttgaatgggggtcactgtcagaatgaaatcaacagattccagtgtctgtgtcccactggtttctctggaaacctctgtcagctggacatcgattattgtgagcctaatccctgccagaacggtgcccagtgctacaaccgtgccagtgactatttctgcaagtgccccgaggactatgagggcaagaactgctcacacctgaaagaccactgccgcacgaccccctgtgaagtgattgacagctgcacagtggccatggcttccaacgacacacctgaaggggtgcggtatatttcctccaacgtctgtggtcctcacgggaagtgcaagagtcagtcgggaggcaaattcacctgtgactgtaacaaaggcttcacgggaacatactgccatgaaaatattaatgactgtgagagcaacccttgtagaaacggtggcacttgcatcgatggtgtcaactcctacaagtgcatctgtagtgacggctgggagggggcctactgtgaaaccaatattaatgactgcagccagaacccctgccacaatgggggcacgtgtcgcgacctggtcaatgacttctactgtgactgtaaaaatgggtggaaaggaaagacctgccactcacgtgacagtcagtgtgatgaggccacgtgcaacaacggtggcacctgctatgatgagggggatgcttttaagtgcatgtgtcctggcggctgggaaggaacaacctgtaacatagcccgaaacagtagctgcctgcccaacccctgccataatgggggcacatgtgtggtcaacggcgagtcctttacgtgcgtctgcaaggaaggctgggaggggcccatctgtgctcagaataccaatgactgcagccctcatccctgttacaacagcggcacctgtgtggatggagacaactggtaccggtgcgaatgtgccccgggttttgctgggcccgactgcagaataaacatcaatgaatgccagtcttcaccttgtgcctttggagcgacctgtgtggatgagatcaatggctaccggtgtgtctgccctccagggcacagtggtgccaagtgccaggaagggtctcggatcaggctcccaggagcctgcccagccccctggtctttgagctcccacttctgccagatgtcctaatggtgatgcagtcttagatcatagttttatttatatttattgactcttgagttgtttttgtatattggttttatgatgacgtacaagtagttctgtatttgaaagtgcctttgcagctcagaaccacagcaacgatcacaaatgactttattatttattttttttaattgtatttttgttgttgggggaggggagactttgatgtcagcagttgctggtaaaatgaagaatttaaagaaaaaaatgtcaaaagtagaactttgtatagttatgtaaataattcttttttattaatcactgtgtatatttgatttattaacttaataatcaagagccttaaaacatcattcctttttatttatatgtatgtgtttagaattgaaggtttttgatagcattgtaagcgtatggctttatttttttgaactcttctcattacttgttgcctataagccaaaattaaggtgtttgaaaatagtttattttaaaacaataggatgggcttctgtgcccagaatactgatggaatttttttgtacgacgtcagatgtttaaaacaccttctatagcatcacttaaaacacgttttaaggactgactgaggcagtttgaggattagtttagaacaggtttttttgtttgtttgttttttgtttttctgctttagacttgaaaagagacaggcaggtgatctgctgcagagcagtaagggaacaagttgagctatgacttaacatagccaaaatgtgagtggttgaatatgattaaaaatatcaaattaattgtgtgaacttggaagcacaccaatcttactttgtaaattctgatttcttttcaccattcgtacataatactgaaccacttgtagatttgatttttttttttaatctactgcatttagggagtattctaataagctagttgaatacttgaaccataaaatgtccagtaagatcactgtttagatttgccatagagtacactgcctgccttaagtgaggaaatcaaagtgctattacgaagttcaagatcaaaaaggcttataaaacagagtaatcttgttggttcaccattgagaccgtgaagatactttgtattgtcctattagtgttatatgaacatacaaatgcatctttgatgtgttgttcttggcaataaattttgaaaagtaatatttattaaatttttttgtatgaaaacatggaacagtgtggcctcttctgagcttacgtagttctaccggctttgccgtgtgcttctgccaccctgctgagtctgttctggtaatcggggtataataggctctgcctgacagagggatggaggaagaactgaaaggcttttcaaccacaaaactcatctggagttctcaaagacctggggctgctgtgaagctggaactgcgggagccccatctaggggagccttgattcccttgttattcaacagcaagtgtgaatactgcttgaataaacaccactggattaatggccagtagt

SEQ ID NO: 340505 - DNA, 5639 bp, Homo sapiens
ttttttaaaggctgaggctcatctgaatgtgtcctggtgggatggggaaggattatctatacctttttttcttctaatgaaaagggtgtgggcagaatggaaactgaccaagctctgctcaaggagccagggtagctgtggtttagagaggctggacgaaggtcccccttccctcgtcaacttgtctgcattttgtccccaaacaatatcatgttttcagaatctgctaacaaggccttgaagtttaaagctggttttgttatttgggcccctcccatcttcctctccttacaagggacttgatatgagacctgttaaaatcgtggaatttgcagactttaatgcaatgggccattctcatgaccggggcgatgcaaggaacaggcagtgtgctgacacgcccttctctgttttttacagctatttgccgacaaggctgcagtcctaagcatgggtcttgcaaactcccaggtgactgcaggtgccagtacggctggcaaggcctgtactgtgataagtgcatcccacacccgggatgcgtccacggcatctgtaatgagccctggcagtgcctctgtgagaccaactggggcggccagctctgtgacaaagatctcaattactgtgggactcatcagccgtgtctcaacgggggaacttgtagcaacacaggccctgacaaatatcagtgttcctgccctgaggggtattcaggacccaactgtgaaattggtaagtggtccaagatgaatgagagccctttgtctaatttttctgtactcagcttttaaaaaatatacttaaggacttgtttaaggaaaaaaaagtgaaaatagcttccaaagataggccttatcccaaccattctataagcctttgtaactttcaagtctctaaagttttttgggtgatgctgattcgtataggaggcagcgggagatgaaatgaccccagctctgagatgtcttggaatgtggttagagacagctcagcgagaaagatgacttcctttctttcctagacacagcagggttctatcacacgcttgcttttggtttttgaaatatgcttgcactagtggctgtggtgtgggattcggttggaggggggtgtggggaggtaacggtgtgcaggcatccctctctgactgccatcctggtttttgcagctgagcacgcctgcctctctgatccctgtcacaacagaggcagctgtaaggagacctccctgggctttgagtgtgagtgttccccaggctggaccggccccacatgctctacaaacattgatgactgttctcctaataactgttcccacgggggcacctgccaggacctggttaacggatttaagtgtgtgtgccccccacagtggactgggaaaacgtgccagttagatgcaaatgaatgtgaggccaaaccttgtgtaaacgccaaatcctgtaagaatctcattgccagctactactgcgactgtcttcccggctggatgggtcagaattgtgacataaatattaatgactgccttggccagtgtcagaatgacgcctcctgtcgggatttggttaatggttatcgctgtatctgtccacctggctatgcaggcgatcactgtgagagagacatcgatgaatgtgccagcaacccctgtttgaatgggggtcactgtcagaatgaaatcaacagattccagtgtctgtgtcccactggtttctctggaaacctctgtcagctggacatcgattattgtgagcctaatccctgccagaacggtgcccagtgctacaaccgtgccagtgactatttctgcaagtgccccgaggactatgagggcaagaactgctcacacctgaaagaccactgccgcacgaccccctgtgaagtgattgacagctgcacagtggccatggcttccaacgacacacctgaaggggtgcggtatatttcctccaacgtctgtggtcctcacgggaagtgcaagagtcagtcgggaggcaaattcacctgtgactgtaacaaaggcttcacgggaacatactgccatgaaaatattaatgactgtgagagcaacccttgtagaaacggtggcacttgcatcgatggtgtcaactcctacaagtgcatctgtagtgacggctgggagggggcctactgtgaaaccaatattaatgactgcagccagaacccctgccacaatgggggcacgtgtcgcgacctggtcaatgacttctactgtgactgtaaaaatgggtggaaaggaaagacctgccactcacgtgacagtcagtgtgatgaggccacgtgcaacaacggtggcacctgctatgatgagggggatgcttttaagtgcatgtgtcctggcggctgggaaggaacaacctgtaacatagcccgaaacagtagctgcctgcccaacccctgccataatgggggcacatgtgtggtcaacggcgagtcctttacgtgcgtctgcaaggaaggctgggaggggcccatctgtgctcagaataccaatgactgcagccctcatccctgttacaacagcggcacctgtgtggatggagacaactggtaccggtgcgaatgtgccccgggttttgctgggcccgactgcagaataaacatcaatgaatgccagtcttcaccttgtgcctttggagcgacctgtgtggatgagatcaatggctaccggtgtgtctgccctccagggcacagtggtgccaagtgccaggaagtttcagggagaccttgcatcaccatggggagtgtgataccagatggggccaaatgggatgatgactgtaatacctgccagtgcctgaatggacggatcgcctgctcaaaggtctggtgtggccctcgaccttgcctgctccacaaagggcacagcgagtgccccagcgggcagagctgcatccccatcctggacgaccagtgcttcgtccacccctgcactggtgtgggcgagtgtcggtcttccagtctccagccggtgaagacaaagtgcacctctgactcctattaccaggataactgtgcgaacatcacatttacctttaacaaggagatgatgtcaccaggtcttactacggagcacatttgcagtgaattgaggaatttgaatattttgaagaatgtttccgctgaatattcaatctacatcgcttgcgagccttccccttcagcgaacaatgaaatacatgtggccatttctgctgaagatatacgggatgatgggaacccgatcaaggaaatcactgacaaaataatcgatcttgttagtaaacgtgatggaaacagctcgctgattgctgccgttgcagaagtaagagttcagaggcggcctctgaagaacagaacagatttccttgttcccttgctgagctctgtcttaactgtggcttggatctgttgcttggtgacggccttctactggtgcctgcggaagcggcggaagccgggcagccacacacactcagcctctgaggacaacaccaccaacaacgtgcgggagcagctgaaccagatcaaaaaccccattgagaaacatggggccaacacggtccccatcaaggattacgagaacaagaactccaaaatgtctaaaataaggacacacaattctgaagtagaagaggacgacatggacaaacaccagcagaaagcccggtttgccaagcagccggcgtacacgctggtagacagagaagagaagccccccaacggcacgccgacaaaacacccaaactggacaaacaaacaggacaacagagacttggaaagtgcccagagcttaaaccgaatggagtacatcgtatagcagaccgcgggcactgccgccgctaggtagagtctgagggcttgtagttctttaaactgtcgtgtcatactcgagtctgaggccgttgctgacttagaatccctgtgttaatttaagttttgacaagctggcttacactggcaatggtagtttctgtggttggctgggaaatcgagtgccgcatctcacagctatgcaaaaagctagtcaacagtaccctggttgtgtgtccccttgcagccgacacggtctcggatcaggctcccaggagcctgcccagccccctggtctttgagctcccacttctgccagatgtcctaatggtgatgcagtcttagatcatagttttatttatatttattgactcttgagttgtttttgtatattggttttatgatgacgtacaagtagttctgtatttgaaagtgcctttgcagctcagaaccacagcaacgatcacaaatgactttattatttattttttttaattgtatttttgttgttgggggaggggagactttgatgtcagcagttgctggtaaaatgaagaatttaaagaaaaaaatgtcaaaagtagaactttgtatagttatgtaaataattcttttttattaatcactgtgtatatttgatttattaacttaataatcaagagccttaaaacatcattcctttttatttatatgtatgtgtttagaattgaaggtttttgatagcattgtaagcgtatggctttatttttttgaactcttctcattacttgttgcctataagccaaaattaaggtgtttgaaaatagtttattttaaaacaataggatgggcttctgtgcccagaatactgatggaatttttttgtacgacgtcagatgtttaaaacaccttctatagcatcacttaaaacacgttttaaggactgactgaggcagtttgaggattagtttagaacaggtttttttgtttgtttgttttttgtttttctgctttagacttgaaaagagacaggcaggtgatctgctgcagagcagtaagggaacaagttgagctatgacttaacatagccaaaatgtgagtggttgaatatgattaaaaatatcaaattaattgtgtgaacttggaagcacaccaatcttactttgtaaattctgatttcttttcaccattcgtacataatactgaaccacttgtagatttgatttttttttttaatctactgcatttagggagtattctaataagctagttgaatacttgaaccataaaatgtccagtaagatcactgtttagatttgccatagagtacactgcctgccttaagtgaggaaatcaaagtgctattacgaagttcaagatcaaaaaggcttataaaacagagtaatcttgttggttcaccattgagaccgtgaagatactttgtattgtcctattagtgttatatgaacatacaaatgcatctttgatgtgttgttcttggcaataaattttgaaaagtaatatttattaaatttttttgtatgaaaacatggaacagtgtggcctcttctgagcttacgtagttctaccggctttgccgtgtgcttctgccaccctgctgagtctgttctggtaatcggggtataataggctctgcctgacagagggatggaggaagaactgaaaggcttttcaaccacaaaactcatctggagttctcaaagacctggggctgctgtgaagctggaactgcgggagccccatctaggggagccttgattcccttgttattcaacagcaagtgtgaatactgcttgaataaacaccactggattaatggccagtagt

SEQ ID NO: 340506 - DNA, 5731 bp, Homo sapiens
gggaggggcgtgcccagggtgagcacgccctctcatgaatattaataagcgcgcatgcgccctgcccggcgtgctgggtagaggtggccagccccggccgctgctgccagacgggctctccgggtccttctccgagagccgggcgggcacgcgtcattgtgttacctgcggccggcccgcgagctaggctgggtttttttttttctcccctccctcccccctttttccatgcagctgatctaaaagggaataaaaggctgcgcataatcataataataaaagaaggggagcgcgagagaaggaaagaaagccgggaggtggaagaggagggggagcgtctcaaagaagcgatcagaataataaaaggaggccgggctctttgccttctggaacgggccgctcttgaaagggcttttgaaaagtggtgttgttttccagtcgtgcatgctccaatcggcggagtatattagagccgggacgcggcggccgcaggggcagcggcgacggcagcaccggcggcagcaccagcgcgaacagcagcggcggcgtcccgagtgcccgcggcgcgcggcgcagcgatgcgttccccacggacgcgcggccggtccgggcgccccctaagcctcctgctcgccctgctctgtgccctgcgagccaaggtgtgtggggcctcgggtcagttcgagttggagatcctgtccatgcagaacgtgaacggggagctgcagaacgggaactgctgcggcggcgcccggaacccgggagaccgcaagtgcacccgcgacgagtgtgacacatacttcaaagtgtgcctcaaggagtatcagtcccgcgtcacggccggggggccctgcagcttcggctcagggtccacgcctgtcatcgggggcaacaccttcaacctcaaggccagccgcggcaacgaccgcaaccgcatcgtgctgcctttcagtttcgcctggccgaggtcctatacgttgcttgtggaggcgtgggattccagtaatgacaccgttcaacctgacagtattattgaaaaggcttctcactcgggcatgatcaaccccagccggcagtggcagacgctgaagcagaacacgggcgttgcccactttgagtatcagatccgcgtgacctgtgatgactactactatggctttggctgcaataagttctgccgccccagagatgacttctttggacactatgcctgtgaccagaatggcaacaaaacttgcatggaaggctggatgggccccgaatgtaacagagctatttgccgacaaggctgcagtcctaagcatgggtcttgcaaactcccaggtgactgcaggtgccagtacggctggcaaggcctgtactgtgataagtgcatcccacacccgggatgcgtccacggcatctgtaatgagccctggcagtgcctctgtgagaccaactggggcggccagctctgtgacaaagatctcaattactgtgggactcatcagccgtgtctcaacgggggaacttgtagcaacacaggccctgacaaatatcagtgttcctgccctgaggggtattcaggacccaactgtgaaattgctgagcacgcctgcctctctgatccctgtcacaacagaggcagctgtaaggagacctccctgggctttgagtgtgagtgttccccaggctggaccggccccacatgctctacaaacattgatgactgttctcctaataactgttcccacgggggcacctgccaggacctggttaacggatttaagtgtgtgtgccccccacagtggactgggaaaacgtgccagttagatgcaaatgaatgtgaggccaaaccttgtgtaaacgccaaatcctgtaagaatctcattgccagctactactgcgactgtcttcccggctggatgggtcagaattgtgacataaatattaatgactgccttggccagtgtcagaatgacgcctcctgtcgggatttggttaatggttatcgctgtatctgtccacctggctatgcaggcgatcactgtgagagagacatcgatgaatgtgccagcaacccctgtttgaatgggggtcactgtcagaatgaaatcaacagattccagtgtctgtgtcccactggtttctctggaaacctctgtcagctggacatcgattattgtgagcctaatccctgccagaacggtgcccagtgctacaaccgtgccagtgactatttctgcaagtgccccgaggactatgagggcaagaactgctcacacctgaaagaccactgccgcacgaccccctgtgaagtgattgacagctgcacagtggccatggcttccaacgacacacctgaaggggtgcggtatatttcctccaacgtctgtggtcctcacgggaagtgcaagagtcagtcgggaggcaaattcacctgtgactgtaacaaaggcttcacgggaacatactgccatgaaaatattaatgactgtgagagcaacccttgtagaaacggtggcacttgcatcgatggtgtcaactcctacaagtgcatctgtagtgacggctgggagggggcctactgtgaaaccaatattaatgactgcagccagaacccctgccacaatgggggcacgtgtcgcgacctggtcaatgacttctactgtgactgtaaaaatgggtggaaaggaaagacctgccactcacgtgacagtcagtgtgatgaggccacgtgcaacaacggtggcacctgctatgatgagggggatgcttttaagtgcatgtgtcctggcggctgggaaggaacaacctgtaacatagcccgaaacagtagctgcctgcccaacccctgccataatgggggcacatgtgtggtcaacggcgagtcctttacgtgcgtctgcaaggaaggctgggaggggcccatctgtgctcagaataccaatgactgcagccctcatccctgttacaacagcggcacctgtgtggatggagacaactggtaccggtgcgaatgtgccccgggttttgctgggcccgactgcagaataaacatcaatgaatgccagtcttcaccttgtgcctttggagcgacctgtgtggatgagatcaatggctaccggtgtgtctgccctccagggcacagtggtgccaagtgccaggaagtttcagggagaccttgcatcaccatggggagtgtgataccagatggggccaaatgggatgatgactgtaatacctgccagtgcctgaatggacggatcgcctgctcaaaggtctggtgtggccctcgaccttgcctgctccacaaagggcacagcgagtgccccagcgggcagagctgcatccccatcctggacgaccagtgcttcgtccacccctgcactggtgtgggcgagtgtcggtcttccagtctccagccggtgaagacaaagtgcacctctgactcctattaccaggataactgtgcgaacatcacatttacctttaacaaggagatgatgtcaccaggtcttactacggagcacatttgcagtgaattgaggaatttgaatattttgaagaatgtttccgctgaatattcaatctacatcgcttgcgagccttccccttcagcgaacaatgaaatacatgtggccatttctgctgaagatatacgggatgatgggaacccgatcaaggaaatcactgacaaaataatcgatcttgttagtaaacgtgatggaaacagctcgctgattgctgccgttgcagaagtaagagttcagaggcggcctctgaagaacagaacagatttccttgttcccttgctgagctctgtcttaactgtggcttggatctgttgcttggtgacggccttctactggtgcctgcggaagcggcggaagccgggcagccacacacactcagcctctgaggacaacaccaccaacaacgtgcgggagcagctgaaccagatcaaaaaccccattgagaaacatggggccaacacggtccccatcaaggattacgagaacaagaactccaaaatgtctaaaataaggacacacaattctgaagtagaagaggacgacatggacaaacaccagcagaaagcccggtttgccaagcagccggcgtacacgctggtagacagagaagagaagccccccaacggcacgccgacaaaacacccaaactggacaaacaaacaggacaacagagacttggaaagtgcccagagcttaaaccgaatggagtacatcgtatagcagaccgcgggcactgccgccgctaggtagagtctgagggcttgtagttctttaaactgtcgtgtcatactcgagtctgaggccgttgctgacttagaatccctgtgttaatttaagttttgacaagctggcttacactggcaatggtagtttctgtggttggctgggaaatcgagtgccgcatctcacagctatgcaaaaagctagtcaacagtaccctggttgtgtgtccccttgcagccgacacggtctcggatcaggctcccaggagcctgcccagccccctggtctttgagctcccacttctgccagatgtcctaatggtgatgcagtcttagatcatagttttatttatatttattgactcttgagttgtttttgtatattggttttatgatgacgtacaagtagttctgtatttgaaagtgcctttgcagctcagaaccacagcaacgatcacaaatgactttattatttattttttttaattgtatttttgttgttgggggaggggagactttgatgtcagcagttgctggtaaaatgaagaatttaaagaaaaaaatgtcaaaagtagaactttgtatagttatgtaaataattcttttttattaatcactgtgtatatttgatttattaacttaataatcaagagccttaaaacatcattcctttttatttatatgtatgtgtttagaattgaaggtttttgatagcattgtaagcgtatggctttatttttttgaactcttctcattacttgttgcctataagccaaaattaaggtgtttgaaaatagtttattttaaaacaataggatgggcttctgtgcccagaatactgatggaatttttttgtacgacgtcagatgtttaaaacaccttctatagcatcacttaaaacacgttttaaggactgactgaggcagtttgaggattagtttagaacaggtttttttgtttgtttgttttttgtttttctgctttagacttgaaaagagacaggcaggtgatctgctgcagagcagtaagggaacaagttgagctatgacttaacatagccaaaatgtgagtggttgaatatgattaaaaatatcaaattaattgtgtgaacttggaagcacaccaatcttactttgtaaattctgatttcttttcaccattcgtacataatactgaaccacttgtagatttgatttttttttttaatctactgcatttagggagtattctaataagctagttgaatacttgaaccataaaatgtccagtaagatcactgtttagatttgccatagagtacaacctgccgtggagtacaacctgccggtggagtacaacctgccggtggagtacaacctgccggtggagtacaacctgccggtggagtacaacctgccggtggagtacaacctgccggtggagtacaacctgccggtggggtacaacctgccggtggagtacaacctgccggtggagtacaacctgccggtggag

SEQ ID NO: 340507 - DNA, 5143 bp, Homo sapiens
gggaggggcgtgcccagggtgagcacgccctctcatgaatattaataagcgcgcatgcgccctgcccggcgtgctgggtagaggtggccagccccggccgctgctgccagacgggctctccgggtccttctccgagagccgggcgggcacgcgtcattgtgttacctgcggccggcccgcgagctaggctgggtttttttttttctcccctccctcccccctttttccatgcagctgatctaaaagggaataaaaggctgcgcataatcataataataaaagaaggggagcgcgagagaaggaaagaaagccgggaggtggaagaggagggggagcgtctcaaagaagcgatcagaataataaaaggaggccgggctctttgccttctggaacgggccgctcttgaaagggcttttgaaaagtggtgttgttttccagtcgtgcatgctccaatcggcggagtatattagagccgggacgcggcggccgcaggggcagcggcgacggcagcaccggcggcagcaccagcgcgaacagcagcggcggcgtcccgagtgcccgcggcgcgcggcgcagcgatgcgttccccacggacgcgcggccggtccgggcgccccctaagcctcctgctcgccctgctctgtgccctgcgagccaaggtgtgtggggcctcgggtcagttcgagttggagatcctgtccatgcagaacgtgaacggggagctgcagaacgggaactgctgcggcggcgcccggaacccgggagaccgcaagtgcacccgcgacgagtgtgacacatacttcaaagtgtgcctcaaggagtatcagtcccgcgtcacggccggggggccctgcagcttcggctcagggtccacgcctgtcatcgggggcaacaccttcaacctcaaggccagccgcggcaacgaccgcaaccgcatcgtgctgcctttcagtttcgcctggccgaggtcctatacgttgcttgtggaggcgtgggattccagtaatgacaccgttcaacctgacagtattattgaaaaggcttctcactcgggcatgatcaaccccagccggcagtggcagacgctgaagcagaacacgggcgttgcccactttgagtatcagatccgcgtgacctgtgatgactactactatggctttggctgcaataagttctgccgccccagagatgacttctttggacactatgcctgtgaccagaatggcaacaaaacttgcatggaaggctggatgggccccgaatgtaacagagctatttgccgacaaggctgcagtcctaagcatgggtcttgcaaactcccaggtgactgcaggtgccagtacggctggcaaggcctgtactgtgataagtgcatcccacacccgggatgcgtccacggcatctgtaatgagccctggcagtgcctctgtgagaccaactggggcggccagctctgtgacaaagatctcaattactgtgggactcatcagccgtgtctcaacgggggaacttgtagcaacacaggccctgacaaatatcagtgttcctgccctgaggggtattcaggacccaactgtgaaattggtaagtggtccaagatgaatgagagccctttgtctaatttttctgtactcagcttttaaaaaatatacttaaggacttgtttaaggaaaaaaaagtgaaaatagcttccaaagataggccttatcccaaccattctataagcctttgtaactttcaagtctctaaagttttttgggtgatgctgattcgtataggaggcagcgggagatgaaatgaccccagctctgagatgtcttggaatgtggttagagacagctcagcgagaaagatgacttcctttctttcctagacacagcagggttctatcacacgcttgcttttggtttttgaaatatgcttgcactagtggctgtggtgtgggattcggttggaggggggtgtggggaggtaacggtgtgcaggcatccctctctgactgccatcctggtttttgcagctgagcacgcctgcctctctgatccctgtcacaacagaggcagctgtaaggagacctccctgggctttgagtgtgagtgttccccaggctggaccggccccacatgctctacaaacattgatgactgttctcctaataactgttcccacgggggcacctgccaggacctggttaacggatttaagtgtgtgtgccccccacagtggactgggaaaacgtgccagttagatgcaaatgaatgtgaggccaaaccttgtgtaaacgccaaatcctgtaagaatctcattgccagctactactgcgactgtcttcccggctggatgggtcagaattgtgacataaatattaatgactgccttggccagtgtcagaatgacgcctcctgtcgggatttggttaatggttatcgctgtatctgtccacctggctatgcaggcgatcactgtgagagagacatcgatgaatgtgccagcaacccctgtttgaatgggggtcactgtcagaatgaaatcaacagattccagtgtctgtgtcccactggtttctctggaaacctctgtcagctggacatcgattattgtgagcctaatccctgccagaacggtgcccagtgctacaaccgtgccagtgactatttctgcaagtgccccgaggactatgagggcaagaactgctcacacctgaaagaccactgccgcacgaccccctgtgaagtgattgacagctgcacagtggccatggcttccaacgacacacctgaaggggtgcggtatatttcctccaacgtctgtggtcctcacgggaagtgcaagagtcagtcgggaggcaaattcacctgtgactgtaacaaaggcttcacgggaacatactgccatgaaaatattaatgactgtgagagcaacccttgtagaaacggtggcacttgcatcgatggtgtcaactcctacaagtgcatctgtagtgacggctgggagggggcctactgtgaaaccaatattaatgactgcagccagaacccctgccacaatgggggcacgtgtcgcgacctggtcaatgacttctactgtgactgtaaaaatgggtggaaaggaaagacctgccactcacgtgacagtcagtgtgatgaggccacgtgcaacaacggtggcacctgctatgatgagggggatgcttttaagtgcatgtgtcctggcggctgggaaggaacaacctgtaacatagcccgaaacagtagctgcctgcccaacccctgccataatgggggcacatgtgtggtcaacggcgagtcctttacgtgcgtctgcaaggaaggctgggaggggcccatctgtgctcagaataccaatgactgcagccctcatccctgttacaacagcggcacctgtgtggatggagacaactggtaccggtgcgaatgtgccccgggttttgctgggcccgactgcagaataaacatcaatgaatgccagtcttcaccttgtgcctttggagcgacctgtgtggatgagatcaatggctaccggtgtgtctgccctccagggcacagtggtgccaagtgccaggaagtttcagggagaccttgcatcaccatggggagtgtgataccagatggggccaaatgggatgatgactgtaatacctgccagtgcctgaatggacggatcgcctgctcaaaggtctggtgtggccctcgaccttgcctgctccacaaagggcacagcgagtgccccagcgggcagagctgcatccccatcctggacgaccagtgcttcgtccacccctgcactggtgtgggcgagtgtcggtcttccagtctccagccggtgaagacaaagtgcacctctgactcctattaccaggataactgtgcgaacatcacatttacctttaacaaggagatgatgtcaccaggtcttactacggagcacatttgcagtgaattgaggaatttgaatattttgaagtctgctgaagatatacgggatgatgggaacccgatcaaggaaatcactgacaaaataatcgatcttgttagtaaacgtgatggaaacagctcgctgattgctgccgttgcagaagtaagagttcagaggcggcctctgaagaacagaacagatttccttgttcccttgctgagctctgtcttaactgtggcttggatctgttgcttggtgacggccttctactggtgcctgcggaagcggcggaagccgggcagccacacacactcagcctctgaggacaacaccaccaacaacgtgcgggagcagctgaaccagatcaaaaaccccattgagaaacatggggccaacacggtccccatcaaggattacgagaacaagttgagctatgacttaacatagccaaaatgtgagtggttgaatatgattaaaaatatcaaattaattgtgtgaacttggaagcacaccaatcttactttgtaaattctgatttcttttcaccattcgtacataatactgaaccacttgtagatttgatttttttttttaatctactgcatttagggagtattctaataagctagttgaatacttgaaccataaaatgtccagtaagatcactgtttagatttgccatagagtacactgcctgccttaagtgaggaaatcaaagtgctattacgaagttcaagatcaaaaaggcttataaaacagagtaatcttgttggttcaccattgagaccgtgaagatactttgtattgtcctattagtgttatatgaacatacaaatgcatctttgatgtgttgttcttggcaataaattttgaaaagtaatatttattaaatttttttgtatgaaaacatggaacagtgtggcctcttctgagcttacgtagttctaccggctttgccgtgtgcttctgccaccctgctgagtctgttctggtaatcggggtataataggctctgcctgacagagggatggaggaagaactgaaaggcttttcaaccacaaaactcatctggagttctcaaagacctggggctgctgtgaagctggaactgcgggagccccatctaggggagccttgattcccttgttattcaacagcaagtgtgaatactgcttgaataaacaccactggattaatggccagtagt

SEQ ID NO: 340508 - DNA, 1820 bp, Homo sapiens
  misc_feature (23)..(23): n is a, c, g, or t
ctgcaggtgactctccaggattnttcatatcagcgctttcatccctgttacaacagcggcacctgtgtggatggagacaactggtaccggtgcgaatgtgccccgggttttgctgggcccgactgcagaataaacatcaatgaatgccagtcttcaccttgtgcctttggagcgacctgtgtggatgagatcaatggctaccggtgtgtctgccctccagggcacagtggtgccaagtgccaggaagggtctcggatcaggctcccaggagcctgcccagccccctggtctttgagctcccacttctgccagatgtcctaatggtgatgcagtcttagatcatagttttatttatatttattgactcttgagttgtttttgtatattggttttatgatgacgtacaagtagttctgtatttgaaagtgcctttgcagctcagaaccacagcaacgatcacaaatgactttattatttattttttttaattgtatttttgttgttgggggaggggagactttgatgtcagcagttgctggtaaaatgaagaatttaaagaaaaaaatgtcaaaagtagaactttgtatagttatgtaaataattcttttttattaatcactgtgtatatttgatttattaacttaataatcaagagccttaaaacatcattcctttttatttatatgtatgtgtttagaattgaaggtttttgatagcattgtaagcgtatggctttatttttttgaactcttctcattacttgttgcctataagccaaaattaaggtgtttgaaaatagtttattttaaaacaataggatgggcttctgtgcccagaatactgatggaatttttttgtacgacgtcagatgtttaaaacaccttctatagcatcacttaaaacacgttttaaggactgactgaggcagtttgaggattagtttagaacaggtttttttgtttgtttgttttttgtttttctgctttagacttgaaaagagacaggcaggtgatctgctgcagagcagtaagggaacaagttgagctatgacttaacatagccaaaatgtgagtggttgaatatgattaaaaatatcaaattaattgtgtgaacttggaagcacaccaatcttactttgtaaattctgatttcttttcaccattcgtacataatactgaaccacttgtagatttgatttttttttttaatctactgcatttagggagtattctaataagctagttgaatacttgaaccataaaatgtccagtaagatcactgtttagatttgccatagagtacactgcctgccttaagtgaggaaatcaaagtgctattacgaagttcaagatcaaaaaggcttataaaacagagtaatcttgttggttcaccattgagaccgtgaagatactttgtattgtcctattagtgttatatgaacatacaaatgcatctttgatgtgttgttcttggcaataaattttgaaaagtaatatttattaaatttttttgtatgaaaacatggaacagtgtggcctcttctgagcttacgtagttctaccggctttgccgtgtgcttctgccaccctgctgagtctgttctggtaatcggggtataataggctctgcctgacagagggatggaggaagaactgaaaggcttttcaaccacaaaactcatctggagttctcaaagacctggggctgctgtgaagctggaactgcgggagccccatctaggggagccttgattcccttgttattcaacagcaagtgtgaatactgcttgaataaacaccactggattaatggccagtagt

SEQ ID NO: 340509 - DNA, 2765 bp, Homo sapiens
gggaggggcgtgcccagggtgagcacgccctctcatgaatattaataagcgcgcatgcgccctgcccggcgtgctgggtagaggtggccagccccggccgctgctgccagacgggctctccgggtccttctccgagagccgggcgggcacgcgtcattgtgttacctgcggccggcccgcgagctaggctgggtttttttttttctcccctccctcccccctttttccatgcagctgatctaaaagggaataaaaggctgcgcataatcataataataaaagaaggggagcgcgagagaaggaaagaaagccgggaggtggaagaggagggggagcgtctcaaagaagcgatcagaataataaaaggaggccgggctctttgccttctggaacgggccgctcttgaaagggcttttgaaaagtggtgttgttttccagtcgtgcatgctccaatcggcggagtatattagagccgggacgcggcggccgcaggggcagcggcgacggcagcaccggcggcagcaccagcgcgaacagcagcggcggcgtcccgagtgcccgcggcgcgcggcgcagcgatgcgttccccacggacgcgcggccggtccgggcgccccctaagcctcctgctcgccctgctctgtgccctgcgagccaaggtgtgtggggcctcgggtcagttcgagttggagatcctgtccatgcagaacgtgaacggggagctgcagaacgggaactgctgcggcggcgcccggaacccgggagaccgcaagtgcacccgcgacgagtgtgacacatacttcaaagtgtgcctcaaggagtatcagtcccgcgtcacggccggggggccctgcagcttcggctcagggtccacgcctgtcatcgggggcaacaccttcaacctcaaggccagccgcggcaacgaccgcaaccgcatcgtgctgcctttcagtttcgcctggccgaggtcctatacgttgcttgtggaggcgtgggattccagtaatgacaccgttcaacctgacagtattattgaaaaggcttctcactcgggcatgatcaaccccagccggcagtggcagacgctgaagcagaacacgggcgttgcccactttgagtatcagatccgcgtgacctgtgatgactactactatggctttggctgcaataagttctgccgccccagagatgacttctttggacactatgcctgtgaccagaatggcaacaaaacttgcatggaaggctggatgggccccgaatgtaacagagctatttgccgacaaggctgcagtcctaagcatgggtcttgcaaactcccaggtgactgcaggtgccagtacggctggcaaggcctgtactgtgataagtgcatcccacacccgggatgcgtccacggcatctgtaatgagccctggcagtgcctctgtgagaccaactggggcggccagctctgtgacaaagatctcaattactgtgggactcatcagccgtgtctcaacgggggaacttgtagcaacacaggccctgacaaatatcagtgttcctgccctgaggggtattcaggacccaactgtgaaattggtaagtggtccaagatgaatgagagccctttgtctaatttttctgtactcagcttttaaaaaatatacttaaggacttgtttaaggaaaaaaaagtgaaaatagcttccaaagataggccttatcccaaccattctataagcctttgtaactttcaagtctctaaagttttttgggtgatgctgattcgtataggaggcagcgggagatgaaatgaccccagctctgagatgtcttggaatgtggttagagacagctcagcgagaaagatgacttcctttctttcctagacacagcagggttctatcacacgcttgcttttggtttttgaaatatgcttgcactagtggctgtggtgtgggattcggttggaggggggtgtggggaggtaacggtgtgcaggcatccctctctgactgccatcctggtttttgcagctgagcacgcctgcctctctgatccctgtcacaacagaggcagctgtaaggagacctccctgggctttgagtgtgagtgttccccaggctggaccggccccacatgctctacaaacattgatgactgttctcctaataactgttcccacgggggcacctgccaggacctggttaacggatttaagtgtgtgtgccccccacagtggactgggaaaacgtgccagttaggtaagaacatccctgtgactgtaatttttataccaaggttggctttgattgtcaaagccattacagaagacgagcgtgtggccggcagtgtgagttcacactccatcatgctaagaagtaatttattatcaagagtctagcaggcctgggagaaataacttgaatgcaaatggactagctcttttaggccctgtgggaaagtcgtgggattccttgaaccatgtcaatcgtctgtccgaggagtgttcagctgggttccaaaaggggatgatctcatgaggaatgagctgtctgcattctttttgccacatttaaatcccagcaactaggctgcctgggttttgcacagaaatgcctggtggctttctgctgttttgttgggggctggttaactagcagctggaaagttatcaattagggttcttattggataatagctagggagagggatcagatgcttaaaatagagggaacctctagtatcttttatttagctagcttattaaaatgtctcatg

SEQ ID NO: 340510 - DNA, 545 bp, Homo sapiens
gcggccgcaggggcagcggcgacggcagcaccggcggcagcaccagcgcgaacagcagcggcggcgtcccgagtgcccgcggcgcgcggcgcagcgatgcgttccccacggacgcgcggccggtccgggcgccccctaagcctcctgctcgccctgctctgtgccctgcgagccaaggtaggagcccttctccgggcctccctcccagccgtcctctccctcccctcgcggcgccctgggcggttgagccccgcgagcaggctcggcagccctcgagcgcccgactcctcgcccctgcgcccgagcggctgcacctgggctgagcgcgccaactcccccacgggagcccctgcctcctgagggtgacccctccaggccggacaggggcgcgttcgctccgctgttgccccccgggaagtcgtcggatttcttccgcactcgtgcatttttttttttttttgccccggaatcatgttgagtccttgaacgtagtttcgcaaaattattttcactcggcgaggagggctcgtcggggcggggagtgg

SEQ ID NO: 340511 - DNA, 384 bp, Homo sapiens
caaaaaacaaaaaaacaaaaaaacccacaaaacccgtgttggttagattttctcaaaagctttacaacaggcaggttacgtgtaagctctgctgttgcccaaaatagtaattagggaaataattgcttttaaatgaatatgtctgttttctagtcagatttgcccttttgttctttgatcagttagttcacgtaagcgggtgtggcagggaggaagcccctggtggtgagagtgtttggagctcaattgctcgaagggaattggtgtcgatatggagtctcgggcagtggttttagtaaccttggataaaccgacctctcaggcttgcacaatttgctaattaaaacagggagcacagctgcttcagttgtaagccgggcgtag

SEQ ID NO: 340512 - DNA, 609 bp, Homo sapiens
aaacacagcagaggaagagggggaagatgaggcttgcgcttccagctgctcctcagtccatccaggcagggccagtagagctgaaggtttcctgagcaatcacccaccaagggtagaatctgctcctagaaacagaccctctcgccagtcagctctgccttgggctttaaatgctcacagcctggggctgggggaggcaactaccaaaacagctcagagtgaggcctctggatgtgcaaggaccagggcctgcaggacccttgctgggaatctcataagcaatgaatggctcatggccttgggcaagttttcacctgtgaggcagagctaggactacccatgtaaaagacagaacagttaatgaatgccaaaatgccacactgctagccaatgcactgtggccaaaagataattacagtaggctcactacacaaagaggccagaccacatctttgagagcacagctttatttggcctggatgcctcgagcacatatcatgtatggcagccccatcctcctccagcctatggactctggaccagagctgcggcccacccctggagggaccagtcctgctggctggaaggtaggtgtcctgacagttgggg

SEQ ID NO: 340513 - DNA, 418 bp, Homo sapiens
acaatgtagcaatggactccattgcctagttatttcttaggactaaatttctagaagtaagattgctagttaaagtgtatgcacatgtttgaggctttcgatgcacaggaacatacttccctccccagacgtcacaccagttgcctttcctcttagtggcctgtgaaggtgagagaccagactccatgaggataggaagtgcaagtcccagattccccacactgctctgccaagtccagggacatcatctggaaatccccagaggcatcagcacatggagcacatcccacgcagggcatgcaggggaaatgtgatcataccctgtgaacatacccagagacagcgaggaagactttgggcacaggagccagcctcggagatggggagttggggaaaggacagacagacagagctccaa

SEQ ID NO: 340514 - DNA, 163 bp, Homo sapiens
atggcatgtttcctgaactgtgttaacaggaagtaactattttaaaaacacaggatgcattttatgattatgttttactgtgtcaacgaacattgtatctgtccacattcactttttgactaccaagcaagtgcatgtttacaattttgattcacatccaatt

SEQ ID NO: 340515 - DNA, 504 bp, Homo sapiens
tcagtaagcaaattaatgaagagaatgaaagaaaaggaaagaatgagagaaaatataaatgtatttggccaaaatcagttggacatctgtgtcaaacttttacacaagagcaacagcctgtaccacagtttgccaaccctgccattcattaacaatgaagacacgatcccacattataatttcctaaatttacaagaaaaataatgcctttggcatcacagtctttgccaaagtatatagaacaggcttccactgaaagttcactcatgctgttaaaatgctttaaatagtaaacagagtagaaaattaaacaaatccacagaaatcaagtactaagcacaaaacaaaaacttagacgtggtcttccagctcctggcactttctctttgcattatgaagcgggagaggcacgggcatcatggacgtcccatggagtacacagagcagaagcggtcataaactgctgccctcctgacgtgtctgtccacatttctctagctctta

SEQ ID NO: 340516 - DNA, 105 bp, Homo sapiens
ctacaaacttttctaataccgtcaattttactctcgctttctgattcatcccagaatagtcctgatctcaaaaaaaagccaacaatgaataattgaaagaatgtg

SEQ ID NO: 340517 - DNA, 321 bp, Homo sapiens
taggacgaggtagtcttgacaaaatattgcagatgaagctgagtaagccttggtcccagctgctgctttcaagagttacagaagaatatgtggaattgttctgagagtatcaatcctggaaaatacagactgggaaactacaagttaatactgtggattcttaaacagataaattttaacctaatgcaatagaagcggaacttacctacaaaaatgcttcaaatgcatcacgtttatttttctgggaagactagaatgtctatagttatacatttaggcattagaattattttaaaagtgagaaagtgctagtaaagtcat

SEQ ID NO: 340518 - DNA, 350 bp, Homo sapiens
tatctcatgctactctcttaatgactttggcaacccctcttctcaaacctccaatacctccttgcacaacctcattctcagctaaagaccttgcttcttattccactgagaaaaatagagtaaccagaagagaacatctgcaagcatcctccgccacatctgtctacttgcttgcatctgcacccgtgtttgtggttttcctttctgatatggtggatggactctcctcatacctgcctggtgccaattcctctggctgggctctggaaacccagctctcctgtcactcctgctcaaggacattccccgctttcctgggcctctcagttgaacaaagcagcaccacgaat

SEQ ID NO: 340519 - DNA, 3390 bp, Homo sapiens
ctcaccagggcatggaaaatttgccttcatgtcaaccaccaccttagcccttgactacccaacggactcttcccaagtcaacagccacttcctccctggggcttaacaggcattccttgaagcctgccccgggcagttagtccttcccttttgtgtgaactctcggctgttttcgttgtctgcacacagagcagtggtctagggagcgaagggttttgggaatggaccttttcctttcttagcttgctgtagggattgtgcttcagctaaggtaaagtggaaaaacagaagtacaaaagcaacagccccagatctaagggcaccgtagctctggaatctggattttattccagattcaaccctcagcagggagttgaagtggtcagccctgtgctttacaaggctgattgggcagcacccatagtagaattgtcaatataaagtaattgaaaggatcagaatccagggttttcgttgtttttaagtttttaagttttaaaaacaaagttgtttttgttcgtttttaagtttacttctctttaatcggtctcactttattgaccaggctggtttcgaactcctgggcttaagtgatttctcctgtctcagcttctcaaagtgctgggattacaggcgtgagccgctgcacccagcccagaatccagttttaaagagtttattcaagccaaaagctgggaatggccatctgagaaacacagactctaggaaaatggggccagggccctgaagttaaaagttaaagtcttgcttacataggcagaaagcaaagacatttagtaaccttgtagaacattttcttgtataacttttcttgttttaactttcttgtttaacattttctatgcaaggctggtttatgagttacaacctataattaattataggttgttcccctgcctccaccttgttttcttttctctacagcttgttttcatttcctttccaatttaagaatgtgtttaacattctatcccagacaatgtgatggtcatgaagtctctgtcagagaggaaagagggagttaatctataatgaagatcaacagtgaagaggaaaggggtcttccctggaacgcttcagtcatatacgacattttacacaacaataatggacctgtgtaaggaggtatgtgtgggagaagattccagaaggtcttgagacactccagatgaaggttggtgtggggctgtgctgctggagcaccagagagtgaaaagaggttatctccctctgtgccaggccagagtgcagtggtgcaatcacggctcactgtagtctcaacctcctgggctcaagagatcctcccacttcagcctcccaagcagctaagactacagttattttattcttatgagcttgtgggctccatctaccaacctctgggcaaatgctcatctgacttccatagacacacagcaagcagacaaccacacaaagaggaagagggagaatatttaccagccatggaacatctgctctgtgcttatatctcatatgcattatctctaattatcaaaagaaggttagaagcaaggcacaagtcatacctacattcaaggagaggggaccatgcaaaggataaactgcagagagacaacagatttgcatcccagacacattcacactgggccaagagcagctgccattgcagattcgagtcacgtccttttttccttccttctccttcttggagttacaacagaagctggggaggtgagagtgcagaaaggacgtggatgaagcagagaggcacgtgcctgtctcattcgcctctggatctgctgcatccaggactgtgccagcacaaagtgggagcccgataaatatttattgaagaaatgaaaggtgacaaaaggcagaaggagggagaccccaaaaagagagatgggatcccactatattgcacaggctggtctcaaactcctgagctcaagcgatcctcctgccttggcctcccacggtgctgagactacaggtgtgagccaccactcccagcctgatttatattttataaagaggcaacgatggagtacacagctgagcaatctcttgcatttctggaccttgagcatcaggaagcttagggagggtgaaaactcagaagaaagctcagagttgagacctttgattttttgcccagagagtccagctaacacactttataacccaaaaggccttacaaatatttcagagcagaggcagcatttttgcactggataaacaaaggtacggtaatttcttcatagtttattttcattacaagtaattcttttcctgaagaaaaatttatatttcagatttatttcccctctcaaaggggaggggagttataatattctgtttccatagcaccattcctcaagatcaaacccaggcaggcatttttacagcaccacacttccatatgtcattgctaatcctcgcaaccttgaggaaactgaggtgcaaaggggttgaggaatgtgttcaccatcccaaagccaacgaagtgccagaacccaaatccaagcttggctgtctcatccccaaggacgtactctttatgccgttccttatgacttttcatgcagcaggcgcaaggcagcaagaatttggctcttctgacatttatcaggcacctggtatgtgccaggcctactgtaaaccccaagatgacatggtccatgtctatccattcagcatcagagagactgttatcaggacttgaggcctgagacacagccctgaatcagatgcaggcctctggtgtttgcaaaggatgcgtgagtatgtgtatgtgtatgcgtgcattgtgtgtaggggtgtgtgtatgttgggggttgggggcagaaaatgctccctgaactgttggtattaaggcagatctttgatggagggactggggtgtggagacttgaaccctagtttcgaagtggggacctcgaacactggtatggccagcagacaggctggagttgctgaattgtcagctaggtctttaatccactccccttctctaaatcagggtggaattggactcagggctggttcagggctgaggtttccgggggatgaatgattccagacagtgggaaggggtgatggatgatgaacctggcaagtcacaggactatggacttggctgtatgttgcatgtatgtgtaagatctgagttgagacctttgatttttgcccagaaagatccagctaacatactatataagccagtgagaccagccagtgtctgttcattgcctctgccttgcccctatgcctgcccgcctcctatagcagggccctatagcataatgaaaatgcgaacaaccttttctctggacactggggaatctagtctggtggataaagatggatggctgttaaacgatcgca

SEQ ID NO: 340520 - DNA, 1163 bp, Homo sapiens
  misc_feature (1)..(1): n is a, c, g, or t
  misc_feature (3)..(4): n is a, c, g, or t
ngnnacacgtgtgagcctagaggcgggtcccggttgcagacttgccatggcctccgaagcttctgtgcgtctaggggtgccccctggccgtctgtggatccagaggcctggcatctacgaagatgaggaggggagaacctgggtgactgtggtcgtgcggttcaatccctcgcgtagggaatgggccagggcctcccagggcagcagatatgaacccagcatcacagtgcacttgtggcagatggcagtgcatacccgggagctactctcctccggccagatgcccttctcccagctgcccgccgtgtggcagctctaccccgggaggaagtaccgagcagcggattccagtttctgggaaatagcagaccatggccagattgactctatggagcagctggtcctaacatatcagccggagaggaaagactgacactgggagtggctggccctgctggccctgcctcttctggcctggtgtctcctcatgccccctcagtgaggatcttcatgtacctgctcttctgtttgcacacccagcatagcctccttgcaggcagaaggcagtagggcccctgcacactcagtttctctcgttttccttagttatcagtcctgtcctgtcccactcaggtctgtacttagggcagctggcctggatgggcttcactggggccctgtctgtgtgctgagccagtttcccctgctggctgcaagctgtgggttctttctcctctgtgcccctcatgctgatcttctagatgccactcccaaatccccttcatacccaccaggatgtgtgcccagccaggcctccagcacccccagtgcagctcgtgattggaaactcaccatcggcaggcagtggttcggtttaagagatggcattagagggagcccagtctggatgtggacttggatgccctgtgggtatcagttctgctgacactttggcccgaaatagatccagtgctgagcaagcaatgtacaccggagcctcagtgagcccatctgcacagtggggagcatggagggatgggtttggcctgtgcttctgcttattcagtccttcagctcacggaagggatgctagtccgtgaaggtgacctcacagtactggttaattaaactttattgctcactgtccacttttgtgctgaatt

SEQ ID NO: 340521 - DNA, 2186 bp, Homo sapiens
  misc_feature (968)..(968): n is a, c, g, or t
cggctagaactgttttgacccaggaaacaatttgactaaaggatatttcaatccaacaaatactctctgggcccttccaatgtttctggcactggtttgatgctgaggacatagagatgaataagaaatggtctctgtcccccagctgataaattatcattgatgatctaccgtgtgccagggactttacaaatgtgattaccatttcttacaacatagtaaggtagatagcatttttgtgttacaggtgaggagtaggaagttcaaaaagtttataaggtcaaagtcacacaactagtcagatgtagaactaacctttggatttgggactgttcaccatcaaatcctatatgcttttgatacagacaggagacccagaaatgctgggtagaagagggtggttccctggcaaaggccctaccctcaaacctggaaacctgcagccctaaatgggaagaggcattcctgttttcatgcccaaaagttgccttttggcccgtcatgtcccctatcctatacctgtataaaccccagaccccaggctccagaagcagatgaggagacaaacagaagagcagaagaatggcagaatggcacagcagagagaagaaaaggaacatctgaatgttgagaggaatttggctgggggcggttggagaggagattagccactggacagccaaactccaggggaagatcatcttcccactccatcccccttccagctccccatccatcctgctgagagccacctccaccactcagtgaaaccgctgcattcatccttcaagtttatgtgtgacctgattcttcctggacattggacaaagacctaggtccagtgaactgtctaacacttaagtcatccacggacagcaaggctaacagaatgctgtaacatgtgcccacttggactctgggagttgcagacacccacccgtaggtgctgccatgggtccggagcccanaaagtgcttgccctggctcctgcacctgcccgtctgcatgctccccctccggtaaggggtttgaggatgtggcggctgaacataagagctatgcccctgtcacacatcatgggacaggggtcagggaactctcccatttcactttcaaatattccaggtcccctttttgttcgggagccagagtctagtggagacagagatagaaaccctgaaataggatccaggcaatataaacctacacgctgtaagccaagtcagagtgaggctgatgtgataacaaaagtctgaatacaaggtgggagacaattattctgactgaaagggaggcaagagttctgccataggcttgatgctgtgtgcccctggcttcctaactcatttgcaaatggaaaatactattccattgtaggaaccttctttttccatttgtctggggaaggagaaagaatggctgggctgaatgaatttatcccttggtcctcttccaacaaagctcagctatgaaagataaatccagctctccccaccccctctcagtggagctggggagaaatcaaaagcccctctgccaataatgagaccaaagtttgcaagggcaggacgagcccgtgctaacagagaaagtgttgtttcctcaatttggttttagactgtcttgtcctatgggggagaaaagatctgcccttgggagaggtgccaactttatagatctattaataaaagaactggcaggcttacagttcttgccaatgaggaaacttgaatgagagaagccaggctcaaccttggccaacagactggagcccatcaccctaacttcaccccgcttctccttacccaaccatcaaaggctaggcagcacccacccagcagcttccacctggctgaagcctgcacctgcttcagaccaagggttagatggaaatttggcatgggaagagagggctcacctgtgggcaggatagactctatccaagaaggagaactgaaaaatgaaaacctatgagacaaggggtgatcctgaaggcaggcaggagaaagggctggagggagaggcactggggaatttttcctggtgaatactgaagttactagatgttttgtcttgcaaaactcaagggaaaactctcaaactctaatgtttgtctattctgtgtccaaactgtccttttgaaacggacccacctttcagtaaagaaacttgcattggcctgccca

SEQ ID NO: 340522 - DNA, 1567 bp, Homo sapiens
ctcaccagggcatggaaaatttgccttcatgtcaaccaccaccttagcccttgactacccaacggactcttcccaagtcaacagccacttcctccctggggcttaacaggcattccttgaagcctgccccgggcagttagtccttcccttttgtgtgaactctcggctgttttcgttgtctgcacacagagcagtggtctagggagcgaagggttttgggaatggaccttttcctttcttagcttgctgtagggattgtgcttcagctaaggtaaagtggaaaaacagaagtacaaaagcaacagccccagatctaagggcaccgtagctctggaatctggattttattccagattcaaccctcagcagggagttgaagtggtcagccctgtgctttacaaggctgattgggcagcacccatagtagaattgtcaatataaagtaattgaaaggatcagaatccagggttttcgttgtttttaagtttttaagttttaaaaacaaagttgtttttgttcgtttttaagtttacttctctttaatcggtctcactttattgaccaggctggtttcgaactcctgggcttaagtgatttctcctgtctcagcttctcaaagtgctgggattacaggcgtgagccgctgcacccagcccagaatccagttttaaagagtttattcaagccaaaagctgggaatggccatctgagaaacacagactctaggaaaatggggccagggccctgaagttaaaagttaaagtcttgcttacataggcagaaagcaaagacatttagtaaccttgtagaacattttcttgtataacttttcttgttttaactttcttgtttaacattttctatgcaaggctggtttatgagttacaacctataattaattataggttgttcccctgcctccaccttgttttcttttctctacagcttgttttcatttcctttccaatttaagaatgtgtttaacattctatcccagacaatgtgatggtcatgaagtctctgtcagagaggaaagagggagttaatctataatgaagatcaacagtgaagaggaaaggggtcttccctggaacgcttcagtcatatacgacattttacacaacaataatggacctgtgtaaggaggtatgtgtgggagaagattccagaaggtcttgagacactccagatgaaggttggtgtggggctgtgctgctggagcaccagagagtgaaaagaggttatctccctctgtgccaggccagagtgcagtggtgcaatcacggctcactgtagtctcaacctcctgggctcaagagatcctcccacttcagcctcccaagcagctaagactacaggcacgtgtcatcatatctggcaaattaaaaaaaaaattatagagatgggctctccctgtgtttccctggttggtctcaaactcctgggctcaagtgatcctcccatcttggcctcccaacttactgggattacaggcatttgccactgtgcccagcccatttcaatatttctgatcaataaatgtgcctgtccttcagattctcctttg

SEQ ID NO: 340523 - DNA, 5588 bp, Homo sapiens
ctcaccagggcatggaaaatttgccttcatgtcaaccaccaccttagcccttgactacccaacggactcttcccaagtcaacagccacttcctccctggggcttaacaggcattccttgaagcctgccccgggcagttagtccttcccttttgtgtgaactctcggctgttttcgttgtctgcacacagagcagtggtctagggagcgaagggttttgggaatggaccttttcctttcttagcttgctgtagggattgtgcttcagctaaggtaaagtggaaaaacagaagtacaaaagcaacagccccagatctaagggcaccgtagctctggaatctggattttattccagattcaaccctcagcagggagttgaagtggtcagccctgtgctttacaaggctgattgggcagcacccatagtagaattgtcaatataaagtaattgaaaggatcagaatccagggttttcgttgtttttaagtttttaagttttaaaaacaaagttgtttttgttcgtttttaagtttacttctctttaatcggtctcactttattgaccaggctggtttcgaactcctgggcttaagtgatttctcctgtctcagcttctcaaagtgctgggattacaggcgtgagccgctgcacccagcccagaatccagttttaaagagtttattcaagccaaaagctgggaatggccatctgagaaacacagactctaggaaaatggggccagggccctgaagttaaaagttaaagtcttgcttacataggcagaaagcaaagacatttagtaaccttgtagaacattttcttgtataacttttcttgttttaactttcttgtttaacattttctatgcaaggctggtttatgagttacaacctataattaattataggttgttcccctgcctccaccttgttttcttttctctacagcttgttttcatttcctttccaatttaagaatgtgtttaacattctatcccagacaatgtgatggtcatgaagtctctgtcagagaggaaagagggagttaatctataatgaagatcaacagtgaagaggaaaggggtcttccctggaacgcttcagtcatatacgacattttacacaacaataatggacctgtgtaaggaggtatgtgtgggagaagattccagaaggtcttgagacactccagatgaaggttggtgtggggctgtgctgctggagcaccagagagtgaaaagaggttatctccctctgtgccaggccagagtgcagtggtgcaatcacggctcactgtagtctcaacctcctgggctcaagagatcctcccacttcagcctcccaagcagctaagactacagacatgtccttaaccttggcacaacaaatctctaaatcgattgagacctgtctcagatacttcttggtttacaagatggaggctgaaattaaagagaaagatcctcactcaactcacagaggagcagaatgggaagaggacttagtgagaattccctgaacacaggagaaaaccgaagcccagagagtggatggccaagtccaaggtcacacagccaagtgcatccgagcagcgcaggatccaggtttcctgccccagtgctctttctgcagcccatgccacctgttttcatgctatctcagttcaccttccagctacacacctgcaatcagaaacagaaagtctgagagtgtgtgtggagccaaagaggggacagcagtggtgaggccagtttcatgtcttgtgatttattttctccctttctttttggactttaatcttaagtggacagcaatttggaacagtgtcagcaccttgttggattgtgctgtttgggagaggtgacacagagtattttaaaagagcaggttaagaacttttcacaaggaatcaattgagagaaaataaaatagaaacagactgtcccacatttgggctgagcaccaaacacatttttttttttttttttgagactgagtcttgctctgtcactcaggctggaatgcagtggcgcgatctcggctcactgcagccttcacctcccgggttcaagtgattcttctgcctcagcctcccaagtagctgggattacaggtgcccaccaccatgccaggctaatttttgtatttttagtagagacgaggtttcaccatgttggccaggctggtcttgaactcctgaccaagtgatccacctgcttcggcctcccaaagtgctgggattacaggcacgagccaccgcacctggcctcaaacaagctttttaattgcattcagaagtgcaccaactaggcacagacctctggcatggagacagaatgggaggttcttggtgtctggcctggtcttgcagaaatcagggagttgtggggaccaggcagccactgtgcatcagataggagtttcagcagcaggcaacagaaagcctgccaatgtagctgaaataagaagggcttatttttatccctgaacagaagcttccagcactggttcatcagatcagggcactgagctggcatccccatttatacagttttcctttccttcacctttgtaagatgcctggcacagctctgagcatcaaatatctgtgccatgtgggagcacacgaggggacaagtggggaatagggtctcctctgtcctctgtccccaggctggcttctctcgtggtagaaggacccccacagcaccaggcctcataactaccctgctggtaaactgcaggtgctgtcacggcttcctgccttcgtatatgaaatgttccttggcagctggactgctgtttgtttaccgcacgcacagctctgctgcctcttggttacaccagtgagctattgctccatgacaagccacaccgaaatgtagcaagcacttattgttgcccacatgtgtcaagtcagttgagtgtttctgccaaccggggcctggcttggcccaccttggctgagcttgctctggtgctagggtcagctagacaggtcggcaggagaccagctgctctagaagagcctggacaggatgaattggttctccttccacgtgcatcttgcatccctccagccaaggatttgaacccaggtctcgtctgactccaaatgcaccaagaggatggagcccagagtgacacagaggaagaggcccctggatggatgcatggggaagatcacgggaattacaagtgacatcctgaagtatgatcacaaatgtttcaaattaagccttcctgctaagtttccagaggtgtgtggctcggacgaagtgtttccagaccctgatctactgcatgtcctgcctgttgctggttctttgcagcagtccattgaccaatgctgtctacagcttgagagcctctgcaggccagggctgctctgtgcacatcctacgttactattcaaactgcacagcagcatgaaaaacaggcccttcttttctctcatttacacatatgtgaagaagacacagcaagtgagaaaacgtgaccgaaagccacgcggacaggtggccgcagggccaaacccaacttccgtgatgtgatctggctacagtttggagcccacatatttcaatagttatccccaggcctggcacgtcaaagaggctccagaaatgtttgctgagtgagtgatgaatcagcaatttctgattttctcctaaacttagagaataagtggcttgtctgcagtcacccagggcgtccctgacagaggtacaagtaaagcccagatctctgcatctctggttcaaggccttttgtactacacaccgctgtctctttgtcatcattaaaagcaaggctcaagggacatgttttctagccttagttccccatctacaaaatgggcctcatggaatggaatgtctccacttcactccagcatcaacaagtggggaattctgatggattcaattcgacttctttccatggcgtgttctaagcagcctctttgttccagaagctgccctcagccagagttggataagccaatcctcactccccagcctcctctggatagggatgaagaccccactggggttggaagtgcagaggcagacaggtgtatggagtcacctgtaaattgattcaagtgagccaggaaagcagcaaaggaaagagaaacctgagtgacgacgtggtggaggaacagggctggaaagaggctgctggctgtctggcttcgcagctctggcctcctaatcagcctcgctcttgtctctggtgttctctggctcttgtccatctgtctgtgtttctttttgccagctattgactaatctttgctgaagctgagctagaattctggtgtttataagcaggtaactagctgagcactagttgataactttggagttagtggataaccacagggctgggctactaagctttttcagttgaaaaataaataaataaataaataaacaccacacccagctaatttttgtatttttagtagagacagggtttcaccgtgttagccaggatggactccatctcctgacctcgtgatccgcctacctcggcctcccaaagtgctgggattacaggcgtgagccaccacgcccggtcacctttgtcctgttttctacaggttagaagcaaggcacaagtcatacctacattcaaggagaggggaccatgcaaaggataaactgcagaaaggacgtggatgaagcagagaggcacgtgcctgtctcattcgcctctggatctgctgcatccaggactgtgccagcacaaagtgggagcccgataaatatttattgaagaaatgaaaggtgacaaaaggcagaaggagggagaccccaaaaagagttacactggaagaagagcccctccttccttcaagccaagtcatccccttgggctctcaccacttcagtttataccttgcctgtagtccagtctctccatcatcaattccatcagcacaaagacataatttaattccttctaccttaaaaaaacaaaacaaaacaaaacagctctccctctcttagggtgagatgaagtggttggcaacaggccaatgctactttcagaggcgtttgaatcagagtgactccattttgaataggggttgagtaaaataaggctgagacctactgggctgcattcccatgagcttaggcattctaagtcacaggatgagacaggaggtcagcacaagatacacgtcacaaagaccttgctgataaaacagattgtgataagaaaagccagtcaaaacccaccaaaaccaagatggcgacaaaagtgatctctggttgtcctcactgctgattattcactaattataaaattaacatgataaaagacactcccaccagcaccgtgacagtttacaaatgacatggacacatcaggaagttaccctatatgtctaaaaggggaggagccctcctttccaattgtccacccctttcctggaaaactcatgaataatccaccccttgtttagcatataatcaagaaataaccatgaaaatagccaaacccaagccctcagggctgctttgcctatggagtagccattctatattcctttactttcttaataaacttgctttcacttt

SEQ ID NO: 340524 - DNA, 5026 bp, Homo sapiens
ctcaccagggcatggaaaatttgccttcatgtcaaccaccaccttagcccttgactacccaacggactcttcccaagtcaacagccacttcctccctggggcttaacaggcattccttgaagcctgccccgggcagttagtccttcccttttgtgtgaactctcggctgttttcgttgtctgcacacagagcagtggtctagggagcgaagggttttgggaatggaccttttcctttcttagcttgctgtagggattgtgcttcagctaaggtaaagtggaaaaacagaagtacaaaagcaacagccccagatctaagggcaccgtagctctggaatctggattttattccagattcaaccctcagcagggagttgaagtggtcagccctgtgctttacaaggctgattgggcagcacccatagtagaattgtcaatataaagtaattgaaaggatcagaatccagggttttcgttgtttttaagtttttaagttttaaaaacaaagttgtttttgttcgtttttaagtttacttctctttaatcggtctcactttattgaccaggctggtttcgaactcctgggcttaagtgatttctcctgtctcagcttctcaaagtgctgggattacaggcgtgagccgctgcacccagcccagaatccagttttaaagagtttattcaagccaaaagctgggaatggccatctgagaaacacagactctaggaaaatggggccagggccctgaagttaaaagttaaagtcttgcttacataggcagaaagcaaagacatttagtaaccttgtagaacattttcttgtataacttttcttgttttaactttcttgtttaacattttctatgcaaggctggtttatgagttacaacctataattaattataggttgttcccctgcctccaccttgttttcttttctctacagcttgttttcatttcctttccaatttaagaatgtgtttaacattctatcccagacaatgtgatggtcatgaagtctctgtcagagaggaaagagggagttaatctataatgaagatcaacagtgaagaggaaaggggtcttccctggaacgcttcagtcatatacgacattttacacaacaataatggacctgtgtaaggaggtatgtgtgggagaagattccagaaggtcttgagacactccagatgaaggttggtgtggggctgtgctgctggagcaccagagagtgaaaagaggttatctccctctgtgccaggccagagtgcagtggtgcaatcacggctcactgtagtctcaacctcctgggctcaagagatcctcccacttcagcctcccaagcagctaagactacagacatgtccttaaccttggcacaacaaatctctaaatcgattgagacctgtctcagatacttcttggtttacaagatggaggctgaaattaaagagaaagatcctcactcaactcacagaggagcagaatgggaagaggacttagtgagaattccctgaacacaggagaaaaccgaagcccagagagtggatggccaagtccaaggtcacacagccaagtgcatccgagcagcgcaggatccaggtttcctgccccagtgctctttctgcagcccatgccacctgttttcatgctatctcagttcaccttccagctacacacctgcaatcagaaacagaaagtctgagagtgtgtgtggagccaaagaggggacagcagtggtgaggccagtttcatgtcttgtgatttattttctccctttctttttggactttaatcttaagtggacagcaatttggaacagtgtcagcaccttgttggattgtgctgtttgggagaggtgacacagagtattttaaaagagcaggttaagaacttttcacaaggaatcaattgagagaaaataaaatagaaacagactgtcccacatttgggctgagcaccaaacacatttttttttttttttttgagactgagtcttgctctgtcactcaggctggaatgcagtggcgcgatctcggctcactgcagccttcacctcccgggttcaagtgattcttctgcctcagcctcccaagtagctgggattacaggtgcccaccaccatgccaggctaatttttgtatttttagtagagacgaggtttcaccatgttggccaggctggtcttgaactcctgaccaagtgatccacctgcttcggcctcccaaagtgctgggattacaggcacgagccaccgcacctggcctcaaacaagctttttaattgcattcagaagtgcaccaactaggcacagacctctggcatggagacagaatgggaggttcttggtgtctggcctggtcttgcagaaatcagggagttgtggggaccaggcagccactgtgcatcagataggagtttcagcagcaggcaacagaaagcctgccaatgtagctgaaataagaagggcttatttttatccctgaacagaagcttccagcactggttcatcagatcagggcactgagctggcatccccatttatacagttttcctttccttcacctttgtaagatgcctggcacagctctgagcatcaaatatctgtgccatgtgggagcacacgaggggacaagtggggaatagggtctcctctgtcctctgtccccaggctggcttctctcgtggtagaaggacccccacagcaccaggcctcataactaccctgctggtaaactgcaggtgctgtcacggcttcctgccttcgtatatgaaatgttccttggcagctggactgctgtttgtttaccgcacgcacagctctgctgcctcttggttacaccagtgagctattgctccatgacaagccacaccgaaatgtagcaagcacttattgttgcccacatgtgtcaagtcagttgagtgtttctgccaaccggggcctggcttggcccaccttggctgagcttgctctggtgctagggtcagctagacaggtcggcaggagaccagctgctctagaagagcctggacaggatgaattggttctccttccacgtgcatcttgcatccctccagccaaggatttgaacccaggtctcgtctgactccaaatgcaccaagaggatggagcccagagtgacacagaggaagaggcccctggatggatgcatggggaaggttagaagcaaggcacaagtcatacctacattcaaggagaggggaccatgcaaaggataaactgcagagagacaacagatttgcatcccagacacattcacactgggccaagagcagctgccattgcagattcgagtcacgtccttttttccttccttctccttcttggagttacaacagaagctggggaggtgagagtgcagaaaggacgtggatgaagcagagaggcacgtgcctgtctcattcgcctctggatctgctgcatccaggactgtgccagcacaaagtgggagcccgataaatatttattgaagaaatgaaaggtgacaaaaggcagaaggagggagaccccaaaaagagagatgggatcccactatattgcacaggctggtctcaaactcctgagctcaagcgatcctcctgccttggcctcccacggtgctgagactacaggtgtgagccaccactcccagcctgatttatattttataaagaggcaacgatggagtacacagctgagcaatctcttgcatttctggaccttgagcatcaggaagcttagggagggtgaaaactcagaagaaagctcagagttgagacctttgattttttgcccagagagtccagctaacacactttataacccaaaaggccttacaaatatttcagagcagaggcagcatttttgcactggataaacaaaggtacggtaatttcttcatagtttattttcattacaagtaattcttttcctgaagaaaaatttatatttcagatttatttcccctctcaaaggggaggggagttataatattctgtttccatagcaccattcctcaagatcaaacccaggcaggcatttttacagcaccacacttccatatgtcattgctaatcctcgcaaccttgaggaaactgaggtgcaaaggggttgaggaatgtgttcaccatcccaaagccaacgaagtgccagaacccaaatccaagcttggctgtctcatccccaaggacgtactctttatgccgttccttatgacttttcatgcagcaggcgcaaggcagcaagaatttggctcttctgacatttatcaggcacctggtatgtgccaggcctactgtaaaccccaagatgacatggtccatgtctatccattcagcatcagagagactgttatcaggacttgaggcctgagacacagccctgaatcagatgcaggcctctggtgtttgcaaaggatgcgtgagtatgtgtatgtgtatgcgtgcattgtgtgtaggggtgtgtgtatgttgggggttgggggcagaaaatgctccctgaactgttggtattaaggcagatctttgatggagggactggggtgtggagacttgaaccctagtttcgaagtggggacctcgaacactggtatggccagcagacaggctggagttgctgaattgtcagctaggtctttaatccactccccttctctaaatcagggtggaattggactcagggctggttcagggctgaggtttccgggggatgaatgattccagacagtgggaaggggtgatggatgatgaacctggcaagtcacaggactatggacttggctgtatgttgcatgtatgtgtaagatctgagttgagacctttgatttttgcccagaaagatccagctaacatactatataagccagtgagaccagccagtgtctgttcattgcctctgccttgcccctatgcctgcccgcctcctatagcagggccctatagcataatgaaaatgcgaacaaccttttctctggacactggggaatctagtctggtggataaagatggatggctgttaaacgatcgca

SEQ ID NO: 340525 - DNA, 6615 bp, Homo sapiens
  misc_feature (5397)..(5397): n is a, c, g, or t
ctcaccagggcatggaaaatttgccttcatgtcaaccaccaccttagcccttgactacccaacggactcttcccaagtcaacagccacttcctccctggggcttaacaggcattccttgaagcctgccccgggcagttagtccttcccttttgtgtgaactctcggctgttttcgttgtctgcacacagagcagtggtctagggagcgaagggttttgggaatggaccttttcctttcttagcttgctgtagggattgtgcttcagctaaggtaaagtggaaaaacagaagtacaaaagcaacagccccagatctaagggcaccgtagctctggaatctggattttattccagattcaaccctcagcagggagttgaagtggtcagccctgtgctttacaaggctgattgggcagcacccatagtagaattgtcaatataaagtaattgaaaggatcagaatccagggttttcgttgtttttaagtttttaagttttaaaaacaaagttgtttttgttcgtttttaagtttacttctctttaatcggtctcactttattgaccaggctggtttcgaactcctgggcttaagtgatttctcctgtctcagcttctcaaagtgctgggattacaggcgtgagccgctgcacccagcccagaatccagttttaaagagtttattcaagccaaaagctgggaatggccatctgagaaacacagactctaggaaaatggggccagggccctgaagttaaaagttaaagtcttgcttacataggcagaaagcaaagacatttagtaaccttgtagaacattttcttgtataacttttcttgttttaactttcttgtttaacattttctatgcaaggctggtttatgagttacaacctataattaattataggttgttcccctgcctccaccttgttttcttttctctacagcttgttttcatttcctttccaatttaagaatgtgtttaacattctatcccagacaatgtgatggtcatgaagtctctgtcagagaggaaagagggagttaatctataatgaagatcaacagtgaagaggaaaggggtcttccctggaacgcttcagtcatatacgacattttacacaacaataatggacctgtgtaaggaggtatgtgtgggagaagattccagaaggtcttgagacactccagatgaaggttggtgtggggctgtgctgctggagcaccagagagtgaaaagaggttatctccctctgtgccaggccagagtgcagtggtgcaatcacggctcactgtagtctcaacctcctgggctcaagagatcctcccacttcagcctcccaagcagctaagactacagacatgtccttaaccttggcacaacaaatctctaaatcgattgagacctgtctcagatacttcttggtttacaagatggaggctgaaattaaagagaaagatcctcactcaactcacagaggagcagaatgggaagaggacttagtgagaattccctgaacacaggagaaaaccgaagcccagagagtggatggccaagtccaaggtcacacagccaagtgcatccgagcagcgcaggatccaggtttcctgccccagtgctctttctgcagcccatgccacctgttttcatgctatctcagttcaccttccagctacacacctgcaatcagaaacagaaagtctgagagtgtgtgtggagccaaagaggggacagcagtggtgaggccagtttcatgtcttgtgatttattttctccctttctttttggactttaatcttaagtggacagcaatttggaacagtgtcagcaccttgttggattgtgctgtttgggagaggtgacacagagtattttaaaagagcaggttaagaacttttcacaaggaatcaattgagagaaaataaaatagaaacagactgtcccacatttgggctgagcaccaaacacatttttttttttttttttgagactgagtcttgctctgtcactcaggctggaatgcagtggcgcgatctcggctcactgcagccttcacctcccgggttcaagtgattcttctgcctcagcctcccaagtagctgggattacaggtgcccaccaccatgccaggctaatttttgtatttttagtagagacgaggtttcaccatgttggccaggctggtcttgaactcctgaccaagtgatccacctgcttcggcctcccaaagtgctgggattacaggcacgagccaccgcacctggcctcaaacaagctttttaattgcattcagaagtgcaccaactaggcacagacctctggcatggagacagaatgggaggttcttggtgtctggcctggtcttgcagaaatcagggagttgtggggaccaggcagccactgtgcatcagataggagtttcagcagcaggcaacagaaagcctgccaatgtagctgaaataagaagggcttatttttatccctgaacagaagcttccagcactggttcatcagatcagggcactgagctggcatccccatttatacagttttcctttccttcacctttgtaagatgcctggcacagctctgagcatcaaatatctgtgccatgtgggagcacacgaggggacaagtggggaatagggtctcctctgtcctctgtccccaggctggcttctctcgtggtagaaggacccccacagcaccaggcctcataactaccctgctggtaaactgcaggtgctgtcacggcttcctgccttcgtatatgaaatgttccttggcagctggactgctgtttgtttaccgcacgcacagctctgctgcctcttggttacaccagtgagctattgctccatgacaagccacaccgaaatgtagcaagcacttattgttgcccacatgtgtcaagtcagttgagtgtttctgccaaccggggcctggcttggcccaccttggctgagcttgctctggtgctagggtcagctagacaggtcggcaggagaccagctgctctagaagagcctggacaggatgaattggttctccttccacgtgcatcttgcatccctccagccaaggatttgaacccaggtctcgtctgactccaaatgcaccaagaggatggagcccagagtgacacagaggaagaggcccctggatggatgcatggggaagatcacgggaattacaagtgacatcctgaagtatgatcacaaatgtttcaaattaagccttcctgctaagtttccagaggtgtgtggctcggacgaagtgtttccagaccctgatctactgcatgtcctgcctgttgctggttctttgcagcagtccattgaccaatgctgtctacagcttgagagcctctgcaggccagggctgctctgtgcacatcctacgttactattcaaactgcacagcagcatgaaaaacaggcccttcttttctctcatttacacatatgtgaagaagacacagcaagtgagaaaacgtgaccgaaagccacgcggacaggtggccgcagggccaaacccaacttccgtgatgtgatctggctacagtttggagcccacatatttcaatagttatccccaggcctggcacgtcaaagaggctccagaaatgtttgctgagtgagtgatgaatcagcaatttctgattttctcctaaacttagagaataagtggcttgtctgcagtcacccagggcgtccctgacagaggtacaagtaaagcccagatctctgcatctctggttcaaggccttttgtactacacaccgctgtctctttgtcatcattaaaagcaaggctcaagggacatgttttctagccttagttccccatctacaaaatgggcctcatggaatggaatgtctccacttcactccagcatcaacaagtggggaattctgatggattcaattcgacttctttccatggcgtgttctaagcagcctctttgttccagaagctgccctcagccagagttggataagccaatcctcactccccagcctcctctggatagggatgaagaccccactggggttggaagtgcagaggcagacaggtgtatggagtcacctgtaaattgattcaagtgagccaggaaagcagcaaaggaaagagaaacctgagtgacgacgtggtggaggaacagggctggaaagaggctgctggctgtctggcttcgcagctctggcctcctaatcagcctcgctcttgtctctggtgttctctggctcttgtccatctgtctgtgtttctttttgccagctattgactaatctttgctgaagctgagctagaattctggtgtttataagcaggtaactagctgagcactagttgataactttggagttagtggataaccacagggctgggctactaagctttttcagttgaaaaataaataaataaataaataaacaccacacccagctaatttttgtatttttagtagagacagggtttcaccgtgttagccaggatggactccatctcctgacctcgtgatccgcctacctcggcctcccaaagtgctgggattacaggcgtgagccaccacgcccggtcacctttgtcctgttttctacaggttagaagcaaggcacaagtcatacctacattcaaggagaggggaccatgcaaaggataaactgcagagagacaacagatttgcatcccagacacattcacactgggccaagagcagctgccattgcagattcgagtcacgtccttttttccttccttctccttcttggagttacaacagaagctggggaggtgagagtgcagaaaggacgtggatgaagcagagaggcacgtgcctgtctcattcgcctctggatctgctgcatccaggactgtgccagcacaaagtgggagcccgataaatatttattgaagaaatgaaaggtgacaaaaggcagaaggagggagaccccaaaaagagaccccaggctccagaagcagatgaggagacaaacagaagagcagaagaatggcagaatggcacagcagagagaagaaaaggaacatctgaatgttgagaggaatttggctgggggcggttggagaggagattagccactggacagccaaactccaggggaagatcatcttcccactccatcccccttccagctccccatccatcctgctgagagccacctccaccactcagtgaaaccgctgcattcatccttcaagtttatgtgtgacctgattcttcctggacattggacaaagacctaggtccagtgaactgtctaacacttaagtcatccacggacagcaaggctaacagaatgctgtaacatgtgcccacttggactctgggagttgcagacacccacccgtaggtgctgccatgggtccggagcccanaaagtgcttgccctggctcctgcacctgcccgtctgcatgctccccctccggtaaggggtttgaggatgtggcggctgaacataagagctatgcccctgtcacacatcatgggacaggggtcagggaactctcccatttcactttcaaatattccaggtcccctttttgttcgggagccagagtctagtggagacagagatagaaaccctgaaataggatccaggcaatataaacctacacgctgtaagccaagtcagagtgaggctgatgtgataacaaaagtctgaatacaaggtgggagacaattattctgactgaaagggaggcaagagttctgccataggcttgatgctgtgtgcccctggcttcctaactcatttgcaaatggaaaatactattccattgtaggaaccttctttttccatttgtctggggaaggagaaagaatggctgggctgaatgaatttatcccttggtcctcttccaacaaagctcagctatgaaagataaatccagctctccccaccccctctcagtggagctggggagaaatcaaaagcccctctgccaataatgagaccaaagtttgcaagggcaggacgagcccgtgctaacagagaaagtgttgtttcctcaatttggttttagactgtcttgtcctatgggggagaaaagatctgcccttgggagaggtgccaactttatagatctattaataaaagaactggcaggcttacagttcttgccaatgaggaaacttgaatgagagaagccaggctcaaccttggccaacagactggagcccatcaccctaacttcaccccgcttctccttacccaaccatcaaaggctaggcagcacccacccagcagcttccacctggctgaagcctgcacctgcttcagaccaagggttagatggaaatttggcatgggaagagagggctcacctgtgggcaggatagactctatccaagaaggagaactgaaaaatgaaaacctatgagacaaggggtgatcctgaaggcaggcaggagaaagggctggagggagaggcactggggaatttttcctggtgaatactgaagttactagatgttttgtcttgcaaaactcaagggaaaactctcaaactctaatgtttgtctattctgtgtccaaactgtccttttgaaacggacccacctttcagtaaagaaacttgcattggcctgccca

SEQ ID NO: 340526 - DNA, 4949 bp, Homo sapiens
ctcaccagggcatggaaaatttgccttcatgtcaaccaccaccttagcccttgactacccaacggactcttcccaagtcaacagccacttcctccctggggcttaacaggcattccttgaagcctgccccgggcagttagtccttcccttttgtgtgaactctcggctgttttcgttgtctgcacacagagcagtggtctagggagcgaagggttttgggaatggaccttttcctttcttagcttgctgtagggattgtgcttcagctaaggtaaagtggaaaaacagaagtacaaaagcaacagccccagatctaagggcaccgtagctctggaatctggattttattccagattcaaccctcagcagggagttgaagtggtcagccctgtgctttacaaggctgattgggcagcacccatagtagaattgtcaatataaagtaattgaaaggatcagaatccagggttttcgttgtttttaagtttttaagttttaaaaacaaagttgtttttgttcgtttttaagtttacttctctttaatcggtctcactttattgaccaggctggtttcgaactcctgggcttaagtgatttctcctgtctcagcttctcaaagtgctgggattacaggcgtgagccgctgcacccagcccagaatccagttttaaagagtttattcaagccaaaagctgggaatggccatctgagaaacacagactctaggaaaatggggccagggccctgaagttaaaagttaaagtcttgcttacataggcagaaagcaaagacatttagtaaccttgtagaacattttcttgtataacttttcttgttttaactttcttgtttaacattttctatgcaaggctggtttatgagttacaacctataattaattataggttgttcccctgcctccaccttgttttcttttctctacagcttgttttcatttcctttccaatttaagaatgtgtttaacattctatcccagacaatgtgatggtcatgaagtctctgtcagagaggaaagagggagttaatctataatgaagatcaacagtgaagaggaaaggggtcttccctggaacgcttcagtcatatacgacattttacacaacaataatggacctgtgtaaggaggtatgtgtgggagaagattccagaaggtcttgagacactccagatgaaggttggtgtggggctgtgctgctggagcaccagagagtgaaaagaggttatctccctctgtgccaggccagagtgcagtggtgcaatcacggctcactgtagtctcaacctcctgggctcaagagatcctcccacttcagcctcccaagcagctaagactacagacatgtccttaaccttggcacaacaaatctctaaatcgattgagacctgtctcagatacttcttggtttacaagatggaggctgaaattaaagagaaagatcctcactcaactcacagaggagcagaatgggaagaggacttagtgagaattccctgaacacaggagaaaaccgaagcccagagagtggatggccaagtccaaggtcacacagccaagtgcatccgagcagcgcaggatccaggtttcctgccccagtgctctttctgcagcccatgccacctgttttcatgctatctcagttcaccttccagctacacacctgcaatcagaaacagaaagtctgagagtgtgtgtggagccaaagaggggacagcagtggtgaggccagtttcatgtcttgtgatttattttctccctttctttttggactttaatcttaagtggacagcaatttggaacagtgtcagcaccttgttggattgtgctgtttgggagaggtgacacagagtattttaaaagagcaggttaagaacttttcacaaggaatcaattgagagaaaataaaatagaaacagactgtcccacatttgggctgagcaccaaacacatttttttttttttttttgagactgagtcttgctctgtcactcaggctggaatgcagtggcgcgatctcggctcactgcagccttcacctcccgggttcaagtgattcttctgcctcagcctcccaagtagctgggattacaggtgcccaccaccatgccaggctaatttttgtatttttagtagagacgaggtttcaccatgttggccaggctggtcttgaactcctgaccaagtgatccacctgcttcggcctcccaaagtgctgggattacaggcacgagccaccgcacctggcctcaaacaagctttttaattgcattcagaagtgcaccaactaggcacagacctctggcatggagacagaatgggaggttcttggtgtctggcctggtcttgcagaaatcagggagttgtggggaccaggcagccactgtgcatcagataggagtttcagcagcaggcaacagaaagcctgccaatgtagctgaaataagaagggcttatttttatccctgaacagaagcttccagcactggttcatcagatcagggcactgagctggcatccccatttatacagttttcctttccttcacctttgtaagatgcctggcacagctctgagcatcaaatatctgtgccatgtgggagcacacgaggggacaagtggggaatagggtctcctctgtcctctgtccccaggctggcttctctcgtggtagaaggacccccacagcaccaggcctcataactaccctgctggtaaactgcaggtgctgtcacggcttcctgccttcgtatatgaaatgttccttggcagctggactgctgtttgtttaccgcacgcacagctctgctgcctcttggttacaccagtgagctattgctccatgacaagccacaccgaaatgtagcaagcacttattgttgcccacatgtgtcaagtcagttgagtgtttctgccaaccggggcctggcttggcccaccttggctgagcttgctctggtgctagggtcagctagacaggtcggcaggagaccagctgctctagaagagcctggacaggatgaattggttctccttccacgtgcatcttgcatccctccagccaaggatttgaacccaggtctcgtctgactccaaatgcaccaagaggatggagcccagagtgacacagaggaagaggcccctggatggatgcatggggaagatcacgggaattacaagtgacatcctgaagtatgatcacaaatgtttcaaattaagccttcctgctaagtttccagaggtgtgtggctcggacgaagtgtttccagaccctgatctactgcatgtcctgcctgttgctggttctttgcagcagtccattgaccaatgctgtctacagcttgagagcctctgcaggccagggctgctctgtgcacatcctacgttactattcaaactgcacagcagcatgaaaaacaggcccttcttttctctcatttacacatatgtgaagaagacacagcaagtgagaaaacgtgaccgaaagccacgcggacaggtggccgcagggccaaacccaacttccgtgatgtgatctggctacagtttggagcccacatatttcaatagttatccccaggcctggcacgtcaaagaggctccagaaatgtttgctgagttagaagcaaggcacaagtcatacctacattcaaggagaggggaccatgcaaaggataaactgcagagagacaacagatttgcatcccagacacattcacactgggccaagagcagctgccattgcagattcgagtcacgtccttttttccttccttctccttcttggagttacaacagaagctggggaggtgagagtgcagaaaggacgtggatgaagcagagaggcacgtgcctgtctcattcgcctctggatctgctgcatccaggactgtgccagcacaaagtgggagcccgataaatatttattgaagaaatgaaaggtgacaaaaggcagaaggagggagaccccaaaaagagtatgaacccagcatcacagtgcacttgtggcagatggcagtgcatacccgggagctactctcctccggccagatgcccttctcccagctgcccgccgtgtggcagctctaccccgggaggaagtaccgagcagcggattccagtttctgggaaatagcagaccatggccagattgactctatggagcagctggtcctaacatatcagccggagaggaaagactgacactgggagtggctggccctgctggccctgcctcttctggcctggtgtctcctcatgccccctcagtgaggatcttcatgtacctgctcttctgtttgcacacccagcatagcctccttgcaggcagaaggcagtagggcccctgcacactcagtttctctcgttttccttagttatcagtcctgtcctgtcccactcaggtctgtacttagggcagctggcctggatgggcttcactggggccctgtctgtgtgctgagccagtttcccctgctggctgcaagctgtgggttctttctcctctgtgcccctcatgctgatcttctagatgccactcccaaatccccttcatacccaccaggatgtgtgcccagccaggcctccagcacccccagtgcagctcgtgattggaaactcaccatcggcaggcagtggttcggtttaagagatggcattagagggagcccagtctggatgtggacttggatgccctgtgggtatcagttctgctgacactttggcccgaaatagatccagtgctgagcaagcaatgtacaccggagcctcagtgagcccatctgcacagtggggagcatggagggatgggtttggcctgtgcttctgcttattcagtccttcagctcacggaagggatgctagtccgtgaaggtgacctcacagtactggttaattaaactttattgctcactgtccacttttgtgctgaatt

SEQ ID NO: 340527 - DNA, 4590 bp, Homo sapiens
ctcaccagggcatggaaaatttgccttcatgtcaaccaccaccttagcccttgactacccaacggactcttcccaagtcaacagccacttcctccctggggcttaacaggcattccttgaagcctgccccgggcagttagtccttcccttttgtgtgaactctcggctgttttcgttgtctgcacacagagcagtggtctagggagcgaagggttttgggaatggaccttttcctttcttagcttgctgtagggattgtgcttcagctaaggtaaagtggaaaaacagaagtacaaaagcaacagccccagatctaagggcaccgtagctctggaatctggattttattccagattcaaccctcagcagggagttgaagtggtcagccctgtgctttacaaggctgattgggcagcacccatagtagaattgtcaatataaagtaattgaaaggatcagaatccagggttttcgttgtttttaagtttttaagttttaaaaacaaagttgtttttgttcgtttttaagtttacttctctttaatcggtctcactttattgaccaggctggtttcgaactcctgggcttaagtgatttctcctgtctcagcttctcaaagtgctgggattacaggcgtgagccgctgcacccagcccagaatccagttttaaagagtttattcaagccaaaagctgggaatggccatctgagaaacacagactctaggaaaatggggccagggccctgaagttaaaagttaaagtcttgcttacataggcagaaagcaaagacatttagtaaccttgtagaacattttcttgtataacttttcttgttttaactttcttgtttaacattttctatgcaaggctggtttatgagttacaacctataattaattataggttgttcccctgcctccaccttgttttcttttctctacagcttgttttcatttcctttccaatttaagaatgtgtttaacattctatcccagacaatgtgatggtcatgaagtctctgtcagagaggaaagagggagttaatctataatgaagatcaacagtgaagaggaaaggggtcttccctggaacgcttcagtcatatacgacattttacacaacaataatggacctgtgtaaggaggtatgtgtgggagaagattccagaaggtcttgagacactccagatgaaggttggtgtggggctgtgctgctggagcaccagagagtgaaaagaggttatctccctctgtgccaggccagagtgcagtggtgcaatcacggctcactgtagtctcaacctcctgggctcaagagatcctcccacttcagcctcccaagcagctaagactacagacatgtccttaaccttggcacaacaaatctctaaatcgattgagacctgtctcagatacttcttggtttacaagatggaggctgaaattaaagagaaagatcctcactcaactcacagaggagcagaatgggaagaggacttagtgagaattccctgaacacaggagaaaaccgaagcccagagagtggatggccaagtccaaggtcacacagccaagtgcatccgagcagcgcaggatccaggtttcctgccccagtgctctttctgcagcccatgccacctgttttcatgctatctcagttcaccttccagctacacacctgcaatcagaaacagaaagtctgagagtgtgtgtggagccaaagaggggacagcagtggtgaggccagtttcatgtcttgtgatttattttctccctttctttttggactttaatcttaagtggacagcaatttggaacagtgtcagcaccttgttggattgtgctgtttgggagaggtgacacagagtattttaaaagagcaggttaagaacttttcacaaggaatcaattgagagaaaataaaatagaaacagactgtcccacatttgggctgagcaccaaacacatttttttttttttttttgagactgagtcttgctctgtcactcaggctggaatgcagtggcgcgatctcggctcactgcagccttcacctcccgggttcaagtgattcttctgcctcagcctcccaagtagctgggattacaggtgcccaccaccatgccaggctaatttttgtatttttagtagagacgaggtttcaccatgttggccaggctggtcttgaactcctgaccaagtgatccacctgcttcggcctcccaaagtgctgggattacaggcacgagccaccgcacctggcctcaaacaagctttttaattgcattcagaagtgcaccaactaggcacagacctctggcatggagacagaatgggaggttcttggtgtctggcctggtcttgcagaaatcagggagttgtggggaccaggcagccactgtgcatcagataggagtttcagcagcaggcaacagaaagcctgccaatgtagctgaaataagaagggcttatttttatccctgaacagaagcttccagcactggttcatcagatcagggcactgagctggcatccccatttatacagttttcctttccttcacctttgtaagatgcctggcacagctctgagcatcaaatatctgtgccatgtgggagcacacgaggggacaagtggggaatagggtctcctctgtcctctgtccccaggctggcttctctcgtggtagaaggacccccacagcaccaggcctcataactaccctgctggtaaactgcaggtgctgtcacggcttcctgccttcgtatatgaaatgttccttggcagctggactgctgtttgtttaccgcacgcacagctctgctgcctcttggttacaccagtgagctattgctccatgacaagccacaccgaaatgtagcaagcacttattgttgcccacatgtgtcaagtcagttgagtgtttctgccaaccggggcctggcttggcccaccttggctgagcttgctctggtgctagggtcagctagacaggtcggcaggagaccagctgctctagaagagcctggacaggatgaattggttctccttccacgtgcatcttgcatccctccagccaaggatttgaacccaggtctcgtctgactccaaatgcaccaagaggatggagcccagagtgacacagaggaagaggcccctggatggatgcatggggaaggttagaagcaaggcacaagtcatacctacattcaaggagaggggaccatgcaaaggataaactgcagagagacaacagatttgcatcccagacacattcacactgggccaagagcagctgccattgcagattcgagtcacgtccttttttccttccttctccttcttggagttacaacagaagctggggaggtgagagtgcagaaaggacgtggatgaagcagagaggcacgtgcctgtctcattcgcctctggatctgctgcatccaggactgtgccagcacaaagtgggagcccgataaatatttattgaagaaatgaaaggtgacaaaaggcagaaggagggagaccccaaaaagaggagagacaaagtttaatcatgtgggccaggctggttttgaactcctgacctcaagtgatctgcccaccttggcctcccaaagtgctgggattacagtatgaacccagcatcacagtgcacttgtggcagatggcagtgcatacccgggagctactctcctccggccagatgcccttctcccagctgcccgccgtgtggcagctctaccccgggaggaagtaccgagcagcggattccagtttctgggaaatagcagaccatggccagattgactctatggagcagctggtcctaacatatcagccggagaggaaagactgacactgggagtggctggccctgctggccctgcctcttctggcctggtgtctcctcatgccccctcagtgaggatcttcatgtacctgctcttctgtttgcacacccagcatagcctccttgcaggcagaaggcagtagggcccctgcacactcagtttctctcgttttccttagttatcagtcctgtcctgtcccactcaggtctgtacttagggcagctggcctggatgggcttcactggggccctgtctgtgtgctgagccagtttcccctgctggctgcaagctgtgggttctttctcctctgtgcccctcatgctgatcttctagatgccactcccaaatccccttcatacccaccaggatgtgtgcccagccaggcctccagcacccccagtgcagctcgtgattggaaactcaccatcggcaggcagtggttcggtttaagagatggcattagagggagcccagtctggatgtggacttggatgccctgtgggtatcagttctgctgacactttggcccgaaatagatccagtgctgagcaagcaatgtacaccggagcctcagtgagcccatctgcacagtggggagcatggagggatgggtttggcctgtgcttctgcttattcagtccttcagctcacggaagggatgctagtccgtgaaggtgacctcacagtactggttaattaaactttattgctcactgtccacttttgtgctgaatt

SEQ ID NO: 340528 - DNA, 5470 bp, Homo sapiens
ctcaccagggcatggaaaatttgccttcatgtcaaccaccaccttagcccttgactacccaacggactcttcccaagtcaacagccacttcctccctggggcttaacaggcattccttgaagcctgccccgggcagttagtccttcccttttgtgtgaactctcggctgttttcgttgtctgcacacagagcagtggtctagggagcgaagggttttgggaatggaccttttcctttcttagcttgctgtagggattgtgcttcagctaaggtaaagtggaaaaacagaagtacaaaagcaacagccccagatctaagggcaccgtagctctggaatctggattttattccagattcaaccctcagcagggagttgaagtggtcagccctgtgctttacaaggctgattgggcagcacccatagtagaattgtcaatataaagtaattgaaaggatcagaatccagggttttcgttgtttttaagtttttaagttttaaaaacaaagttgtttttgttcgtttttaagtttacttctctttaatcggtctcactttattgaccaggctggtttcgaactcctgggcttaagtgatttctcctgtctcagcttctcaaagtgctgggattacaggcgtgagccgctgcacccagcccagaatccagttttaaagagtttattcaagccaaaagctgggaatggccatctgagaaacacagactctaggaaaatggggccagggccctgaagttaaaagttaaagtcttgcttacataggcagaaagcaaagacatttagtaaccttgtagaacattttcttgtataacttttcttgttttaactttcttgtttaacattttctatgcaaggctggtttatgagttacaacctataattaattataggttgttcccctgcctccaccttgttttcttttctctacagcttgttttcatttcctttccaatttaagaatgtgtttaacattctatcccagacaatgtgatggtcatgaagtctctgtcagagaggaaagagggagttaatctataatgaagatcaacagtgaagaggaaaggggtcttccctggaacgcttcagtcatatacgacattttacacaacaataatggacctgtgtaaggaggtatgtgtgggagaagattccagaaggtcttgagacactccagatgaaggttggtgtggggctgtgctgctggagcaccagagagtgaaaagaggttatctccctctgtgccaggccagagtgcagtggtgcaatcacggctcactgtagtctcaacctcctgggctcaagagatcctcccacttcagcctcccaagcagctaagactacagacatgtccttaaccttggcacaacaaatctctaaatcgattgagacctgtctcagatacttcttggtttacaagatggaggctgaaattaaagagaaagatcctcactcaactcacagaggagcagaatgggaagaggacttagtgagaattccctgaacacaggagaaaaccgaagcccagagagtggatggccaagtccaaggtcacacagccaagtgcatccgagcagcgcaggatccaggtttcctgccccagtgctctttctgcagcccatgccacctgttttcatgctatctcagttcaccttccagctacacacctgcaatcagaaacagaaagtctgagagtgtgtgtggagccaaagaggggacagcagtggtgaggccagtttcatgtcttgtgatttattttctccctttctttttggactttaatcttaagtggacagcaatttggaacagtgtcagcaccttgttggattgtgctgtttgggagaggtgacacagagtattttaaaagagcaggttaagaacttttcacaaggaatcaattgagagaaaataaaatagaaacagactgtcccacatttgggctgagcaccaaacacatttttttttttttttttgagactgagtcttgctctgtcactcaggctggaatgcagtggcgcgatctcggctcactgcagccttcacctcccgggttcaagtgattcttctgcctcagcctcccaagtagctgggattacaggtgcccaccaccatgccaggctaatttttgtatttttagtagagacgaggtttcaccatgttggccaggctggtcttgaactcctgaccaagtgatccacctgcttcggcctcccaaagtgctgggattacaggcacgagccaccgcacctggcctcaaacaagctttttaattgcattcagaagtgcaccaactaggcacagacctctggcatggagacagaatgggaggttcttggtgtctggcctggtcttgcagaaatcagggagttgtggggaccaggcagccactgtgcatcagataggagtttcagcagcaggcaacagaaagcctgccaatgtagctgaaataagaagggcttatttttatccctgaacagaagcttccagcactggttcatcagatcagggcactgagctggcatccccatttatacagttttcctttccttcacctttgtaagatgcctggcacagctctgagcatcaaatatctgtgccatgtgggagcacacgaggggacaagtggggaatagggtctcctctgtcctctgtccccaggctggcttctctcgtggtagaaggacccccacagcaccaggcctcataactaccctgctggtaaactgcaggtgctgtcacggcttcctgccttcgtatatgaaatgttccttggcagctggactgctgtttgtttaccgcacgcacagctctgctgcctcttggttacaccagtgagctattgctccatgacaagccacaccgaaatgtagcaagcacttattgttgcccacatgtgtcaagtcagttgagtgtttctgccaaccggggcctggcttggcccaccttggctgagcttgctctggtgctagggtcagctagacaggtcggcaggagaccagctgctctagaagagcctggacaggatgaattggttctccttccacgtgcatcttgcatccctccagccaaggatttgaacccaggtctcgtctgactccaaatgcaccaagaggatggagcccagagtgacacagaggaagaggcccctggatggatgcatggggaagatcacgggaattacaagtgacatcctgaagtatgatcacaaatgtttcaaattaagccttcctgctaagtttccagaggtgtgtggctcggacgaagtgtttccagaccctgatctactgcatgtcctgcctgttgctggttctttgcagcagtccattgaccaatgctgtctacagcttgagagcctctgcaggccagggctgctctgtgcacatcctacgttactattcaaactgcacagcagcatgaaaaacaggcccttcttttctctcatttacacatatgtgaagaagacacagcaagtgagaaaacgtgaccgaaagccacgcggacaggtggccgcagggccaaacccaacttccgtgatgtgatctggctacagtttggagcccacatatttcaatagttatccccaggcctggcacgtcaaagaggctccagaaatgtttgctgagtgagtgatgaatcagcaatttctgattttctcctaaacttagagaataagtggcttgtctgcagtcacccagggcgtccctgacagaggtacaagtaaagcccagatctctgcatctctggttcaaggccttttgtactacacaccgctgtctctttgtcatcattaaaagcaaggctcaagggacatgttttctagccttagttccccatctacaaaatgggcctcatggaatggaatgtctccacttcactccagcatcaacaagtggggaattctgatggattcaattcgacttctttccatggcgtgttctaagcagcctctttgttccagaagctgccctcagccagagttggataagccaatcctcactccccagcctcctctggatagggatgaagaccccactggggttggaagtgcagaggcagacaggtgtatggagtcacctgtaaattgattcaagtgagccaggaaagcagcaaaggaaagagaaacctgagtgacgacgtggtggaggaacagggctggaaagaggctgctggctgtctggcttcgcagctctggcctcctaatcagcctcgctcttgtctctggtgttctctggctcttgtccatctgtctgtgtttctttttgccagctattgactaatctttgctgaagctgagctagaattctggtgtttataagcaggtaactagctgagcactagttgataactttggagttagtggataaccacagggctgggctactaagctttttcagttgaaaaataaataaataaataaataaacaccacacccagctaatttttgtatttttagtagagacagggtttcaccgtgttagccaggatggactccatctcctgacctcgtgatccgcctacctcggcctcccaaagtgctgggattacaggcgtgagccaccacgcccggtcacctttgtcctgttttctacaggttagaagcaaggcacaagtcatacctacattcaaggagaggggaccatgcaaaggataaactgcaggtgaagaacttgagagctattttagaagctgccttccacactttacaatctactttgcagctatactgagctcttagcaactccctgggcctgctgagcacctcttgcctttctgcctttgcgtatgctgttccctctgcctggaattccatgtcttctgcctttgcccacctcatcttaaggcctctgcttagatgcaatttctttgggctcttattagcagcatccaaatctgtgctggtttcttctcacgcttactctgcatcataatttttctgtttactcgttaatcccctcccactcctgccagtacctaaagtaaaatctacacgggcttggcacattgtggatgctcaatgaagatttgttaaatgagtgaatgattaaatgaaataagccccagcttggaacccagagctgtaatttccggttgtggtccctgtcccctgcccaggggctgtctaagggctcatctctcccaggagcccctgtatcatctcagtaactagaccagtaccatatccgacttcccctgactttgaaataattttcacctgcaatcaggtgcgcttccctagaacctctctcgctgttctttgcctttctccttcccccgccttgtatctccgtggtcctgccaaaaatcagaagctcattattaaaccagaagcttccttgcattatcccagagactacagacagaaaatatttgcttctatctcaactgaggactgacatagtaaagactccttgagatgttagctgtcaaggaggggaataaaagtttttcatctgcatga

SEQ ID NO: 340529 - DNA, 6813 bp, Homo sapiens
  misc_feature (5397)..(5397): n is a, c, g, or t
ctcaccagggcatggaaaatttgccttcatgtcaaccaccaccttagcccttgactacccaacggactcttcccaagtcaacagccacttcctccctggggcttaacaggcattccttgaagcctgccccgggcagttagtccttcccttttgtgtgaactctcggctgttttcgttgtctgcacacagagcagtggtctagggagcgaagggttttgggaatggaccttttcctttcttagcttgctgtagggattgtgcttcagctaaggtaaagtggaaaaacagaagtacaaaagcaacagccccagatctaagggcaccgtagctctggaatctggattttattccagattcaaccctcagcagggagttgaagtggtcagccctgtgctttacaaggctgattgggcagcacccatagtagaattgtcaatataaagtaattgaaaggatcagaatccagggttttcgttgtttttaagtttttaagttttaaaaacaaagttgtttttgttcgtttttaagtttacttctctttaatcggtctcactttattgaccaggctggtttcgaactcctgggcttaagtgatttctcctgtctcagcttctcaaagtgctgggattacaggcgtgagccgctgcacccagcccagaatccagttttaaagagtttattcaagccaaaagctgggaatggccatctgagaaacacagactctaggaaaatggggccagggccctgaagttaaaagttaaagtcttgcttacataggcagaaagcaaagacatttagtaaccttgtagaacattttcttgtataacttttcttgttttaactttcttgtttaacattttctatgcaaggctggtttatgagttacaacctataattaattataggttgttcccctgcctccaccttgttttcttttctctacagcttgttttcatttcctttccaatttaagaatgtgtttaacattctatcccagacaatgtgatggtcatgaagtctctgtcagagaggaaagagggagttaatctataatgaagatcaacagtgaagaggaaaggggtcttccctggaacgcttcagtcatatacgacattttacacaacaataatggacctgtgtaaggaggtatgtgtgggagaagattccagaaggtcttgagacactccagatgaaggttggtgtggggctgtgctgctggagcaccagagagtgaaaagaggttatctccctctgtgccaggccagagtgcagtggtgcaatcacggctcactgtagtctcaacctcctgggctcaagagatcctcccacttcagcctcccaagcagctaagactacagacatgtccttaaccttggcacaacaaatctctaaatcgattgagacctgtctcagatacttcttggtttacaagatggaggctgaaattaaagagaaagatcctcactcaactcacagaggagcagaatgggaagaggacttagtgagaattccctgaacacaggagaaaaccgaagcccagagagtggatggccaagtccaaggtcacacagccaagtgcatccgagcagcgcaggatccaggtttcctgccccagtgctctttctgcagcccatgccacctgttttcatgctatctcagttcaccttccagctacacacctgcaatcagaaacagaaagtctgagagtgtgtgtggagccaaagaggggacagcagtggtgaggccagtttcatgtcttgtgatttattttctccctttctttttggactttaatcttaagtggacagcaatttggaacagtgtcagcaccttgttggattgtgctgtttgggagaggtgacacagagtattttaaaagagcaggttaagaacttttcacaaggaatcaattgagagaaaataaaatagaaacagactgtcccacatttgggctgagcaccaaacacatttttttttttttttttgagactgagtcttgctctgtcactcaggctggaatgcagtggcgcgatctcggctcactgcagccttcacctcccgggttcaagtgattcttctgcctcagcctcccaagtagctgggattacaggtgcccaccaccatgccaggctaatttttgtatttttagtagagacgaggtttcaccatgttggccaggctggtcttgaactcctgaccaagtgatccacctgcttcggcctcccaaagtgctgggattacaggcacgagccaccgcacctggcctcaaacaagctttttaattgcattcagaagtgcaccaactaggcacagacctctggcatggagacagaatgggaggttcttggtgtctggcctggtcttgcagaaatcagggagttgtggggaccaggcagccactgtgcatcagataggagtttcagcagcaggcaacagaaagcctgccaatgtagctgaaataagaagggcttatttttatccctgaacagaagcttccagcactggttcatcagatcagggcactgagctggcatccccatttatacagttttcctttccttcacctttgtaagatgcctggcacagctctgagcatcaaatatctgtgccatgtgggagcacacgaggggacaagtggggaatagggtctcctctgtcctctgtccccaggctggcttctctcgtggtagaaggacccccacagcaccaggcctcataactaccctgctggtaaactgcaggtgctgtcacggcttcctgccttcgtatatgaaatgttccttggcagctggactgctgtttgtttaccgcacgcacagctctgctgcctcttggttacaccagtgagctattgctccatgacaagccacaccgaaatgtagcaagcacttattgttgcccacatgtgtcaagtcagttgagtgtttctgccaaccggggcctggcttggcccaccttggctgagcttgctctggtgctagggtcagctagacaggtcggcaggagaccagctgctctagaagagcctggacaggatgaattggttctccttccacgtgcatcttgcatccctccagccaaggatttgaacccaggtctcgtctgactccaaatgcaccaagaggatggagcccagagtgacacagaggaagaggcccctggatggatgcatggggaagatcacgggaattacaagtgacatcctgaagtatgatcacaaatgtttcaaattaagccttcctgctaagtttccagaggtgtgtggctcggacgaagtgtttccagaccctgatctactgcatgtcctgcctgttgctggttctttgcagcagtccattgaccaatgctgtctacagcttgagagcctctgcaggccagggctgctctgtgcacatcctacgttactattcaaactgcacagcagcatgaaaaacaggcccttcttttctctcatttacacatatgtgaagaagacacagcaagtgagaaaacgtgaccgaaagccacgcggacaggtggccgcagggccaaacccaacttccgtgatgtgatctggctacagtttggagcccacatatttcaatagttatccccaggcctggcacgtcaaagaggctccagaaatgtttgctgagtgagtgatgaatcagcaatttctgattttctcctaaacttagagaataagtggcttgtctgcagtcacccagggcgtccctgacagaggtacaagtaaagcccagatctctgcatctctggttcaaggccttttgtactacacaccgctgtctctttgtcatcattaaaagcaaggctcaagggacatgttttctagccttagttccccatctacaaaatgggcctcatggaatggaatgtctccacttcactccagcatcaacaagtggggaattctgatggattcaattcgacttctttccatggcgtgttctaagcagcctctttgttccagaagctgccctcagccagagttggataagccaatcctcactccccagcctcctctggatagggatgaagaccccactggggttggaagtgcagaggcagacaggtgtatggagtcacctgtaaattgattcaagtgagccaggaaagcagcaaaggaaagagaaacctgagtgacgacgtggtggaggaacagggctggaaagaggctgctggctgtctggcttcgcagctctggcctcctaatcagcctcgctcttgtctctggtgttctctggctcttgtccatctgtctgtgtttctttttgccagctattgactaatctttgctgaagctgagctagaattctggtgtttataagcaggtaactagctgagcactagttgataactttggagttagtggataaccacagggctgggctactaagctttttcagttgaaaaataaataaataaataaataaacaccacacccagctaatttttgtatttttagtagagacagggtttcaccgtgttagccaggatggactccatctcctgacctcgtgatccgcctacctcggcctcccaaagtgctgggattacaggcgtgagccaccacgcccggtcacctttgtcctgttttctacaggttagaagcaaggcacaagtcatacctacattcaaggagaggggaccatgcaaaggataaactgcagagagacaacagatttgcatcccagacacattcacactgggccaagagcagctgccattgcagattcgagtcacgtccttttttccttccttctccttcttggagttacaacagaagctggggaggtgagagtgcagaaaggacgtggatgaagcagagaggcacgtgcctgtctcattcgcctctggatctgctgcatccaggactgtgccagcacaaagtgggagcccgataaatatttattgaagaaatgaaaggtgacaaaaggcagaaggagggagaccccaaaaagagaccccaggctccagaagcagatgaggagacaaacagaagagcagaagaatggcagaatggcacagcagagagaagaaaaggaacatctgaatgttgagaggaatttggctgggggcggttggagaggagattagccactggacagccaaactccaggggaagatcatcttcccactccatcccccttccagctccccatccatcctgctgagagccacctccaccactcagtgaaaccgctgcattcatccttcaagtttatgtgtgacctgattcttcctggacattggacaaagacctaggtccagtgaactgtctaacacttaagtcatccacggacagcaaggctaacagaatgctgtaacatgtgcccacttggactctgggagttgcagacacccacccgtaggtgctgccatgggtccggagcccanaaagtgcttgccctggctcctgcacctgcccgtctgcatgctccccctccggtaaggggtttgaggatgtggcggctgaacataagagctatgcccctgtcacacatcatgggacaggggtcagggaactctcccatttcactttcaaatattccaggtcccctttttgttcgggagccagagtctagtggagacagagatagaaaccctgaaataggatccaggcaatataaacctacacgctgtaagccaagtcagagtgaggctgatgtgataacaaaagtctgaatacaaggtgggagacaattattctgactgaaagggaggcaagagttctgccataggcttgatgctgtgtgcccctggcttcctaactcatttgcaaatggaaaatactattccattgtaggaaccttctttttccatttgtctggggaaggagaaagaatggctgggctgaatgaatttatcccttggtcctcttccaacaaagctcagctatgaaagataaatccagctctccccaccccctctcagtggagctggggagaaatcaaaagcccctctgccaataatgagaccaaagtttgcaagggcaggacgagcccgtgctaacagagaaagtgttgtttcctcaatttggttttagactgtcttgtcctatgggggagaaaagatctgcccttgggagaggtgccaactttatagatctattaataaaagaactggcaggcttacagttcttgccaatgaggaaacttgaatgagagaagccaggctcaaccttggccaacagactggagcccatcaccctaacttcaccccgcttctccttacccaaccatcaaaggctaggcagcacccacccagcagcttccacctggctgaagcctgcacctgcttcagaccaagggttagatggaaatttggcatgggaagagagggctcacctgtgggcaggatagactctatccaagaaggagaactgaaaaatgaaaacctatgagacaaggggtgatcctgaaggcaggcaggagaaagggctggagggagaggcactggggaatttttcctggtgaatactgaagttactagatgttttgtcttgcaaaactcaagggaaaactctcaaactctaatgtttgtctattctgtgtccaaactgtccttttgaaacggacccacctttcagtaaagaaacttgcattggcctgcccagcctggtgtgttagttctgtggaaactgactggctagggtggccacgggaggaagagcctggttctccctcaccagctccttgtgaagaagggacctggtcaataaggcaaacgacaccacttgccaacatttgatattgccaagtgcttttgtttggcactactatagattttaaaaatgtatctcacttttaaaat

SEQ ID NO: 340530 - DNA, 6577 bp, Homo sapiens
  misc_feature (5397)..(5397): n is a, c, g, or t
ctcaccagggcatggaaaatttgccttcatgtcaaccaccaccttagcccttgactacccaacggactcttcccaagtcaacagccacttcctccctggggcttaacaggcattccttgaagcctgccccgggcagttagtccttcccttttgtgtgaactctcggctgttttcgttgtctgcacacagagcagtggtctagggagcgaagggttttgggaatggaccttttcctttcttagcttgctgtagggattgtgcttcagctaaggtaaagtggaaaaacagaagtacaaaagcaacagccccagatctaagggcaccgtagctctggaatctggattttattccagattcaaccctcagcagggagttgaagtggtcagccctgtgctttacaaggctgattgggcagcacccatagtagaattgtcaatataaagtaattgaaaggatcagaatccagggttttcgttgtttttaagtttttaagttttaaaaacaaagttgtttttgttcgtttttaagtttacttctctttaatcggtctcactttattgaccaggctggtttcgaactcctgggcttaagtgatttctcctgtctcagcttctcaaagtgctgggattacaggcgtgagccgctgcacccagcccagaatccagttttaaagagtttattcaagccaaaagctgggaatggccatctgagaaacacagactctaggaaaatggggccagggccctgaagttaaaagttaaagtcttgcttacataggcagaaagcaaagacatttagtaaccttgtagaacattttcttgtataacttttcttgttttaactttcttgtttaacattttctatgcaaggctggtttatgagttacaacctataattaattataggttgttcccctgcctccaccttgttttcttttctctacagcttgttttcatttcctttccaatttaagaatgtgtttaacattctatcccagacaatgtgatggtcatgaagtctctgtcagagaggaaagagggagttaatctataatgaagatcaacagtgaagaggaaaggggtcttccctggaacgcttcagtcatatacgacattttacacaacaataatggacctgtgtaaggaggtatgtgtgggagaagattccagaaggtcttgagacactccagatgaaggttggtgtggggctgtgctgctggagcaccagagagtgaaaagaggttatctccctctgtgccaggccagagtgcagtggtgcaatcacggctcactgtagtctcaacctcctgggctcaagagatcctcccacttcagcctcccaagcagctaagactacagacatgtccttaaccttggcacaacaaatctctaaatcgattgagacctgtctcagatacttcttggtttacaagatggaggctgaaattaaagagaaagatcctcactcaactcacagaggagcagaatgggaagaggacttagtgagaattccctgaacacaggagaaaaccgaagcccagagagtggatggccaagtccaaggtcacacagccaagtgcatccgagcagcgcaggatccaggtttcctgccccagtgctctttctgcagcccatgccacctgttttcatgctatctcagttcaccttccagctacacacctgcaatcagaaacagaaagtctgagagtgtgtgtggagccaaagaggggacagcagtggtgaggccagtttcatgtcttgtgatttattttctccctttctttttggactttaatcttaagtggacagcaatttggaacagtgtcagcaccttgttggattgtgctgtttgggagaggtgacacagagtattttaaaagagcaggttaagaacttttcacaaggaatcaattgagagaaaataaaatagaaacagactgtcccacatttgggctgagcaccaaacacatttttttttttttttttgagactgagtcttgctctgtcactcaggctggaatgcagtggcgcgatctcggctcactgcagccttcacctcccgggttcaagtgattcttctgcctcagcctcccaagtagctgggattacaggtgcccaccaccatgccaggctaatttttgtatttttagtagagacgaggtttcaccatgttggccaggctggtcttgaactcctgaccaagtgatccacctgcttcggcctcccaaagtgctgggattacaggcacgagccaccgcacctggcctcaaacaagctttttaattgcattcagaagtgcaccaactaggcacagacctctggcatggagacagaatgggaggttcttggtgtctggcctggtcttgcagaaatcagggagttgtggggaccaggcagccactgtgcatcagataggagtttcagcagcaggcaacagaaagcctgccaatgtagctgaaataagaagggcttatttttatccctgaacagaagcttccagcactggttcatcagatcagggcactgagctggcatccccatttatacagttttcctttccttcacctttgtaagatgcctggcacagctctgagcatcaaatatctgtgccatgtgggagcacacgaggggacaagtggggaatagggtctcctctgtcctctgtccccaggctggcttctctcgtggtagaaggacccccacagcaccaggcctcataactaccctgctggtaaactgcaggtgctgtcacggcttcctgccttcgtatatgaaatgttccttggcagctggactgctgtttgtttaccgcacgcacagctctgctgcctcttggttacaccagtgagctattgctccatgacaagccacaccgaaatgtagcaagcacttattgttgcccacatgtgtcaagtcagttgagtgtttctgccaaccggggcctggcttggcccaccttggctgagcttgctctggtgctagggtcagctagacaggtcggcaggagaccagctgctctagaagagcctggacaggatgaattggttctccttccacgtgcatcttgcatccctccagccaaggatttgaacccaggtctcgtctgactccaaatgcaccaagaggatggagcccagagtgacacagaggaagaggcccctggatggatgcatggggaagatcacgggaattacaagtgacatcctgaagtatgatcacaaatgtttcaaattaagccttcctgctaagtttccagaggtgtgtggctcggacgaagtgtttccagaccctgatctactgcatgtcctgcctgttgctggttctttgcagcagtccattgaccaatgctgtctacagcttgagagcctctgcaggccagggctgctctgtgcacatcctacgttactattcaaactgcacagcagcatgaaaaacaggcccttcttttctctcatttacacatatgtgaagaagacacagcaagtgagaaaacgtgaccgaaagccacgcggacaggtggccgcagggccaaacccaacttccgtgatgtgatctggctacagtttggagcccacatatttcaatagttatccccaggcctggcacgtcaaagaggctccagaaatgtttgctgagtgagtgatgaatcagcaatttctgattttctcctaaacttagagaataagtggcttgtctgcagtcacccagggcgtccctgacagaggtacaagtaaagcccagatctctgcatctctggttcaaggccttttgtactacacaccgctgtctctttgtcatcattaaaagcaaggctcaagggacatgttttctagccttagttccccatctacaaaatgggcctcatggaatggaatgtctccacttcactccagcatcaacaagtggggaattctgatggattcaattcgacttctttccatggcgtgttctaagcagcctctttgttccagaagctgccctcagccagagttggataagccaatcctcactccccagcctcctctggatagggatgaagaccccactggggttggaagtgcagaggcagacaggtgtatggagtcacctgtaaattgattcaagtgagccaggaaagcagcaaaggaaagagaaacctgagtgacgacgtggtggaggaacagggctggaaagaggctgctggctgtctggcttcgcagctctggcctcctaatcagcctcgctcttgtctctggtgttctctggctcttgtccatctgtctgtgtttctttttgccagctattgactaatctttgctgaagctgagctagaattctggtgtttataagcaggtaactagctgagcactagttgataactttggagttagtggataaccacagggctgggctactaagctttttcagttgaaaaataaataaataaataaataaacaccacacccagctaatttttgtatttttagtagagacagggtttcaccgtgttagccaggatggactccatctcctgacctcgtgatccgcctacctcggcctcccaaagtgctgggattacaggcgtgagccaccacgcccggtcacctttgtcctgttttctacaggttagaagcaaggcacaagtcatacctacattcaaggagaggggaccatgcaaaggataaactgcagagagacaacagatttgcatcccagacacattcacactgggccaagagcagctgccattgcagattcgagtcacgtccttttttccttccttctccttcttggagttacaacagaagctggggaggtgagagtgcagaaaggacgtggatgaagcagagaggcacgtgcctgtctcattcgcctctggatctgctgcatccaggactgtgccagcacaaagtgggagcccgataaatatttattgaagaaatgaaaggtgacaaaaggcagaaggagggagaccccaaaaagagaccccaggctccagaagcagatgaggagacaaacagaagagcagaagaatggcagaatggcacagcagagagaagaaaaggaacatctgaatgttgagaggaatttggctgggggcggttggagaggagattagccactggacagccaaactccaggggaagatcatcttcccactccatcccccttccagctccccatccatcctgctgagagccacctccaccactcagtgaaaccgctgcattcatccttcaagtttatgtgtgacctgattcttcctggacattggacaaagacctaggtccagtgaactgtctaacacttaagtcatccacggacagcaaggctaacagaatgctgtaacatgtgcccacttggactctgggagttgcagacacccacccgtaggtgctgccatgggtccggagcccanaaagtgcttgccctggctcctgcacctgcccgtctgcatgctccccctccggtaaggggtttgaggatgtggcggctgaacataagagctatgcccctgtcacacatcatgggacaggggtcagggaactctcccatttcactttcaaatattccaggtcccctttttgttcgggagccagagtctagtggagacagagatagaaaccctgaaataggatccaggcaatataaacctacacgctgtaagccaagtcagagtgaggctgatgtgataacaaaagtctgaatacaaggtgggagacaattattctgactgaaagggaggcaagagttctgccataggcttgatgctgtgtgcccctggcttcctaactcatttgcaaatggaaaatactattccattgtaggaaccttctttttccatttgtctggggaaggagaaagaatggctgggctgaatgaatttatcccttggtcctcttccaacaaagctcagctatgaaagataaatccagctctccccaccccctctcagtggagctggggagaaatcaaaagcccctctgccaataatgagaccaaagtttgcaagggcaggacgagcccgtgctaacagagaaagtgttgtttcctcaatttggttttagactgtcttgtcctatgggggagaaaagatctgcccttgggagaggtgccaactttatagatctattaataaaagaactggcaggcttacagttcttgccaatgaggaaacttgaatgagagaagccaggctcaaccttggccaacagactggagcccatcaccctaacttcaccccgcttctccttacccaacctggctgaagcctgcacctgcttcagaccaagggttagatggaaatttggcatgggaagagagggctcacctgtgggcaggatagactctatccaagaaggagaactgaaaaatgaaaacctatgagacaaggggtgatcctgaaggcaggcaggagaaagggctggagggagaggcactggggaatttttcctggtgaatactgaagttactagatgttttgtcttgcaaaactcaagggaaaactctcaaactctaatgtttgtctattctgtgtccaaactgtccttttgaaacggacccacctttcagtaaagaaacttgcattggcctgccca

SEQ ID NO: 340531 - DNA, 3318 bp, Homo sapiens
ctcaccagggcatggaaaatttgccttcatgtcaaccaccaccttagcccttgactacccaacggactcttcccaagtcaacagccacttcctccctggggcttaacaggcattccttgaagcctgccccgggcagttagtccttcccttttgtgtgaactctcggctgttttcgttgtctgcacacagagcagtggtctagggagcgaagggttttgggaatggaccttttcctttcttagcttgctgtagggattgtgcttcagctaaggtaaagtggaaaaacagaagtacaaaagcaacagccccagatctaagggcaccgtagctctggaatctggattttattccagattcaaccctcagcagggagttgaagtggtcagccctgtgctttacaaggctgattgggcagcacccatagtagaattgtcaatataaagtaattgaaaggatcagaatccagggttttcgttgtttttaagtttttaagttttaaaaacaaagttgtttttgttcgtttttaagtttacttctctttaatcggtctcactttattgaccaggctggtttcgaactcctgggcttaagtgatttctcctgtctcagcttctcaaagtgctgggattacaggcgtgagccgctgcacccagcccagaatccagttttaaagagtttattcaagccaaaagctgggaatggccatctgagaaacacagactctaggaaaatggggccagggccctgaagttaaaagttaaagtcttgcttacataggcagaaagcaaagacatttagtaaccttgtagaacattttcttgtataacttttcttgttttaactttcttgtttaacattttctatgcaaggctggtttatgagttacaacctataattaattataggttgttcccctgcctccaccttgttttcttttctctacagcttgttttcatttcctttccaatttaagaatgtgtttaacattctatcccagacaatgtgatggtcatgaagtctctgtcagagaggaaagagggagttaatctataatgaagatcaacagtgaagaggaaaggggtcttccctggaacgcttcagtcatatacgacattttacacaacaataatggacctgtgtaaggaggtatgtgtgggagaagattccagaaggtcttgagacactccagatgaaggttggtgtggggctgtgctgctggagcaccagagagtgaaaagaggttatctccctctgtgccaggccagagtgcagtggtgcaatcacggctcactgtagtctcaacctcctgggctcaagagatcctcccacttcagcctcccaagcagctaagactacagacatgtccttaaccttggcacaacaaatctctaaatcgattgagacctgtctcagatacttcttggtttacaagatggaggctgaaattaaagagaaagatcctcactcaactcacagaggagcagaatgggaagaggacttagtgagaattccctgaacacaggagaaaaccgaagcccagagagtggatggccaagtccaaggtcacacagccaagtgcatccgagcagcgcaggatccaggtttcctgccccagtgctctttctgcagcccatgccacctgttttcatgctatctcagttcaccttccagctacacacctgcaatcagaaacagaaagtctgagagtgtgtgtggagccaaagaggggacagcagtggtgaggccagtttcatgtcttgtgatttattttctccctttctttttggactttaatcttaagtggacagcaatttggaacagtgtcagcaccttgttggattgtgctgtttgggagaggtgacacagagtattttaaaagagcaggttaagaacttttcacaaggaatcaattgagagaaaataaaatagaaacagactgtcccacatttgggctgagcaccaaacacatttttttttttttttttgagactgagtcttgctctgtcactcaggctggaatgcagtggcgcgatctcggctcactgcagccttcacctcccgggttcaagtgattcttctgcctcagcctcccaagtagctgggattacaggtgcccaccaccatgccaggctaatttttgtatttttagtagagacgaggtttcaccatgttggccaggctggtcttgaactcctgaccaagtgatccacctgcttcggcctcccaaagtgctgggattacaggcacgagccaccgcacctggcctcaaacaagctttttaattgcattcagaagtgcaccaactaggcacagacctctggcatggagacagaatgggaggttcttggtgtctggcctggtcttgcagaaatcagggagttgtggggaccaggcagccactgtgcatcagataggagtttcagcagcaggcaacagaaagcctgccaatgtagctgaaataagaagggcttatttttatccctgaacagaagcttccagcactggttcatcagatcagggcactgagctggcatccccatttatacagttttcctttccttcacctttgtaagatgcctggcacagctctgagcatcaaatatctgtgccatgtgggagcacacgaggggacaagtggggaatagggtctcctctgtcctctgtccccaggctggcttctctcgtggtagaaggacccccacagcaccaggcctcataactaccctgctggtaaactgcaggtgctgtcacggcttcctgccttcgtatatgaaatgttccttggcagctggactgctgtttgtttaccgcacgcacagctctgctgcctcttggttacaccagtgagctattgctccatgacaagccacaccgaaatgtagcaagcacttattgttgcccacatgtgtcaagtcagttgagtgtttctgccaaccggggcctggcttggcccaccttggctgagcttgctctggtgctagggtcagctagacaggtcggcaggagaccagctgctctagaagagcctggacaggatgaattggttctccttccacgtgcatcttgcatccctccagccaaggatttgaacccaggtctcgtctgactccaaatgcaccaagaggatggagcccagagtgacacagaggaagaggcccctggatggatgcatggggaaggtgaggcctggaggtgatgtgcttgagattaccaggctcttctgaacctgggggaccttctcctatgatagccctgctcctccagacccagcaggtgatttccccaaaagccgcttacagtgaacgcacctgatagcaa

SEQ ID NO: 340532 - DNA, 2082 bp, Homo sapiens
ctcaccagggcatggaaaatttgccttcatgtcaaccaccaccttagcccttgactacccaacggactcttcccaagtcaacagccacttcctccctggggcttaacaggcattccttgaagcctgccccgggcagttagtccttcccttttgtgtgaactctcggctgttttcgttgtctgcacacagagcagtggtctagggagcgaagggttttgggaatggaccttttcctttcttagcttgctgtagggattgtgcttcagctaaggtaaagtggaaaaacagaagtacaaaagcaacagccccagatctaagggcaccgtagctctggaatctggattttattccagattcaaccctcagcagggagttgaagtggtcagccctgtgctttacaaggctgattgggcagcacccatagtagaattgtcaatataaagtaattgaaaggatcagaatccagggttttcgttgtttttaagtttttaagttttaaaaacaaagttgtttttgttcgtttttaagtttacttctctttaatcggtctcactttattgaccaggctggtttcgaactcctgggcttaagtgatttctcctgtctcagcttctcaaagtgctgggattacaggcgtgagccgctgcacccagcccagaatccagttttaaagagtttattcaagccaaaagctgggaatggccatctgagaaacacagactctaggaaaatggggccagggccctgaagttaaaagttaaagtcttgcttacataggcagaaagcaaagacatttagtaaccttgtagaacattttcttgtataacttttcttgttttaactttcttgtttaacattttctatgcaaggctggtttatgagttacaacctataattaattataggttgttcccctgcctccaccttgttttcttttctctacagcttgttttcatttcctttccaatttaagaatgtgtttaacattctatcccagacaatgtgatggtcatgaagtctctgtcagagaggaaagagggagttaatctataatgaagatcaacagtgaagaggaaaggggtcttccctggaacgcttcagtcatatacgacattttacacaacaataatggacctgtgtaaggaggtatgtgtgggagaagattccagaaggtcttgagacactccagatgaaggttggtgtggggctgtgctgctggagcaccagagagtgaaaagaggttatctccctctgtgccaggccagagtgcagtggtgcaatcacggctcactgtagtctcaacctcctgggctcaagagatcctcccacttcagcctcccaagcagctaagactacagacatgtccttaaccttggcacaacaaatctctaaatcgattgagacctgtctcagatacttcttggtttacaagatggaggctgaaattaaagagaaagatcctcactcaactcacagaggagcagaatgggaagaggacttagtgagaattccctgaacacaggagaaaaccgaagcccagagagtggatggccaagtccaaggtcacacagccaagtgcatccgagcagcgcaggatccaggtttcctgccccagtgctctttctgcagcccatgccacctgttttcatgctatctcagttcaccttccagctacacacctgcaatcagaaacagaaagtctgagagtgtgtgtggagccaaagaggggacagcagtggtgaggccagtttcatgtcttgtgatttattttctccctttctttttggactttaatcttaagtggacagcaatttggaacagtgtcagcaccttgttggattgtgctgtttgggagaggtgacacagagtattttaaaagagcaggttaagaacttttcacaaggaatcaattgagagaaaataaaatagaaacagactgtcccacatttgggctgagcaccaaacacatttttttttttttttttgagactgagtcttgctctgtcactcaggctgggttgcagtgagctgagatcacaccagtgcactccagcctgggtgacaagagtgaaactccatcta

SEQ ID NO: 340533 - DNA, 305 bp, Homo sapiens
actaccactgtctgggggaaagctgatacacgaggacttgacaataattacagcagtaacaatcgctactattttgttttgagatgaattttagtttctgaaattgtccaaagcacttttatcaatagaaacttgttacacatccctccaacagggagaagcagcacaggaaacttccccctcaaacactaaaggctcctggagctattcacagttctggggaacaaccaaaggaggaggaggacaaagggaaaaaatactttttttaaaaatcccaaacaaaaccaaattctatacatgtatat

SEQ ID NO: 340534 - DNA, 1756 bp, Homo sapiens
  misc_feature (1)..(1): n is a, c, g, or t
  misc_feature (3)..(4): n is a, c, g, or t
  misc_feature (473)..(473): n is a, c, g, or t
  misc_feature (937)..(937): n is a, c, g, or t
ngnnacacgtgtgagcctagaggcgggtcccggttgcagacttgccatggcctccgaagcttctgtgcgtctaggggtgccccctggccgtctgtggatccagaggcctggcatctacgaagatgaggaggggagaacctgggtgactgtggtcgtgcggttcaatccctcgcgtagggaatgggccagggcctcccagggcagcagatatgaacccagcatcacagtgcacttgtggcagatggcagtgcatacccgggagctactctcctccggccagatgcccttctcccagctgcccgccgtgtggcagctctaccccgggaggaagtaccgagcagcggattccagtttctgggaaatagcagaccatggccagattgactctatggagcagctggtcctaacatatcagccggagaggaaagactgacactgggagtggctggtatgttggggccctgtgcgtctcngtgtagggatcagacgaaagtgagaagacctctcctcttttcagaaagacggcgtggcctcctcctccctgctgtttgctgagatttttcttacatagccacctgtcacctctgttccccagccccttggatgtgatggtacacagtgggtgggcccccataataagttcctaaagcatgggatctcatcgaataagactcatcatttaatccttgtgagaattttgtgaggtgtacgtgttaatgtcccatttcacgacgaaaagacaagactctggggatgggaatgacttcctcgagaccatacagccaggaaatagcggtgaatctagtgatctcgggtccctagatttaaccatggcactgaggtgccgtgtgacggtggccttggaggacccagcactgacccatagagggctcctctcagatgggcagcagcttggagcaggcaggcagggcctggnccattggaggggctggcactggacttgcctttgaccccagcagcttggatggggtgccgggctcccccatagttcactgactgtctcctttggtcttctcgcaggccctgctggccctgcctcttctggcctggtgtctcctcatgccccctcagtgaggatcttcatgtacctgctcttctgtttgcacacccagcatagcctccttgcaggcagaaggcagtagggcccctgcacactcagtttctctcgttttccttagttatcagtcctgtcctgtcccactcaggtctgtacttagggcagctggcctggatgggcttcactggggccctgtctgtgtgctgagccagtttcccctgctggctgcaagctgtgggttctttctcctctgtgcccctcatgctgatcttctagatgccactcccaaatccccttcatacccaccaggatgtgtgcccagccaggcctccagcacccccagtgcagctcgtgattggaaactcaccatcggcaggcagtggttcggtttaagagatggcattagagggagcccagtctggatgtggacttggatgccctgtgggtatcagttctgctgacactttggcccgaaatagatccagtgctgagcaagcaatgtacaccggagcctcagtgagcccatctgcacagtggggagcatggagggatgggtttggcctgtgcttctgcttattcagtccttcagctcacggaagggatgctagtccgtgaaggtgacctcacagtactggttaattaaactttattgctcactgtccacttttgtgctgaatt

SEQ ID NO: 340535 - DNA, 5433 bp, Homo sapiens
ctcaccagggcatggaaaatttgccttcatgtcaaccaccaccttagcccttgactacccaacggactcttcccaagtcaacagccacttcctccctggggcttaacaggcattccttgaagcctgccccgggcagttagtccttcccttttgtgtgaactctcggctgttttcgttgtctgcacacagagcagtggtctagggagcgaagggttttgggaatggaccttttcctttcttagcttgctgtagggattgtgcttcagctaaggtaaagtggaaaaacagaagtacaaaagcaacagccccagatctaagggcaccgtagctctggaatctggattttattccagattcaaccctcagcagggagttgaagtggtcagccctgtgctttacaaggctgattgggcagcacccatagtagaattgtcaatataaagtaattgaaaggatcagaatccagggttttcgttgtttttaagtttttaagttttaaaaacaaagttgtttttgttcgtttttaagtttacttctctttaatcggtctcactttattgaccaggctggtttcgaactcctgggcttaagtgatttctcctgtctcagcttctcaaagtgctgggattacaggcgtgagccgctgcacccagcccagaatccagttttaaagagtttattcaagccaaaagctgggaatggccatctgagaaacacagactctaggaaaatggggccagggccctgaagttaaaagttaaagtcttgcttacataggcagaaagcaaagacatttagtaaccttgtagaacattttcttgtataacttttcttgttttaactttcttgtttaacattttctatgcaaggctggtttatgagttacaacctataattaattataggttgttcccctgcctccaccttgttttcttttctctacagcttgttttcatttcctttccaatttaagaatgtgtttaacattctatcccagacaatgtgatggtcatgaagtctctgtcagagaggaaagagggagttaatctataatgaagatcaacagtgaagaggaaaggggtcttccctggaacgcttcagtcatatacgacattttacacaacaataatggacctgtgtaaggaggtatgtgtgggagaagattccagaaggtcttgagacactccagatgaaggttggtgtggggctgtgctgctggagcaccagagagtgaaaagaggttatctccctctgtgccaggccagagtgcagtggtgcaatcacggctcactgtagtctcaacctcctgggctcaagagatcctcccacttcagcctcccaagcagctaagactacagacatgtccttaaccttggcacaacaaatctctaaatcgattgagacctgtctcagatacttcttggtttacaagatggaggctgaaattaaagagaaagatcctcactcaactcacagaggagcagaatgggaagaggacttagtgagaattccctgaacacaggagaaaaccgaagcccagagagtggatggccaagtccaaggtcacacagccaagtgcatccgagcagcgcaggatccaggtttcctgccccagtgctctttctgcagcccatgccacctgttttcatgctatctcagttcaccttccagctacacacctgcaatcagaaacagaaagtctgagagtgtgtgtggagccaaagaggggacagcagtggtgaggccagtttcatgtcttgtgatttattttctccctttctttttggactttaatcttaagtggacagcaatttggaacagtgtcagcaccttgttggattgtgctgtttgggagaggtgacacagagtattttaaaagagcaggttaagaacttttcacaaggaatcaattgagagaaaataaaatagaaacagactgtcccacatttgggctgagcaccaaacacatttttttttttttttttgagactgagtcttgctctgtcactcaggctggaatgcagtggcgcgatctcggctcactgcagccttcacctcccgggttcaagtgattcttctgcctcagcctcccaagtagctgggattacaggtgcccaccaccatgccaggctaatttttgtatttttagtagagacgaggtttcaccatgttggccaggctggtcttgaactcctgaccaagtgatccacctgcttcggcctcccaaagtgctgggattacaggcacgagccaccgcacctggcctcaaacaagctttttaattgcattcagaagtgcaccaactaggcacagacctctggcatggagacagaatgggaggttcttggtgtctggcctggtcttgcagaaatcagggagttgtggggaccaggcagccactgtgcatcagataggagtttcagcagcaggcaacagaaagcctgccaatgtagctgaaataagaagggcttatttttatccctgaacagaagcttccagcactggttcatcagatcagggcactgagctggcatccccatttatacagttttcctttccttcacctttgtaagatgcctggcacagctctgagcatcaaatatctgtgccatgtgggagcacacgaggggacaagtggggaatagggtctcctctgtcctctgtccccaggctggcttctctcgtggtagaaggacccccacagcaccaggcctcataactaccctgctggtaaactgcaggtgctgtcacggcttcctgccttcgtatatgaaatgttccttggcagctggactgctgtttgtttaccgcacgcacagctctgctgcctcttggttacaccagtgagctattgctccatgacaagccacaccgaaatgtagcaagcacttattgttgcccacatgtgtcaagtcagttgagtgtttctgccaaccggggcctggcttggcccaccttggctgagcttgctctggtgctagggtcagctagacaggtcggcaggagaccagctgctctagaagagcctggacaggatgaattggttctccttccacgtgcatcttgcatccctccagccaaggatttgaacccaggtctcgtctgactccaaatgcaccaagaggatggagcccagagtgacacagaggaagaggcccctggatggatgcatggggaagatcacgggaattacaagtgacatcctgaagtatgatcacaaatgtttcaaattaagccttcctgctaagtttccagaggtgtgtggctcggacgaagtgtttccagaccctgatctactgcatgtcctgcctgttgctggttctttgcagcagtccattgaccaatgctgtctacagcttgagagcctctgcaggccagggctgctctgtgcacatcctacgttactattcaaactgcacagcagcatgaaaaacaggcccttcttttctctcatttacacatatgtgaagaagacacagcaagtgagaaaacgtgaccgaaagccacgcggacaggtggccgcagggccaaacccaacttccgtgatgtgatctggctacagtttggagcccacatatttcaatagttatccccaggcctggcacgtcaaagaggctccagaaatgtttgctgagtgagtgatgaatcagcaatttctgattttctcctaaacttagagaataagtggcttgtctgcagtcacccagggcgtccctgacagaggtacaagtaaagcccagatctctgcatctctggttcaaggccttttgtactacacaccgctgtctctttgtcatcattaaaagcaaggctcaagggacatgttttctagccttagttccccatctacaaaatgggcctcatggaatggaatgtctccacttcactccagcatcaacaagtggggaattctgatggattcaattcgacttctttccatggcgtgttctaagcagcctctttgttccagaagctgccctcagccagagttggataagccaatcctcactccccagcctcctctggatagggatgaagaccccactggggttggaagtgcagaggcagacaggtgtatggagtcacctgtaaattgattcaagtgagccaggaaagcagcaaaggaaagagaaacctgagtgacgacgtggtggaggaacagggctggaaagaggctgctggctgtctggcttcgcagctctggcctcctaatcagcctcgctcttgtctctggtgttctctggctcttgtccatctgtctgtgtttctttttgccagctattgactaatctttgctgaagctgagctagaattctggtgtttataagcaggtaactagctgagcactagttgataactttggagttagtggataaccacagggctgggctactaagctttttcagttgaaaaataaataaataaataaataaacaccacacccagctaatttttgtatttttagtagagacagggtttcaccgtgttagccaggatggactccatctcctgacctcgtgatccgcctacctcggcctcccaaagtgctgggattacaggcgtgagccaccacgcccggtcacctttgtcctgttttctacaggttagaagcaaggcacaagtcatacctacattcaaggagaggggaccatgcaaaggataaactgcagagagacaacagatttgcatcccagacacattcacactgggccaagagcagctgccattgcagattcgagtcacgtccttttttccttccttctccttcttggagttacaacagaagctggggaggtgagagtgcagaaaggacgtggatgaagcagagaggcacgtgcctgtctcattcgcctctggatctgctgcatccaggactgtgccagcacaaagtgggagcccgataaatatttattgaagaaatgaaaggtgacaaaaggcagaaggagggagaccccaaaaagagttccagaggctgggaagtccaaggtcaaggcaccagcagattcagtgtctgatgaaggctctctctttgcttccaagatggcggctcttactgcatcttcacatggcgacacagcattcaacccctctggaggaagtagcatttaaggcaccatcttggaagcagggaccagagcctctccagatactaaacctactggcaccttgatcttggacttcgcagactccagaaccgtaagcatagatttctgttctttataaattacccagtctcagcaggaatggactaagacaaccaggaataattcttccattgtaacagaatgaaagcagataggttggttgatttgaggtgggaagattaagaaggtttttttttcttgttgcttctatactgttttcttagggaaatagtaggtaaaacccacttctacgtatatacccaagagacattaaaacatacatccaatc

SEQ ID NO: 340536 - DNA, 5456 bp, Homo sapiens
  misc_feature (5206)..(5206): n is a, c, g, or t
ctcaccagggcatggaaaatttgccttcatgtcaaccaccaccttagcccttgactacccaacggactcttcccaagtcaacagccacttcctccctggggcttaacaggcattccttgaagcctgccccgggcagttagtccttcccttttgtgtgaactctcggctgttttcgttgtctgcacacagagcagtggtctagggagcgaagggttttgggaatggaccttttcctttcttagcttgctgtagggattgtgcttcagctaaggtaaagtggaaaaacagaagtacaaaagcaacagccccagatctaagggcaccgtagctctggaatctggattttattccagattcaaccctcagcagggagttgaagtggtcagccctgtgctttacaaggctgattgggcagcacccatagtagaattgtcaatataaagtaattgaaaggatcagaatccagggttttcgttgtttttaagtttttaagttttaaaaacaaagttgtttttgttcgtttttaagtttacttctctttaatcggtctcactttattgaccaggctggtttcgaactcctgggcttaagtgatttctcctgtctcagcttctcaaagtgctgggattacaggcgtgagccgctgcacccagcccagaatccagttttaaagagtttattcaagccaaaagctgggaatggccatctgagaaacacagactctaggaaaatggggccagggccctgaagttaaaagttaaagtcttgcttacataggcagaaagcaaagacatttagtaaccttgtagaacattttcttgtataacttttcttgttttaactttcttgtttaacattttctatgcaaggctggtttatgagttacaacctataattaattataggttgttcccctgcctccaccttgttttcttttctctacagcttgttttcatttcctttccaatttaagaatgtgtttaacattctatcccagacaatgtgatggtcatgaagtctctgtcagagaggaaagagggagttaatctataatgaagatcaacagtgaagaggaaaggggtcttccctggaacgcttcagtcatatacgacattttacacaacaataatggacctgtgtaaggaggtatgtgtgggagaagattccagaaggtcttgagacactccagatgaaggttggtgtggggctgtgctgctggagcaccagagagtgaaaagaggttatctccctctgtgccaggccagagtgcagtggtgcaatcacggctcactgtagtctcaacctcctgggctcaagagatcctcccacttcagcctcccaagcagctaagactacagacatgtccttaaccttggcacaacaaatctctaaatcgattgagacctgtctcagatacttcttggtttacaagatggaggctgaaattaaagagaaagatcctcactcaactcacagaggagcagaatgggaagaggacttagtgagaattccctgaacacaggagaaaaccgaagcccagagagtggatggccaagtccaaggtcacacagccaagtgcatccgagcagcgcaggatccaggtttcctgccccagtgctctttctgcagcccatgccacctgttttcatgctatctcagttcaccttccagctacacacctgcaatcagaaacagaaagtctgagagtgtgtgtggagccaaagaggggacagcagtggtgaggccagtttcatgtcttgtgatttattttctccctttctttttggactttaatcttaagtggacagcaatttggaacagtgtcagcaccttgttggattgtgctgtttgggagaggtgacacagagtattttaaaagagcaggttaagaacttttcacaaggaatcaattgagagaaaataaaatagaaacagactgtcccacatttgggctgagcaccaaacacatttttttttttttttttgagactgagtcttgctctgtcactcaggctggaatgcagtggcgcgatctcggctcactgcagccttcacctcccgggttcaagtgattcttctgcctcagcctcccaagtagctgggattacaggtgcccaccaccatgccaggctaatttttgtatttttagtagagacgaggtttcaccatgttggccaggctggtcttgaactcctgaccaagtgatccacctgcttcggcctcccaaagtgctgggattacaggcacgagccaccgcacctggcctcaaacaagctttttaattgcattcagaagtgcaccaactaggcacagacctctggcatggagacagaatgggaggttcttggtgtctggcctggtcttgcagaaatcagggagttgtggggaccaggcagccactgtgcatcagataggagtttcagcagcaggcaacagaaagcctgccaatgtagctgaaataagaagggcttatttttatccctgaacagaagcttccagcactggttcatcagatcagggcactgagctggcatccccatttatacagttttcctttccttcacctttgtaagatgcctggcacagctctgagcatcaaatatctgtgccatgtgggagcacacgaggggacaagtggggaatagggtctcctctgtcctctgtccccaggctggcttctctcgtggtagaaggacccccacagcaccaggcctcataactaccctgctggtaaactgcaggtgctgtcacggcttcctgccttcgtatatgaaatgttccttggcagctggactgctgtttgtttaccgcacgcacagctctgctgcctcttggttacaccagtgagctattgctccatgacaagccacaccgaaatgtagcaagcacttattgttgcccacatgtgtcaagtcagttgagtgtttctgccaaccggggcctggcttggcccaccttggctgagcttgctctggtgctagggtcagctagacaggtcggcaggagaccagctgctctagaagagcctggacaggatgaattggttctccttccacgtgcatcttgcatccctccagccaaggatttgaacccaggtctcgtctgactccaaatgcaccaagaggatggagcccagagtgacacagaggaagaggcccctggatggatgcatggggaagatcacgggaattacaagtgacatcctgaagtatgatcacaaatgtttcaaattaagccttcctgctaagtttccagaggtgtgtggctcggacgaagtgtttccagaccctgatctactgcatgtcctgcctgttgctggttctttgcagcagtccattgaccaatgctgtctacagcttgagagcctctgcaggccagggctgctctgtgcacatcctacgttactattcaaactgcacagcagcatgaaaaacaggcccttcttttctctcatttacacatatgtgaagaagacacagcaagtgagaaaacgtgaccgaaagccacgcggacaggtggccgcagggccaaacccaacttccgtgatgtgatctggctacagtttggagcccacatatttcaatagttatccccaggcctggcacgtcaaagaggctccagaaatgtttgctgagtgagtgatgaatcagcaatttctgattttctcctaaacttagagaataagtggcttgtctgcagtcacccagggcgtccctgacagaggtacaagtaaagcccagatctctgcatctctggttcaaggccttttgtactacacaccgctgtctctttgtcatcattaaaagcaaggctcaagggacatgttttctagccttagttccccatctacaaaatgggcctcatggaatggaatgtctccacttcactccagcatcaacaagtggggaattctgatggattcaattcgacttctttccatggcgtgttctaagcagcctctttgttccagaagctgccctcagccagagttggataagccaatcctcactccccagcctcctctggatagggatgaagaccccactggggttggaagtgcagaggcagacaggtgtatggagtcacctgtaaattgattcaagtgagccaggaaagcagcaaaggaaagagaaacctgagtgacgacgtggtggaggaacagggctggaaagaggctgctggctgtctggcttcgcagctctggcctcctaatcagcctcgctcttgtctctggtgttctctggctcttgtccatctgtctgtgtttctttttgccagctattgactaatctttgctgaagctgagctagaattctggtgtttataagcaggtaactagctgagcactagttgataactttggagttagtggataaccacagggctgggctactaagctttttcagttgaaaaataaataaataaataaataaacaccacacccagctaatttttgtatttttagtagagacagggtttcaccgtgttagccaggatggactccatctcctgacctcgtgatccgcctacctcggcctcccaaagtgctgggattacaggcgtgagccaccacgcccggtcacctttgtcctgttttctacaggttagaagcaaggcacaagtcatacctacattcaaggagaggggaccatgcaaaggataaactgcagagagacaacagatttgcatcccagacacattcacactgggccaagagcagctgccattgcagattcgagtcacgtccttttttccttccttctccttcttggagttacaacagaagctggggaggtgagagtgcagaaaggacgtggatgaagcagagaggcacgtgcctgtctcattcgcctctggatctgctgcatccaggactgtgccagcacaaagtgggagcccgataaatatttattgaagaaatgaaaggtgacaaaaggcagaaggagggagaccccaaaaagagctccccatccatcctgctgagagccacctccaccactcagtgaaaccgctgcattcatccttcaagtttatgtgtgacctgattcttcctggacattggacaaagacctaggtccagtgaactgtctaacacttaagtcatccacggacagcaaggctaacagaatgctgtaacatgtgcccacttggactctgggagttgcagacacccacccgtaggtgctgccatgggtccggagcccanaaagtgcttgccctggctcctgcacctgcccgtctgcatgctccccctccggtaaggggtttgaggatgtggcggctgaacataagagctatgcccctgtcacacatcatgggacaggggtcagggaactctcccatttcactttcaaatattccaggtcccctttttgttcgggagccagagtctagtggagacagagatagaaaccctgaaataggatccaggcaatataaacctacacgctgtaagc

SEQ ID NO: 340537 - DNA, 4494 bp, Homo sapiens
ctcaccagggcatggaaaatttgccttcatgtcaaccaccaccttagcccttgactacccaacggactcttcccaagtcaacagccacttcctccctggggcttaacaggcattccttgaagcctgccccgggcagttagtccttcccttttgtgtgaactctcggctgttttcgttgtctgcacacagagcagtggtctagggagcgaagggttttgggaatggaccttttcctttcttagcttgctgtagggattgtgcttcagctaaggtaaagtggaaaaacagaagtacaaaagcaacagccccagatctaagggcaccgtagctctggaatctggattttattccagattcaaccctcagcagggagttgaagtggtcagccctgtgctttacaaggctgattgggcagcacccatagtagaattgtcaatataaagtaattgaaaggatcagaatccagggttttcgttgtttttaagtttttaagttttaaaaacaaagttgtttttgttcgtttttaagtttacttctctttaatcggtctcactttattgaccaggctggtttcgaactcctgggcttaagtgatttctcctgtctcagcttctcaaagtgctgggattacaggcgtgagccgctgcacccagcccagaatccagttttaaagagtttattcaagccaaaagctgggaatggccatctgagaaacacagactctaggaaaatggggccagggccctgaagttaaaagttaaagtcttgcttacataggcagaaagcaaagacatttagtaaccttgtagaacattttcttgtataacttttcttgttttaactttcttgtttaacattttctatgcaaggctggtttatgagttacaacctataattaattataggttgttcccctgcctccaccttgttttcttttctctacagcttgttttcatttcctttccaatttaagaatgtgtttaacattctatcccagacaatgtgatggtcatgaagtctctgtcagagaggaaagagggagttaatctataatgaagatcaacagtgaagaggaaaggggtcttccctggaacgcttcagtcatatacgacattttacacaacaataatggacctgtgtaaggaggtatgtgtgggagaagattccagaaggtcttgagacactccagatgaaggttggtgtggggctgtgctgctggagcaccagagagtgaaaagaggttatctccctctgtgccaggccagagtgcagtggtgcaatcacggctcactgtagtctcaacctcctgggctcaagagatcctcccacttcagcctcccaagcagctaagactacagacatgtccttaaccttggcacaacaaatctctaaatcgattgagacctgtctcagatacttcttggtttacaagatggaggctgaaattaaagagaaagatcctcactcaactcacagaggagcagaatgggaagaggacttagtgagaattccctgaacacaggagaaaaccgaagcccagagagtggatggccaagtccaaggtcacacagccaagtgcatccgagcagcgcaggatccaggtttcctgccccagtgctctttctgcagcccatgccacctgttttcatgctatctcagttcaccttccagctacacacctgcaatcagaaacagaaagtctgagagtgtgtgtggagccaaagaggggacagcagtggtgaggccagtttcatgtcttgtgatttattttctccctttctttttggactttaatcttaagtggacagcaatttggaacagtgtcagcaccttgttggattgtgctgtttgggagaggtgacacagagtattttaaaagagcaggttaagaacttttcacaaggaatcaattgagagaaaataaaatagaaacagactgtcccacatttgggctgagcaccaaacacatttttttttttttttttgagactgagtcttgctctgtcactcaggctggaatgcagtggcgcgatctcggctcactgcagccttcacctcccgggttcaagtgattcttctgcctcagcctcccaagtagctgggattacaggtgcccaccaccatgccaggctaatttttgtatttttagtagagacgaggtttcaccatgttggccaggctggtcttgaactcctgaccaagtgatccacctgcttcggcctcccaaagtgctgggattacaggcacgagccaccgcacctggcctcaaacaagctttttaattgcattcagaagtgcaccaactaggcacagacctctggcatggagacagaatgggaggttcttggtgtctggcctggtcttgcagaaatcagggagttgtggggaccaggcagccactgtgcatcagataggagtttcagcagcaggcaacagaaagcctgccaatgtagctgaaataagaagggcttatttttatccctgaacagaagcttccagcactggttcatcagatcagggcactgagctggcatccccatttatacagttttcctttccttcacctttgtaagatgcctggcacagctctgagcatcaaatatctgtgccatgtgggagcacacgaggggacaagtggggaatagggtctcctctgtcctctgtccccaggctggcttctctcgtggtagaaggacccccacagcaccaggcctcataactaccctgctggtaaactgcaggtgctgtcacggcttcctgccttcgtatatgaaatgttccttggcagctggactgctgtttgtttaccgcacgcacagctctgctgcctcttggttacaccagtgagctattgctccatgacaagccacaccgaaatgtagcaagcacttattgttgcccacatgtgtcaagtcagttgagtgtttctgccaaccggggcctggcttggcccaccttggctgagcttgctctggtgctagggtcagctagacaggtcggcaggagaccagctgctctagaagagcctggacaggatgaattggttctccttccacgtgcatcttgcatccctccagccaaggatttgaacccaggtctcgtctgactccaaatgcaccaagaggatggagcccagagtgacacagaggaagaggcccctggatggatgcatggggaaggttagaagcaaggcacaagtcatacctacattcaaggagaggggaccatgcaaaggataaactgcagagagacaacagatttgcatcccagacacattcacactgggccaagagcagctgccattgcagattcgagtcacgtccttttttccttccttctccttcttggagttacaacagaagctggggaggtgagagtgcagaaaggacgtggatgaagcagagaggcacgtgcctgtctcattcgcctctggatctgctgcatccaggactgtgccagcacaaagtgggagcccgataaatatttattgaagaaatgaaaggtgacaaaaggcagaaggagggagaccccaaaaagagtatgaacccagcatcacagtgcacttgtggcagatggcagtgcatacccgggagctactctcctccggccagatgcccttctcccagctgcccgccgtgtggcagctctaccccgggaggaagtaccgagcagcggattccagtttctgggaaatagcagaccatggccagattgactctatggagcagctggtcctaacatatcagccggagaggaaagactgacactgggagtggctggccctgctggccctgcctcttctggcctggtgtctcctcatgccccctcagtgaggatcttcatgtacctgctcttctgtttgcacacccagcatagcctccttgcaggcagaaggcagtagggcccctgcacactcagtttctctcgttttccttagttatcagtcctgtcctgtcccactcaggtctgtacttagggcagctggcctggatgggcttcactggggccctgtctgtgtgctgagccagtttcccctgctggctgcaagctgtgggttctttctcctctgtgcccctcatgctgatcttctagatgccactcccaaatccccttcatacccaccaggatgtgtgcccagccaggcctccagcacccccagtgcagctcgtgattggaaactcaccatcggcaggcagtggttcggtttaagagatggcattagagggagcccagtctggatgtggacttggatgccctgtgggtatcagttctgctgacactttggcccgaaatagatccagtgctgagcaagcaatgtacaccggagcctcagtgagcccatctgcacagtggggagcatggagggatgggtttggcctgtgcttctgcttattcagtccttcagctcacggaagggatgctagtccgtgaaggtgacctcacagtactggttaattaaactttattgctcactgtccacttttgtgctgaatt

SEQ ID NO: 340538 - DNA, 4882 bp, Homo sapiens
ctcaccagggcatggaaaatttgccttcatgtcaaccaccaccttagcccttgactacccaacggactcttcccaagtcaacagccacttcctccctggggcttaacaggcattccttgaagcctgccccgggcagttagtccttcccttttgtgtgaactctcggctgttttcgttgtctgcacacagagcagtggtctagggagcgaagggttttgggaatggaccttttcctttcttagcttgctgtagggattgtgcttcagctaaggtaaagtggaaaaacagaagtacaaaagcaacagccccagatctaagggcaccgtagctctggaatctggattttattccagattcaaccctcagcagggagttgaagtggtcagccctgtgctttacaaggctgattgggcagcacccatagtagaattgtcaatataaagtaattgaaaggatcagaatccagggttttcgttgtttttaagtttttaagttttaaaaacaaagttgtttttgttcgtttttaagtttacttctctttaatcggtctcactttattgaccaggctggtttcgaactcctgggcttaagtgatttctcctgtctcagcttctcaaagtgctgggattacaggcgtgagccgctgcacccagcccagaatccagttttaaagagtttattcaagccaaaagctgggaatggccatctgagaaacacagactctaggaaaatggggccagggccctgaagttaaaagttaaagtcttgcttacataggcagaaagcaaagacatttagtaaccttgtagaacattttcttgtataacttttcttgttttaactttcttgtttaacattttctatgcaaggctggtttatgagttacaacctataattaattataggttgttcccctgcctccaccttgttttcttttctctacagcttgttttcatttcctttccaatttaagaatgtgtttaacattctatcccagacaatgtgatggtcatgaagtctctgtcagagaggaaagagggagttaatctataatgaagatcaacagtgaagaggaaaggggtcttccctggaacgcttcagtcatatacgacattttacacaacaataatggacctgtgtaaggaggtatgtgtgggagaagattccagaaggtcttgagacactccagatgaaggttggtgtggggctgtgctgctggagcaccagagagtgaaaagaggttatctccctctgtgccaggccagagtgcagtggtgcaatcacggctcactgtagtctcaacctcctgggctcaagagatcctcccacttcagcctcccaagcagctaagactacagacatgtccttaaccttggcacaacaaatctctaaatcgattgagacctgtctcagatacttcttggtttacaagatggaggctgaaattaaagagaaagatcctcactcaactcacagaggagcagaatgggaagaggacttagtgagaattccctgaacacaggagaaaaccgaagcccagagagtggatggccaagtccaaggtcacacagccaagtgcatccgagcagcgcaggatccaggtttcctgccccagtgctctttctgcagcccatgccacctgttttcatgctatctcagttcaccttccagctacacacctgcaatcagaaacagaaagtctgagagtgtgtgtggagccaaagaggggacagcagtggtgaggccagtttcatgtcttgtgatttattttctccctttctttttggactttaatcttaagtggacagcaatttggaacagtgtcagcaccttgttggattgtgctgtttgggagaggtgacacagagtattttaaaagagcaggttaagaacttttcacaaggaatcaattgagagaaaataaaatagaaacagactgtcccacatttgggctgagcaccaaacacatttttttttttttttttgagactgagtcttgctctgtcactcaggctggaatgcagtggcgcgatctcggctcactgcagccttcacctcccgggttcaagtgattcttctgcctcagcctcccaagtagctgggattacaggtgcccaccaccatgccaggctaatttttgtatttttagtagagacgaggtttcaccatgttggccaggctggtcttgaactcctgaccaagtgatccacctgcttcggcctcccaaagtgctgggattacaggcacgagccaccgcacctggcctcaaacaagctttttaattgcattcagaagtgcaccaactaggcacagacctctggcatggagacagaatgggaggttcttggtgtctggcctggtcttgcagaaatcagggagttgtggggaccaggcagccactgtgcatcagataggagtttcagcagcaggcaacagaaagcctgccaatgtagctgaaataagaagggcttatttttatccctgaacagaagcttccagcactggttcatcagatcagggcactgagctggcatccccatttatacagttttcctttccttcacctttgtaagatgcctggcacagctctgagcatcaaatatctgtgccatgtgggagcacacgaggggacaagtggggaatagggtctcctctgtcctctgtccccaggctggcttctctcgtggtagaaggacccccacagcaccaggcctcataactaccctgctggtaaactgcaggtgctgtcacggcttcctgccttcgtatatgaaatgttccttggcagctggactgctgtttgtttaccgcacgcacagctctgctgcctcttggttacaccagtgagctattgctccatgacaagccacaccgaaatgtagcaagcacttattgttgcccacatgtgtcaagtcagttgagtgtttctgccaaccggggcctggcttggcccaccttggctgagcttgctctggtgctagggtcagctagacaggtcggcaggagaccagctgctctagaagagcctggacaggatgaattggttctccttccacgtgcatcttgcatccctccagccaaggatttgaacccaggtctcgtctgactccaaatgcaccaagaggatggagcccagagtgacacagaggaagaggcccctggatggatgcatggggaagatcacgggaattacaagtgacatcctgaagtatgatcacaaatgtttcaaattaagccttcctgctaagtttccagaggtgtgtggctcggacgaagtgtttccagaccctgatctactgcatgtcctgcctgttgctggttctttgcagcagtccattgaccaatgctgtctacagcttgagagcctctgcaggccagggctgctctgtgcacatcctacgttactattcaaactgcacagcagcatgaaaaacaggcccttcttttctctcatttacacatatgtgaagaagacacagcaagtgagaaaacgtgaccgaaagccacgcggacaggtggccgcagggccaaacccaacttccgtgatgtgatctggctacagtttggagcccacatatttcaatagttatccccaggcctggcacgtcaaagaggctccagaaatgtttgctgaagagacaacagatttgcatcccagacacattcacactgggccaagagcagctgccattgcagattcgagtcacgtccttttttccttccttctccttcttggagttacaacagaagctggggaggtgagagtgcagaaaggacgtggatgaagcagagaggcacgtgcctgtctcattcgcctctggatctgctgcatccaggactgtgccagcacaaagtgggagcccgataaatatttattgaagaaatgaaaggtgacaaaaggcagaaggagggagaccccaaaaagagtatgaacccagcatcacagtgcacttgtggcagatggcagtgcatacccgggagctactctcctccggccagatgcccttctcccagctgcccgccgtgtggcagctctaccccgggaggaagtaccgagcagcggattccagtttctgggaaatagcagaccatggccagattgactctatggagcagctggtcctaacatatcagccggagaggaaagactgacactgggagtggctggccctgctggccctgcctcttctggcctggtgtctcctcatgccccctcagtgaggatcttcatgtacctgctcttctgtttgcacacccagcatagcctccttgcaggcagaaggcagtagggcccctgcacactcagtttctctcgttttccttagttatcagtcctgtcctgtcccactcaggtctgtacttagggcagctggcctggatgggcttcactggggccctgtctgtgtgctgagccagtttcccctgctggctgcaagctgtgggttctttctcctctgtgcccctcatgctgatcttctagatgccactcccaaatccccttcatacccaccaggatgtgtgcccagccaggcctccagcacccccagtgcagctcgtgattggaaactcaccatcggcaggcagtggttcggtttaagagatggcattagagggagcccagtctggatgtggacttggatgccctgtgggtatcagttctgctgacactttggcccgaaatagatccagtgctgagcaagcaatgtacaccggagcctcagtgagcccatctgcacagtggggagcatggagggatgggtttggcctgtgcttctgcttattcagtccttcagctcacggaagggatgctagtccgtgaaggtgacctcacagtactggttaattaaactttattgctcactgtccacttttgtgctgaatt

SEQ ID NO: 340539 - DNA, 4755 bp, Homo sapiens
ctcaccagggcatggaaaatttgccttcatgtcaaccaccaccttagcccttgactacccaacggactcttcccaagtcaacagccacttcctccctggggcttaacaggcattccttgaagcctgccccgggcagttagtccttcccttttgtgtgaactctcggctgttttcgttgtctgcacacagagcagtggtctagggagcgaagggttttgggaatggaccttttcctttcttagcttgctgtagggattgtgcttcagctaaggtaaagtggaaaaacagaagtacaaaagcaacagccccagatctaagggcaccgtagctctggaatctggattttattccagattcaaccctcagcagggagttgaagtggtcagccctgtgctttacaaggctgattgggcagcacccatagtagaattgtcaatataaagtaattgaaaggatcagaatccagggttttcgttgtttttaagtttttaagttttaaaaacaaagttgtttttgttcgtttttaagtttacttctctttaatcggtctcactttattgaccaggctggtttcgaactcctgggcttaagtgatttctcctgtctcagcttctcaaagtgctgggattacaggcgtgagccgctgcacccagcccagaatccagttttaaagagtttattcaagccaaaagctgggaatggccatctgagaaacacagactctaggaaaatggggccagggccctgaagttaaaagttaaagtcttgcttacataggcagaaagcaaagacatttagtaaccttgtagaacattttcttgtataacttttcttgttttaactttcttgtttaacattttctatgcaaggctggtttatgagttacaacctataattaattataggttgttcccctgcctccaccttgttttcttttctctacagcttgttttcatttcctttccaatttaagaatgtgtttaacattctatcccagacaatgtgatggtcatgaagtctctgtcagagaggaaagagggagttaatctataatgaagatcaacagtgaagaggaaaggggtcttccctggaacgcttcagtcatatacgacattttacacaacaataatggacctgtgtaaggaggtatgtgtgggagaagattccagaaggtcttgagacactccagatgaaggttggtgtggggctgtgctgctggagcaccagagagtgaaaagaggttatctccctctgtgccaggccagagtgcagtggtgcaatcacggctcactgtagtctcaacctcctgggctcaagagatcctcccacttcagcctcccaagcagctaagactacagacatgtccttaaccttggcacaacaaatctctaaatcgattgagacctgtctcagatacttcttggtttacaagatggaggctgaaattaaagagaaagatcctcactcaactcacagaggagcagaatgggaagaggacttagtgagaattccctgaacacaggagaaaaccgaagcccagagagtggatggccaagtccaaggtcacacagccaagtgcatccgagcagcgcaggatccaggtttcctgccccagtgctctttctgcagcccatgccacctgttttcatgctatctcagttcaccttccagctacacacctgcaatcagaaacagaaagtctgagagtgtgtgtggagccaaagaggggacagcagtggtgaggccagtttcatgtcttgtgatttattttctccctttctttttggactttaatcttaagtggacagcaatttggaacagtgtcagcaccttgttggattgtgctgtttgggagaggtgacacagagtattttaaaagagcaggttaagaacttttcacaaggaatcaattgagagaaaataaaatagaaacagactgtcccacatttgggctgagcaccaaacacatttttttttttttttttgagactgagtcttgctctgtcactcaggctggaatgcagtggcgcgatctcggctcactgcagccttcacctcccgggttcaagtgattcttctgcctcagcctcccaagtagctgggattacaggtgcccaccaccatgccaggctaatttttgtatttttagtagagacgaggtttcaccatgttggccaggctggtcttgaactcctgaccaagtgatccacctgcttcggcctcccaaagtgctgggattacaggcacgagccaccgcacctggcctcaaacaagctttttaattgcattcagaagtgcaccaactaggcacagacctctggcatggagacagaatgggaggttcttggtgtctggcctggtcttgcagaaatcagggagttgtggggaccaggcagccactgtgcatcagataggagtttcagcagcaggcaacagaaagcctgccaatgtagctgaaataagaagggcttatttttatccctgaacagaagcttccagcactggttcatcagatcagggcactgagctggcatccccatttatacagttttcctttccttcacctttgtaagatgcctggcacagctctgagcatcaaatatctgtgccatgtgggagcacacgaggggacaagtggggaatagggtctcctctgtcctctgtccccaggctggcttctctcgtggtagaaggacccccacagcaccaggcctcataactaccctgctggtaaactgcaggtgctgtcacggcttcctgccttcgtatatgaaatgttccttggcagctggactgctgtttgtttaccgcacgcacagctctgctgcctcttggttacaccagtgagctattgctccatgacaagccacaccgaaatgtagcaagcacttattgttgcccacatgtgtcaagtcagttgagtgtttctgccaaccggggcctggcttggcccaccttggctgagcttgctctggtgctagggtcagctagacaggtcggcaggagaccagctgctctagaagagcctggacaggatgaattggttctccttccacgtgcatcttgcatccctccagccaaggatttgaacccaggtctcgtctgactccaaatgcaccaagaggatggagcccagagtgacacagaggaagaggcccctggatggatgcatggggaagatcacgggaattacaagtgacatcctgaagtatgatcacaaatgtttcaaattaagccttcctgctaagtttccagaggtgtgtggctcggacgaagtgtttccagaccctgatctactgcatgtcctgcctgttgctggttctttgcagcagtccattgaccaatgctgtctacagcttgagagcctctgcaggccagggctgctctgtgcacatcctacgttactattcaaactgcacagcagcatgaaaaacaggcccttcttttctctcatttacacatatgtgaagaagacacagcaagtgagaaaacgtgaccgaaagccacgcggacaggtggccgcagggccaaacccaacttccgtgatgtgatctggctacagtttggagcccacatatttcaatagttatccccaggcctggcacgtcaaagaggctccagaaatgtttgctgagttagaagcaaggcacaagtcatacctacattcaaggagaggggaccatgcaaaggataaactgcagagagacaacagatttgcatcccagacacattcacactgggccaagagcagctgccattgcagattcgagtcacgtccttttttccttccttctccttcttggagttacaacagaagctggggaggtgagagtgcagaaaggacgtggatgaagcagagaggcacgtgcctgtctcattcgcctctggatctgctgcatccaggactgtgccagcacaaagtgggagcccgataaatatttattgaagaaatgaaaggtgacaaaaggcagaaggagggagaccccaaaaagagttacactggaagaagagcccctccttccttcaagccaagtcatccccttgggctctcaccacttcagtttataccttgcctgtagtccagtctctccatcatcaattccatcagcacaaagacataatttaattccttctaccttaaaaaaacaaaacaaaacaaaacagctctccctctcttagggtgagatgaagtggttggcaacaggccaatgctactttcagaggcgtttgaatcagagtgactccattttgaataggggttgagtaaaataaggctgagacctactgggctgcattcccatgagcttaggcattctaagtcacaggatgagacaggaggtcagcacaagatacacgtcacaaagaccttgctgataaaacagattgtgataagaaaagccagtcaaaacccaccaaaaccaagatggcgacaaaagtgatctctggttgtcctcactgctgattattcactaattataaaattaacatgataaaagacactcccaccagcaccgtgacagtttacaaatgacatggacacatcaggaagttaccctatatgtctaaaaggggaggagccctcctttccaattgtccacccctttcctggaaaactcatgaataatccaccccttgtttagcatataatcaagaaataaccatgaaaatagccaaacccaagccctcagggctgctttgcctatggagtagccattctatattcctttactttcttaataaacttgctttcacttt

SEQ ID NO: 340540 - DNA, 5136 bp, Homo sapiens
ctcaccagggcatggaaaatttgccttcatgtcaaccaccaccttagcccttgactacccaacggactcttcccaagtcaacagccacttcctccctggggcttaacaggcattccttgaagcctgccccgggcagttagtccttcccttttgtgtgaactctcggctgttttcgttgtctgcacacagagcagtggtctagggagcgaagggttttgggaatggaccttttcctttcttagcttgctgtagggattgtgcttcagctaaggtaaagtggaaaaacagaagtacaaaagcaacagccccagatctaagggcaccgtagctctggaatctggattttattccagattcaaccctcagcagggagttgaagtggtcagccctgtgctttacaaggctgattgggcagcacccatagtagaattgtcaatataaagtaattgaaaggatcagaatccagggttttcgttgtttttaagtttttaagttttaaaaacaaagttgtttttgttcgtttttaagtttacttctctttaatcggtctcactttattgaccaggctggtttcgaactcctgggcttaagtgatttctcctgtctcagcttctcaaagtgctgggattacaggcgtgagccgctgcacccagcccagaatccagttttaaagagtttattcaagccaaaagctgggaatggccatctgagaaacacagactctaggaaaatggggccagggccctgaagttaaaagttaaagtcttgcttacataggcagaaagcaaagacatttagtaaccttgtagaacattttcttgtataacttttcttgttttaactttcttgtttaacattttctatgcaaggctggtttatgagttacaacctataattaattataggttgttcccctgcctccaccttgttttcttttctctacagcttgttttcatttcctttccaatttaagaatgtgtttaacattctatcccagacaatgtgatggtcatgaagtctctgtcagagaggaaagagggagttaatctataatgaagatcaacagtgaagaggaaaggggtcttccctggaacgcttcagtcatatacgacattttacacaacaataatggacctgtgtaaggaggtatgtgtgggagaagattccagaaggtcttgagacactccagatgaaggttggtgtggggctgtgctgctggagcaccagagagtgaaaagaggttatctccctctgtgccaggccagagtgcagtggtgcaatcacggctcactgtagtctcaacctcctgggctcaagagatcctcccacttcagcctcccaagcagctaagactacagacatgtccttaaccttggcacaacaaatctctaaatcgattgagacctgtctcagatacttcttggtttacaagatggaggctgaaattaaagagaaagatcctcactcaactcacagaggagcagaatgggaagaggacttagtgagaattccctgaacacaggagaaaaccgaagcccagagagtggatggccaagtccaaggtcacacagccaagtgcatccgagcagcgcaggatccaggtttcctgccccagtgctctttctgcagcccatgccacctgttttcatgctatctcagttcaccttccagctacacacctgcaatcagaaacagaaagtctgagagtgtgtgtggagccaaagaggggacagcagtggtgaggccagtttcatgtcttgtgatttattttctccctttctttttggactttaatcttaagtggacagcaatttggaacagtgtcagcaccttgttggattgtgctgtttgggagaggtgacacagagtattttaaaagagcaggttaagaacttttcacaaggaatcaattgagagaaaataaaatagaaacagactgtcccacatttgggctgagcaccaaacacatttttttttttttttttgagactgagtcttgctctgtcactcaggctggaatgcagtggcgcgatctcggctcactgcagccttcacctcccgggttcaagtgattcttctgcctcagcctcccaagtagctgggattacaggtgcccaccaccatgccaggctaatttttgtatttttagtagagacgaggtttcaccatgttggccaggctggtcttgaactcctgaccaagtgatccacctgcttcggcctcccaaagtgctgggattacaggcacgagccaccgcacctggcctcaaacaagctttttaattgcattcagaagtgcaccaactaggcacagacctctggcatggagacagaatgggaggttcttggtgtctggcctggtcttgcagaaatcagggagttgtggggaccaggcagccactgtgcatcagataggagtttcagcagcaggcaacagaaagcctgccaatgtagctgaaataagaagggcttatttttatccctgaacagaagcttccagcactggttcatcagatcagggcactgagctggcatccccatttatacagttttcctttccttcacctttgtaagatgcctggcacagctctgagcatcaaatatctgtgccatgtgggagcacacgaggggacaagtggggaatagggtctcctctgtcctctgtccccaggctggcttctctcgtggtagaaggacccccacagcaccaggcctcataactaccctgctggtaaactgcaggtgctgtcacggcttcctgccttcgtatatgaaatgttccttggcagctggactgctgtttgtttaccgcacgcacagctctgctgcctcttggttacaccagtgagctattgctccatgacaagccacaccgaaatgtagcaagcacttattgttgcccacatgtgtcaagtcagttgagtgtttctgccaaccggggcctggcttggcccaccttggctgagcttgctctggtgctagggtcagctagacaggtcggcaggagaccagctgctctagaagagcctggacaggatgaattggttctccttccacgtgcatcttgcatccctccagccaaggatttgaacccaggtctcgtctgactccaaatgcaccaagaggatggagcccagagtgacacagaggaagaggcccctggatggatgcatggggaagatcacgggaattacaagtgacatcctgaagtatgatcacaaatgtttcaaattaagccttcctgctaagtttccagaggtgtgtggctcggacgaagtgtttccagaccctgatctactgcatgtcctgcctgttgctggttctttgcagcagtccattgaccaatgctgtctacagcttgagagcctctgcaggccagggctgctctgtgcacatcctacgttactattcaaactgcacagcagcatgaaaaacaggcccttcttttctctcatttacacatatgtgaagaagacacagcaagtgagaaaacgtgaccgaaagccacgcggacaggtggccgcagggccaaacccaacttccgtgatgtgatctggctacagtttggagcccacatatttcaatagttatccccaggcctggcacgtcaaagaggctccagaaatgtttgctgagtgagtgatgaatcagcaatttctgattttctcctaaacttagagaataagtggcttgtctgcagtcacccagggcgtccctgacagaggtacaagtaaagcccagatctctgcatctctggttcaaggccttttgtactacacaccgctgtctctttgtcatcattaaaagcaaggctcaagggacatgttttctagccttagttccccatctacaaaatgggcctcatggaatggaatgtctccacttcactccagcatcaacaagtggggaattctgatggattcaattcgacttctttccatggcgtgttctaagcagcctctttgttccagaagctgccctcagccagagttggataagccaatcctcactccccagcctcctctggatagggatgaagaccccactggggttggaagtgcagaggcagacaggtgtatggagtcacctgtaaattgattcaagtgagccaggaaagcagcaaaggaaagagaaacctgagtgacgacgtggtggaggaacagggctggaaagaggctgctggctgtctggcttcgcagctctggcctcctaatcagcctcgctcttgtctctggtgttctctggctcttgtccatctgtctgtgtttctttttgccagctattgactaatctttgctgaagctgagctagaattctggtgtttataagcaggtaactagctgagcactagttgataactttggagttagtggataaccacagggctgggctactaagctttttcagttgaaaaataaataaataaataaataaacaccacacccagctaatttttgtatttttagtagagacagggtttcaccgtgttagccaggatggactccatctcctgacctcgtgatccgcctacctcggcctcccaaagtgctgggattacaggcgtgagccaccacgcccggtcacctttgtcctgttttctacaggttagaagcaaggcacaagtcatacctacattcaaggagaggggaccatgcaaaggataaactgcagagagacaacagatttgcatcccagacacattcacactgggccaagagcagctgccattgcagattcgagtcacgtccttttttccttccttctccttcttggagttacaacagaagctggggaggtgagagtgcagaaaggacgtggatgaagcagagaggcacgtgcctgtctcattcgcctctggatctgctgcatccaggactgtgccagcacaaagtgggagcccgataaatatttattgaagaaatgaaaggtgacaaaaggcagaaggagggagaccccaaaaagagcagcacaggaaacttccccctcaaacactaaaggctcctggagctattcacagttctggggaacaaccaaaggaggaggaggacaaagggaaaaaatactttttttaaaaatcccaaacaaaaccaaattctatacatgtatatctcgagtgagtaaatgtgtaacactcacc

SEQ ID NO: 340541 - DNA, 2271 bp, Homo sapiens
ctcaccagggcatggaaaatttgccttcatgtcaaccaccaccttagcccttgactacccaacggactcttcccaagtcaacagccacttcctccctggggcttaacaggcattccttgaagcctgccccgggcagttagtccttcccttttgtgtgaactctcggctgttttcgttgtctgcacacagagcagtggtctagggagcgaagggttttgggaatggaccttttcctttcttagcttgctgtagggattgtgcttcagctaaggtaaagtggaaaaacagaagtacaaaagcaacagccccagatctaagggcaccgtagctctggaatctggattttattccagattcaaccctcagcagggagttgaagtggtcagccctgtgctttacaaggctgattgggcagcacccatagtagaattgtcaatataaagtaattgaaaggatcagaatccagggttttcgttgtttttaagtttttaagttttaaaaacaaagttgtttttgttcgtttttaagtttacttctctttaatcggtctcactttattgaccaggctggtttcgaactcctgggcttaagtgatttctcctgtctcagcttctcaaagtgctgggattacaggcgtgagccgctgcacccagcccagaatccagttttaaagagtttattcaagccaaaagctgggaatggccatctgagaaacacagactctaggaaaatggggccagggccctgaagttaaaagttaaagtcttgcttacataggcagaaagcaaagacatttagtaaccttgtagaacattttcttgtataacttttcttgttttaactttcttgtttaacattttctatgcaaggctggtttatgagttacaacctataattaattataggttgttcccctgcctccaccttgttttcttttctctacagcttgttttcatttcctttccaatttaagaatgtgtttaacattctatcccagacaatgtgatggtcatgaagtctctgtcagagaggaaagagggagttaatctataatgaagatcaacagtgaagaggaaaggggtcttccctggaacgcttcagtcatatacgacattttacacaacaataatggacctgtgtaaggaggtatgtgtgggagaagattccagaaggtcttgagacactccagatgaaggttggtgtggggctgtgctgctggagcaccagagagtgaaaagaggttatctccctctgtgccaggccagagtgcagtggtgcaatcacggctcactgtagtctcaacctcctgggctcaagagatcctcccacttcagcctcccaagcagctaagactacagacatgtccttaaccttggcacaacaaatctctaaatcgattgagacctgtctcagatacttcttggtttacaagatggaggctgaaattaaagagaaagatcctcactcaactcacagaggagcagaatgggaagaggacttagtgagaattccctgaacacaggagaaaaccgaagcccagagagtggatggccaagtccaaggtcacacagccaagtgcatccgagcagcgcaggatccaggtttcctgccccagtgctctttctgcagcccatgccacctgttttcatgctatctcagttcaccttccagctacacacctgcaatcagaaacagaaagtctgagagtgtgtgtggagccaaagaggggacagcagtggttagaagcaaggcacaagtcatacctacattcaaggagaggggaccatgcaaaggataaactgcagagagacaacagatttgcatcccagacacattcacactgggccaagagcagctgccattgcagattcgagtcacgtccttttttccttccttctccttcttggagttacaacagaagctggggaggtgagagtgcagaaaggacgtggatgaagcagagaggcacgtgcctgtctcattcgcctctggatctgctgcatccaggactgtgccagcacaaagtgggagcccgataaatatttattgaagaaatgaaaggtgacaaaaggcagaaggagggagaccccaaaaagagcagcacaggaaacttccccctcaaacactaaaggctcctggagctattcacagttctggggaacaaccaaaggaggaggaggacaaagggaaaaaatactttttttaaaaatcccaaacaaaaccaaattctatacatgtatatctcgagtgagtaaatgtgtaacactcacc

SEQ ID NO: 340542 - DNA, 269 bp, Homo sapiens
gacatgagaagtgaggtttcagttctattattattttttaacttattgaattagttgatggagcttaaagactggaaaagatagtagcgtctgggattgataggaggttgcagatttctggctactaagtgcactgtagaagtggtattgatatcagtcttttctttctttttttcttattcttgtgctttggattattatgtaaatatgtgaaacagaacatgcttactttttcttagggacctaggttattactatttctactctga

SEQ ID NO: 340543 - DNA, 1145 bp, Homo sapiens
acatggtgtcaccccatctctactaaaaaatacaaaaaaattagccaggcatgttggcgcaggcctgtaatcccagctacttaggaggctgagtcaggagaattgcttgaacccgggaggcagaggttgcagtgagccgagatcacaccactgcactccagtctgggtgacagagcaagactctgtctcaaaacaaaaaaaagggggcaaaaagtggctaaatttcaagctcttgatggactatggaaagattataatggcctccaccaaatccaaacatggtaattgctccaatagcaaaagtagttaaacatctcttagagcttatggtttgctttactctgtgtatttcacttgtcaacagtgtaaaagctgacagcttaatggtgaaactatctttaatattggcagggaacaaactctcctaaataacctctccttcccaatttaaatgccagaagattgggagtgcctagaagttgtgagtggcttatcaaaaactgtcaatatgtccttggctatgacatttttgttttatatccattttcagcattgtcagagaacattgtcctttaggatttcagagtttcaccaaaacttaagtggagttcagctaaacagctgagaacagtaaatggttttagggtggttgacacgcacacttcttgaatttctacagggccagccttctagcctttaacaattcaggaaatcataaaccatcacttgttcctgccaacttcctaattcctctggtaccatgcagacaaagaaacactctcttccaatcgcaaataaaatcttttttctctttttttaggtggactcttgctcttgtcacccaggctggagtgcagtggggtgatcttggctcattgcagcctcagcctcccgggttcaagcgagttgcctgctcagcctcccaagtaacagattacaggcacctgccaccacatctgactaatttttgtattttagtagagacagggtttcaccatgttggccaggctggtctcaaactcctgacctcaggtgatccacccatctcgggctcccatagtgctgggattacaggcgtgagccaccatgccctgccagtaaagtctttttttttttttgagagggagtctctctctgtcgcccag

SEQ ID NO: 340544 - DNA, 513 bp, Homo sapiens
atctacaggtagaatatgttcagagaaggtcctaagtaagctcttggctgtgttactcagaattgaggtatgctgtcaggtcaggactgccaaaacaagtaagcaaaaagagatttaagaattgaagattcgattttagaatctgaaacacacgccctgggtttcaaggtaaagaaaaagcagaatgttaaaccccattcggatcaccataggtcggagaatagaagaatagtgataacggtgtcattcacatttatgttgtggggagggatgaatgttatggctgtcagacaagatagagaagaaaatacacaaaatgtgtgagatacagtctatgtcatcaagtagctgaaagttcagatggttggtacttgtggagcaataagagaggtaatatgtgctgagtgggacagaatttttgcctaggataaggaagagaaacttttgggaggtaaatgggaattgagttggcttaaataattaaaatataggtaaagaggaatgtgaagtata

SEQ ID NO: 340545 - DNA, 128 bp, Homo sapiens
ttcctgcaaacttggagttagatatagaagcttcaccagattcagggtcacttttgttagcaaaagtatctcatagacggtgctgtctgcttccataaggagccatgcagacccggctgtcgccttgc

SEQ ID NO: 340546 - DNA, 381 bp, Homo sapiens
cccagatgaaggtgtccttgtgaattgtccctcagtatttaagacaacagtatttaagaggaactactgcctctactcatgggctttgaaccaatctggatattctgctagggaaatttagtcaaagagaccagtctttaaattcaaacagggaattcaaagtgacaaaagtacaatagcataagcaaagtatacggttatagtcttaagagaggaacgggactttatcaggcgtaaggtcttactgatagagttgtatcgcaagtattaggaattaatgaggatgggctgtgctgcggcagcttgaagtctgataaagcctcacctgcacccactgaacattctattcacccaggaagaaggctgacaaatctctatttt

SEQ ID NO: 340547 - DNA, 268 bp, Homo sapiens
tggtcctcctgtctcagccatccaagtagctgaggctataggcaaatagtaccacacccagcttttttaattttttgtacagacagggtcttgttttcccaggctagtcttgaactcctgggctcaagtgatcctctcatttcagctcccaaagtgttaagattgtaggtgtgagccaccatgcctggcttatgttgctaaaggtttaatgtcctttatcaatcgagaaagctccctttattcataatttgtttttactttttaatca

SEQ ID NO: 340548 - DNA, 266 bp, Homo sapiens
ggtatgctgggatcacattgattctgtagatcaatttagggaatattgccattttaacagagttgtatcttctgatccattctcatccatgaacatgggatatctttccttttttttttttttttttttttgggggacacagtcttgttctgtcatccaggctgcagtgaagtacagtaatgcaatcatggctcactgcagctgtaacctactaggctcaagtgatcttccctcctcagccccccaagcagctaggattacaggtg

SEQ ID NO: 340549 - DNA, 495 bp, Homo sapiens
gggatagagtaaaggataattgtaaaatttctggttggattatactctgagctgtggaagctaatagccattagagggaaagataattaactcagtttgcaagaggttgagtttctggtgtgtatgctctcttagaaggagatatctaacacataactgaaattctggtctataattcagaagagagggttgggatagaattatgagtttgctgtcagctcagtcatcattttctcggaatcattcactacatttccatgatgaggtcaaatccctctattctaccctcttaccacaccacgtacctcctctccttgtctgtatgcactttccaatattgtaattgctcattcatttttgagtttatttgattaatgctaataacatccccccaccgcctgcaactgtagggttcatgaaggcaagactgtatttgtttttgatccttttgtatccaaagaacacctgccgcacactaggggcccagcacatatt

SEQ ID NO: 340550 - DNA, 189 bp, Homo sapiens
ctttcctttggtttgtctgtagtcctggtagctaaagataaaccagtattaatttttttcagtcaaatcgattatgttctctggagagtaaacaagtagattgacaaatttttttacttttaaactgcccaatgtagctgggcatgatggtgcatgtctgtagtcctagctacttgggaggccgaggtg

SEQ ID NO: 340551 - DNA, 1091 bp, Homo sapiens
ctcagtgtagagactgacatgaataatggttcagtgaaaatgatctcataattcaaaaattccaaactcttaaagaaaacagtctctgaatcctgaaacttagcagacactacaaatagcaagattagagttcagaaattcagataatatatttattaaataaaatctacaggtcctggtgtgctgtgggttcctagtcagctgccatcttgctcctcttcccacccctcactccttcctgctgcaccttctgaatgcagcccaccatgtcctgactctacccagcccagcctcacttctgcctctggtgaccacaggagagaagggggaagctggcaagtagacctgcagaggctcttcccatcgtctccttcaccttggtgcccacatctagttataatccccattaatccattttattaaatgagctgtaaaaatcagcctggggcccagctagtgacttctgctgggcaaatgaacacctggcctgatgccacaagctctactgcctgtgtgctcaggtgagaaggcagaggtcatgaatccagccacagaatgccctagggaggaggactgaattcccagggggagacctgctaagcctttcaaatgggctgtgcctgactggactctcagcctagctctctggaaccctcaaccacttgtcaactgtgccaagacaaaccctcctagacacaaatcgagtatctagcttggctttctgcactgagcagctgactaccagaggcatctgaggcctccatccgttgattgtcgtggagaagactttgttggggaaaataaacccacccttcctgattaaacattttctccttggccttgttgtagggagaggacctgtaggtacttccagaaactagaatcataggatcttccaaacttcctgtctctaagtacaggagctggaatctttccaccaagtacttatagattcaatcttttgcttagtccatttagcttagggtggaaatttctcaaggcaattactgttttgcagccctttgcataacttgcatagctccttgtagtttagtgaatgacactgaataaaacattctgacaaaattttt

SEQ ID NO: 340552 - DNA, 144 bp, Homo sapiens
cgggtagtaaatggcagagctaaggttcaagcccatacccacctggtctttataaatttaggaataagttctagcttttctgattcccagactaggtctaaatttaatcttagctgtcgtatattgaatttttttttttttttt

SEQ ID NO: 340553 - DNA, 327 bp, Homo sapiens
gaagcattataacttattaaatgatattacagacactgccgtgcctctaatctgtaattgaaaataatttccaaatcacacaaagaatggcctcctgtgaattttcacaccttcaaattcagatccagttttaagacatttaatgattacattataaagccaattcatccagccagaaaagctgcctctctccattcttagaaccggagcagatacattagagacaaagcagagccctcacgaaagaagaacaagggtgatgactcacaaagctctatttgggagtctgaatttggggagaatcttgctgctgtagactgatgtatc

SEQ ID NO: 340554 - DNA, 148 bp, Homo sapiens
cgctgttctcaggcagtcagccctacttatcccctcattttaaagtaataatttacctcccttctcatatttctaaggaaatagataatatctggcacatactccctcggcttgcctcccctccgtattcaaacttaccttcatcaca

SEQ ID NO: 340555 - DNA, 79 bp, Homo sapiens
tttagggtctgttgggggcctggagaaaaatcacttgaatgaatttaattagcaaagatgcataaatgggacaaaggag

SEQ ID NO: 340556 - DNA, 365 bp, Homo sapiens
aaggggcctgggactgagccttagggacacttctttacctagaagtcaagcagagaaaggagtgtcagctaaggagatcaagaagcagtggccagtcaggtagatcaaaaaccaggggatgctgttgtcccagaagtcaagagaagaatggatctcaaaagataagaatgtcaggtgagtgcccttccctggaaaagaaaaaagataagaatgatcagttgtgtcaaatactaatgtgagagttcgaaagagataaaaacacactggatttgacagcagtcttactggagccattggccaaaaggccagcgagaatgagggtgataaaatggagagactacagacatttagtttaagaaatttgg

SEQ ID NO: 340557 - DNA, 1093 bp, Homo sapiens
aaactctaggtggtctggataccattgtcaagatccctccacatgtactgagggagaaatgcctgctgcctctccagttggctttggaatccaagaatgtgaagctggcccaacatgctttggcagggatgcagaagcttctgtcggaagagaggtttgtatccatggaaacagattctgatgagaagcagctgctcaatcagatactgaatgccgtgaaagtgacgccttcgctcaacgaggacctgcaggtggaagtgatgaaggttttactatgcatcacctacacgccaacatttgatctgaatgggagtgccgtgctgaagatcgcggaggtgtgcattgagacgtacataagcagctgtcaccagcgtagcataaacactgctgtgcgggcaactctcagtcaaatgctgagtgacttgactttacagttacgacagaggcaggagaatacggtgagtctgtgacacccccatgttcatcaccttcctggtggtgtctgtgtatcccatgccccggggcccccactgccagggctgcctgcctcctgaaaacagtaggaagagcttgcttgttttaacagaacatttatttgtacacattaagctctttagatgtttgcctatttcaccctaaagctttgagaattgcttttccttgcagtttccgtgattttttgagttattttaaaacttattttttaatcattgttttaaaacttctcatactgaaaatttttattagaaacattgcgatacactaacaaatattggaagtaaatttgaaattaagaaaaatgaatagaatttattacatgctttgaggttgggtatgtttccctttgttaactaaaagatggtggcaggaggcctccttcacctgctggggccttcagggtgaaactaaacttgtcttctctctatcatcaaagcccactagagctttttgctctaaacttgaacagattgtctaaagtgagcattccaggggaaaatgtaaacgtaattggctccttgtatatattatcttctgggaatgttaatgagagagtgattcctcttcaaaattggtgttttgtgttgttttaaaa

SEQ ID NO: 340558 - DNA, 417 bp, Homo sapiens
  misc_feature (43)..(43): n is a, c, g, or t
taccttactacccacgatactggcccaacatgctttggcaggnatgcagaagcttctgtcggaagagaggtttgtatccatggaaacagattctgatgagaagcagctgctcaatcagatactgaatgccgtgaaagtgacgccttcgctcaacgaggacctgcaggtggaagtgatgaaggttttactatgcatcacctacacgccaacatttgatctgaatgggagtgccgtgctgaagatcgcggaggtgtgcattgagacgtacataagcagctgtcaccagcgtagcataaacactgctgtgcgggcaactctcagtcaaatgctgagtgacttgactttacagttacgacagaggcaggagaatacgataattgaaaacccagatgtcccacaggatttcgggaatcaagg

SEQ ID NO: 340559 - DNA, 1008 bp, Homo sapiens
  misc_feature (43)..(43): n is a, c, g, or t
taccttactacccacgatactggcccaacatgctttggcaggnatgcagaagcttctgtcggaagagaggtttgtatccatggaaacagattctgatgagaagcagctgctcaatcagatactgaatgccgtgaaagtgacgccttcgctcaacgaggacctgcaggtggaagtgatgaaggttttactatgcatcacctacacgccaacatttgatctgaatgggagtgccgtgctgaagatcgcggaggtgtgcattgagacgtacataagcagctgtcaccagcgtagcataaacactgctgtgcgggcaactctcagtcaaatgctgagtgacttgactttacagttacgacagaggcaggagaatacggtgagtctgtgacacccccatgttcatcaccttcctggtggtgtctgtgtatcccatgccccggggcccccactgccagggctgcctgcctcctgaaaacagtaggaagagcttgcttgttttaacagaacatttatttgtacacattaagctctttagatgtttgcctatttcaccctaaagctttgagaattgcttttccttgcagtttccgtgattttttgagttattttaaaacttattttttaatcattgttttaaaacttctcatactgaaaatttttattagaaacattgcgatacactaacaaatattggaagtaaatttgaaattaagaaaaatgaatagaatttattacatgctttgaggttgggtatgtttccctttgttaactaaaagatggtggcaggaggcctccttcacctgctggggccttcagggtgaaactaaacttgtcttctctctatcatcaaagcccactagagctttttgctctaaacttgaacagattgtctaaagtgagcattccaggggaaaatgtaaacgtaattggctccttgtatatattatcttctgggaatgttaatgagagagtgattcctcttcaaaattggtgttttgtgttgttttaaaa

SEQ ID NO: 340560 - DNA, 768 bp, Homo sapiens
gtcaattaaaaagaaaaaaaagagatagggtctcactgtgttgcccaggagtttgagaccagcctggccaacatgatgaaaccccgtctttactaaaaatataaaaattacccaggcacccgccaccacgcccggctaattttttgcatttttagtagagacggggtttcaccgtgttagccaggatggtcttgatcccctgacctcatgatccgcccgcctcagcctcccaaagtgctgggattacaggcgtgagccaccgcacctggcctcagaattttttttaaatcctgatttctttattgatgatatctagaaatgcagttgatttttgtctattggttttatatatagcagcattgctgattctctcattaacattctatatgtagatttattggagtttcctcatgggcagtcatatcctctgtgtgaatagtgacatttttttttctttccaatctctagctctttatttcttatacttgtccatgctagctaggacttctgtatagtattgaataaaagctacaatgttatacccttggctttttccttgatttaaaggaaattgactgaatggttctccatcaagcatagtgttcgctctggggtttacgtgtgtgtgtatattctttctgaagtaaaaattaattttcaataagaagatctagtaatgaagtataaaagaaatgctagtttacttcattcactaaatttttgttcaagtcttcttgtcttctgatagttgtcttctccttaacaaaa

SEQ ID NO: 340561 - DNA, 163 bp, Homo sapiens
tatcctttcatccattagatatttagattgtttccaagttttggctattacaaataaagctgctgtgaagatttgtacacaagtctttgtacacaaatacacgtttcatttgtaaacaaatacacatttcattattcttggttaaaaacgtagcagtgaatga

SEQ ID NO: 340562 - DNA, 484 bp, Homo sapiens
catcattgaaaggatgtatcttgcaacccaacattttttgcctacaattatatagggggaaaaatgtacatattgtatatttcttgggatatactgttttagtaatgtttcctagtgacaagtctccctgtatctaagacctcatagagtgtgctctgataacaaatggggctctgtcatttgacttgctttggccaatgggacatagaaaatatgatgaaaatgtaggttggaaaagtacttgcccactggtgcttgccttcttgaacaagtgtcagcatgaaccaccagacatgcgagtgaaggcaccagatgaccaaagcctcatttgtgatccagacaacattagcaaaggaaatgcccaggtgaacacacaccaaaatgtgaatcaacagaacttctttttaagccattgagtttcgttggttctttacacagaaaacagtaactgatacacctaagccaccagaacttaatgttttta

SEQ ID NO: 340563 - DNA, 492 bp, Homo sapiens
tctttctcttgttgaggaataaatatttaaactgcaaattgagtgattaacgttctggtaagggaagccagagaaaggaattggttcgtttgagaagctactattagaaaaatttgctggccttctattgaaattttaggttgttcaaacattagaataagagactaaacataggtaaacatggggtgatgattttacataagtctttctggatgctcagttctacagtttcttaaatgtctcccagctgactctgacctaacaggttttctgctgctcagaacaaagctgggcgagtgtccaatacatggaaatttatgggtttgtaggacaatataaaattataacagtctttctggagctgacagaattgcttgctaacttttatttcccccaaactgagatatgaaaataatctaccacttagtagattccatttcatagaagaaagggcatttttttttattatactttaagttctagggtacatgt

SEQ ID NO: 340564 - DNA, 511 bp, Homo sapiens
caccacacccagctgatttctttatttttagcagatatgtagtttcaccatcttggctaggctggtctcgaactcctgactcaagtgatccacccgccttggcctcccaaagtcctgggattacaggcgtgagccactgcactggcccacccttgttttatttttgagttgggttcttgctttgtcacccaggctggagtacaatggtatgagcatagctcactgtaactttgaactcctgagctcaagcggttctcccacctcaacctcctgagtagtagctgggactacaggtttgcactgccatgcctggctaagtttttagttttaatttttatggagatggggtcttactgtgttgcccaggctgttctcaaacttctaacctcaacgtgatcctcctgccttggcctcccaaagtgttgggattacaggcatgagccactgccagctcaggcatttttatttattcttttggccaatgatcagagggccgtgcgattaatttgtt

SEQ ID NO: 340565 - DNA, 438 bp, Homo sapiens
gtgtttgaccacatatgaagattttagtacccttacaatggagggggtaaagtgtaggaataaaaccagtgctacagaatccaagggacctgagttccctgtgtttctgccattgacttgatatattactagacccaattccttaacctccttaagtcttggtttcctcatatttaaaatggaagtttattttaaatttctatccaaagaaagacacagggtcattgaaaagattaactatatatatatatatagagagagagagagagagagaaagagagagggagagagagagagagagagagagagaagagaagagagctttacatcgagattctatataagcagcttgagaaaagcttgagtcaagaggatttgaattccagcaatatataagtaaacgagcacacacattatcagactcggggtagcgagctc

SEQ ID NO: 340566 - DNA, 337 bp, Homo sapiens
tgctaatggctatattctgcttctgaaccaaatcctttttgttcttagagattttatgacatcgaattatgctgtataattgtgccattaaagtttatccaaatgagccccttctttcctccaaactttggagctgaagcaaaataactcccaagtccttggaagaaatattgtgcctcttcccaaccctaaatcctgatcttaatatctgaatcctccagtactgttgcctctctctaaaatacagtctgggccgcacttactttaaaattagttttatttgataaatgagcatttaggaggccagccccataaacatctagccatatagacccct

SEQ ID NO: 340567 - DNA, 221 bp, Homo sapiens
ttgtgcaaactacttctttcaaaattttgcttaagaacgaaggaggaggagaagaagaggaggaaagaggagaaggagaggagaaaaacacagtagctagtgaagaacaccaagcacttttaagagtaggaagcatgtccctaaggaaatattctgatacagagctgggaaacttgtggacatgacaccctctgggatagggggaggaaaaggagggagaa

SEQ ID NO: 340568 - DNA, 777 bp, Homo sapiens
cagaggttgcagtgagctgagatcgcaccattgcactccagcctgggtgacggagcaagtctccgtctcaaaaaagaagaaagtgaaagttgggtggtgtggcacccctgtgcctgaagtcttagctacctgcgtgactgaggcagggaaaagactacttaagccaaggaggttgaggctagtctgagcaccttggcaagacccatctcaatacaacaacaacaacaacaacaacaaaacgaaaagaaaaataaaaattaacccagaatagccaaagctatttctaagctgaaagggagaaataactttacctgacttcagttatgctacagagctatgataaccaaaacagcatggtactagcataaaaatagacacatagaccagtggaacaggagagagaacccagaaacaaatccacacacctacagtgaacttatttttgacaaaggtcccaagagcataaagtctcttcaataaatagtgctgggaatactggatattcatatgcaaaagaaaaacttgacccctgtctctcagcacatacaaaaactgaaatcaaaatggatgaaaggcttaaatctaagatctcaaaagtatgaaactactataagagaacattgggaaaactctcccggatattgatctgaacaaaaatttatgagcaataccccacaggcacaggcagccaaacaaatatggataaatgtgatcaaatcaagtaaaaaagcttctgcacagcaaagtatacaatcaataaagtgaagagacaaccca

SEQ ID NO: 340569 - DNA, 529 bp, Homo sapiens
tacatccacacaccatcacactacacacacttttacatgctttcacacatacccgttggatatggacacaccaacaagcactcattcccacacatgcttgcactgcacacactgacacactacatgccttcatagttgacacacacttccatgcattcactcacctttttgcacactcattcacactcccatcacaacactgacacacttctgcctgtcctcacacgcctacacacttgccacacacacactgagtgttccatgcacactcacatcctgcgcattcagtcactaacttaccctcatgaccacacacacacagactttcaaatgcactcatccacagacacatattctcatatgcatacgcacttgcacacaaccctcgcacgcttgttcacactccctgacatgcagtcacactagccatcactcatgtgctcacacacatacacactcacatcctgcgcattcagtcactaacttaccctcatgaccacacacagcacaccgcacaatgcccgattca

SEQ ID NO: 340570 - DNA, 103 bp, Homo sapiens
taaacattctccatggctcttttaattcggatgccctttatgcaatctctttcactcccttggagagcactgagtcttatatctgggacatactcaatcattt

SEQ ID NO: 340571 - DNA, 399 bp, Homo sapiens
gactctccaggattctaccacggcaccccctgctcaaacacaccttgttaaaagcacacacataccaccgacctttgttcattgctgatgctcttactgataacccaccctcccagtgaagttgcttactagagtaagctcacagagggcagactctttggttttgcatctataccctgagctggtgagtagtatttttttttcataccctgagctggtgagtagtatttttttttcaatcaacttggaattaagaacttgtggaaaactggacatttcgctataggaagcattgtgatagggaggtattatgtagaaagtctgctctaggaaattgaacattaacttttcatttgagtggcatagctaaatataagttttgatgtaaagaaatttcag

SEQ ID NO: 340572 - DNA, 187 bp, Homo sapiens
acagatgtgagccgctgcgtattgctcaattacttaatttatatctcagtttcctcaccagtaaaaaggggataatagtacttatttaatgcgtttgtatgaggattaaatgaggtaatgcttgaacaatgtttagaactgtgcctgacaaataaaagatataaaaatataaataggtggatgggtg

SEQ ID NO: 340573 - DNA, 2722 bp, Homo sapiens
tggagccagtgccattcacacttccccctcttctgcagcagacggactgagttcctctaatccctgtgttccttctcccccatctttctaaaacccttctctgagagaggaataactatagcttcagggataatatagctttaaggaaacttttggcagatgtggacgtcgtaacatctgggcagtgttaacagaatcccggaggccgggacagaccaggagccactcgttctaggaatgttaaagtagaaggttttttccaattgatgagaggagcagagaggaaggagaaagaggaggagagagaaaaagggcacaaaataccataaaacagatcccatatttctgcttcccctcacttttagaagttaattgatggctgacttctgaaagtcactttcctttgccctggtacttcaggccatatacatcttttcttgtctccataatcctccctttcaaggatggccagtcagctaactcaaagaggagctctctttctgctgttcttcctaactccggcagtgacaccaacatggtatgcaggttctggctactatccggatgaaagctacaatgaagtatatgcagaggaggtcccacaggctcctgccctggactaccgagtcccccgatggtgttatacattaaatatccaggatggagaagccacatgctactcaccgaagggaggaaattatcacagcagcctgggcacgcgttgtgagctctcctgtgaccggggctttcgattgattggaaggaggtcggtgcaatgcctgccaagccgtcgttggtctggaactgcctactgcaggcagatgagatgccacgcactaccattcatcactagtggcacttacacctgcacaaatggagtgcttcttgactctcgctgtgactacagctgttccagtggctaccacctggaaggtgatcgcagccgaatctgcatggaagatgggagatggagtggaggcgagcctgtatgtgtagacatagatccccccaagatccgctgtccccactcacgtgagaagatggcagagccagagaaattgactgctcgagtatactgggacccaccgttggtgaaagattctgctgatggtaccatcaccagggtgacacttcggggccctgagcctggctctcactttcccgaaggagagcatgtgattcgttacactgcctatgaccgagcctacaaccgggccagctgcaagttcattgtgaaagtacaagtgagacgctgcccaactctgaaacctccgcagcacggctacctcacctgcacctcagcgggggacaactatggtgccacctgtgaataccactgtgatggcggttatgatcgccaggggacaccctcccgggtctgtcagtccagccgccagtggtcaggttcaccaccaatctgtgctcctatgaagattaacgtcaacgtcaactcagctgctggtctcttggatcaattctatgagaaacagcgactcctcatcatctcagctcctgatccttccaaccgatattataaaatgcagatctctatgctacagcaatccacctgtggactggatttgcggcatgtgaccatcattgaactggtgggacagccacctcaggaggtggggcgcatccgggagcaacagctgtcagccaacatcatcgaggagctcaggcaatttcagcgcctcactcgctcctacttcaacatggtgttgattgacaagcagggtattgaccgagaccgctacatggaacctgtcacccccgaggaaatcttcacattcattgatgactacctactgagcaatcaggagttgacccagcgtcgggagcaaagggacatatgcgagtgaacttgagccagggcatggttaaagtcaagggaaaagctcctctagttagctgaaactgggacctaataaaaggaggaaatgttttcccacagttctagggacaggactctgaggtgggtgagtttgacaaatcctgcagtgtttccaggcatccttttaggactgtgtaatagtttccctagaagctaggtagggactgaggacaggccttgggcagtgggttgggggtagaagttcttcctttcctaacccgggcccctgcccagctctccaaagtctttcagaaaagtaaatcctaaattcagtgataaactaactgttttaactggttcctctaccctgaggtgacagcagagggcagcacgagcacaacagaaaccagcttacactttaagcaagtgtagctggattttccttacaggatgaggggtgggtagcagggtacaaaacatccttttttttttttttttgagacggagtcttgccttgcgcccaggctggagtgcagtggcgcgatcttggctcaccgcaagctccgtctcctgggttcatgccattctcctgcctcagcctcccgagaagctgggactacaggcgcccaccaccacacccggctaacgttttgtatttttagtagagacgggttttgaccatgttagccaggatggtctctatctcctgacctcgcgatccacccgcctcggcctcccaaagtgctgggattacaggcgtgagccaccacgcccagcccaaaacattcttgaacttgtttgtcatttccccttctagggcactgggcagcaaatgttatctgaaccattgcttcactgttagaaaaaccctgcagtgggagagagctt

SEQ ID NO: 340574 - DNA, 2406 bp, Homo sapiens
  misc_feature (248)..(248): n is a, c, g, or t
  misc_feature (504)..(504): n is a, c, g, or t
  misc_feature (1746)..(1746): n is a, c, g, or t
actcttgataagttgttttccttccccctctaaaatagattctatttgtttagagaagttttaagttcacagcaaaattgaatgaaagatacagatatttcccatttatccccagcacccacacatgtacagcctcccctgttgtcaacatcccccaccagagtggtacattttttacagttgacgaacataaattaatacatcattgtcacctgaattccatagattatattaaggcccactcttgntgtatattctatggattttgacaatgtacagtgttaggtctgattttgaagtctatatgcttggacaagtaatttacttttttgacacccccctgcccaagggtgctgctatactttatgaaaatacaaagacaattagggaaaaaggcagttaggcacaaaaatgtaagggcagttcaggtagggtttctgtattttctgctcttctgatgtttctccctgtgctagatgcccaggcatcacctccagatagtcncacaagccactgagcttgccacttggttttctcttagagatgagatgccacgcactaccattcatcactagtggcacttacacctgcacaaatggagtgcttcttgactctcgctgtgactacagctgttccagtggctaccacctggaaggtgatcgcagccgaatctgcatggaagatgggagatggagtggaggcgagcctgtatgtgtaggtaaatgctggttgctcccagttgtcctggtgcaaagagccaccccagcattatatcgacaaaagatgtggaattctcaccacagaaggcattcctcttagctatgagggtggcaccctgggtatttgctaaacaaaatgatcttctcccctgaagttgcgcttccttccccagtttccttgagcaccttgaactttttatctacccagtggtgtgtggcattgcttcagtggattccctccagggaaagcaaggggcccacgagtcagcacttgatttttcatcttggcagacatagatccccccaagatccgctgtccccactcacgtgagaagatggcagagccagagaaattgactgctcgagtatactgggacccaccgttggtgaaagattctgctgatggtaccatcaccaggtgagcctgaataatggatgccccttatgccttccctcggcttctctcagtcattcaggctggtcacattgaaactgcacaggctaaggtgacagtggggatgtgcctcagacttcaattctaagggtctctttcctcagtgtttatttcaccctgtcccatgcagggtgacacttcggggccctgagcctggctctcactttcccgaaggagagcatgtgattcgttacactgcctatgaccgagcctacaaccgggccagctgcaagttcattgtgaaagtacaaggtcagaaagaattatttagtttccatattgttcattaatcctgctctaccctgacccaccccatgtctctcctctctatgcctggaagagacacacctcatttatactgggagaggagaaaaacaagttcaccaaacaggcttatttaggaagccagcgttacatgtgcatacatatgtttctgaaaccttgactctccaacaagactctcatcaacaagactctcattatcctaaatccagataaaatccacaaggatattctttatccatttcttttcttagacttcaaaatgatcacatgtaatcagccatcattctntcgttcacctctgataaaactggtggtgttggctgcctgattcttcctctttgctttgtgttgtattgttttgttttgcttttctcattataaaaataattcatgcttattgttgaacatttgataaataaagaaatatataaagggggaaaatctattaccccatcatccagaggcaactgctattaactttttggtattttccttccagtcttttttctatacatactttaaaaaatatatagttgagattgtactgtacatccataaatcatccttttcacttttcattaacaaagtaattttcccatgttatttaaaaattcttcagaaatatttttaatgacagcataatattctactctaaaaatatatcgtaatttgcttaacccttctcccaccaatgaacgtttaagattcctccaacttatttctgttattaagaggaattctgcaaggtagtcatctttacacagcatgtccataaagtctggaaacagatggtaatattttcttttaaagattgtcagtcttttgataacaacatgtatattcacctgtgtttccagactttacaaacctttgtctgcatttcagatttaattccttaagaaaggaaaattccagctctatccccagccagtggaaatacagaaaagc

SEQ ID NO: 340575 - DNA, 2170 bp, Homo sapiens
tggagccagtgccattcacacttccccctcttctgcagcagacggactgagttcctctaatccctgtgttccttctcccccatctttctaaaacccttctctgagagaggaataactatagcttcagggataatatagctttaaggaaacttttggcagatgtggacgtcgtaacatctgggcagtgttaacagaatcccggaggccgggacagaccaggagccactcgttctaggaatgttaaagtagaaggttttttccaattgatgagaggagcagagaggaaggagaaagaggaggagagagaaaaagggcacaaaataccataaaacagatcccatatttctgcttcccctcacttttagaagttaattgatggctgacttctgaaagtcactttcctttgccctggtacttcaggccatatacatcttttcttgtctccataatcctccctttcaaggatggccagtcagctaactcaaagaggagctctctttctgctgttcttcctaactccggcagtgacaccaacatggtatgcaggttctggctactatccggatgaaagctacaatgaagtatatgcagaggaggtcccacaggctcctgccctggactaccgagtcccccgatggtgttatacattaaatatccaggatggagaagccacatgctactcaccgaagggaggaaattatcacagcagcctgggcacgcgttgtgagctctcctgtgaccggggctttcgattgattggaaggaggtcggtgcaatgcctgccaagccgtcgttggtctggaactgcctactgcaggcagatgagatgccacgcactaccattcatcactagtggcacttacacctgcacaaatggagtgcttcttgactctcgctgtgactacagctgttccagtggctaccacctggaaggtgatcgcagccgaatctgcatggaagatgggagatggagtggaggcgagcctgtatgtgtagacatagatccccccaagatccgctgtccccactcacgtgagaagatggcagagccagagaaattgactgctcgagtatactgggacccaccgttggtgaaagattctgctgatggtaccatcaccagggtgacacttcggggccctgagcctggctctcactttcccgaaggagagcatgtgattcgttacactgcctatgaccgagcctacaaccgggccagctgcaagttcattgtgaaagtacaagtgagacgctgcccaactctgaaacctccgcagcacggctacctcacctgcacctcagcgggggacaactatggtgccacctgtgaataccactgtgatggcggttatgatcgccaggggacaccctcccgggtctgtcagtccagccgccagtggtcaggttcaccaccaatctgtgctcctatgaagattaacgtcaacgtcaactcagctgctggtctcttggatcaattctatgagaaacagcgactcctcatcatctcagctcctgatccttccaaccgatattataaaatgcagatctctatgctacagcaatccacctgtggactggatttgcggcatgtgaccatcattgaactggtgggacagccacctcaggaggtggggcgcatccgggagcaacagctgtcagccaacatcatcgaggagctcaggcaatttcagcgcctcactcgctcctacttcaacatggtgttgattgacaagcagggtattgaccgagaccgctacatggaacctgtcacccccgaggaaatcttcacattcattgatgactacctactgagcaatcaggagttgacccagcgtcgggagcaaagggacatatgcgagtgaacttgagccagggcatggttaaagtcaagggaaaagctcctctagttagctgaaactgggacctaataaaaggaggaaatgttttcccacagttctagggacaggactctgaggtgggtgagtttgacaaatcctgcagtgtttccaggcatccttttaggactgtgtaatagtttccctagaagctaggtagggactgaggacaggccttgggcagtgggttgggggtagaagttcttcctttcctaacccgggcccctgcccagctctccaaagtctttcagaaaagtaaatcctaaattcagtga

SEQ ID NO: 340576 - DNA, 2746 bp, Homo sapiens
tggagccagtgccattcacacttccccctcttctgcagcagacggactgagttcctctaatccctgtgttccttctcccccatctttctaaaacccttctctgagagaggaataactatagcttcagggataatatagctttaaggaaacttttggcagatgtggacgtcgtaacatctgggcagtgttaacagaatcccggaggccgggacagaccaggagccactcgttctaggaatgttaaagtagaaggttttttccaattgatgagaggagcagagaggaaggagaaagaggaggagagagaaaaagggcacaaaataccataaaacagatcccatatttctgcttcccctcacttttagaagttaattgatggctgacttctgaaagtcactttcctttgccctggtacttcaggccatatacatcttttcttgtctccataatcctccctttcaaggatggccagtcagctaactcaaagaggagctctctttctgctgttcttcctaactccggcagtgacaccaacatggtatgcaggttctggctactatccggatgaaagctacaatgaagtatatgcagaggaggtcccacaggctcctgccctggactaccgagcttgcctttcttctattgctacagtcccccgatggtgttatacattaaatatccaggatggagaagccacatgctactcaccgaagggaggaaattatcacagcagcctgggcacgcgttgtgagctctcctgtgaccggggctttcgattgattggaaggaggtcggtgcaatgcctgccaagccgtcgttggtctggaactgcctactgcaggcagatgagatgccacgcactaccattcatcactagtggcacttacacctgcacaaatggagtgcttcttgactctcgctgtgactacagctgttccagtggctaccacctggaaggtgatcgcagccgaatctgcatggaagatgggagatggagtggaggcgagcctgtatgtgtagacatagatccccccaagatccgctgtccccactcacgtgagaagatggcagagccagagaaattgactgctcgagtatactgggacccaccgttggtgaaagattctgctgatggtaccatcaccagggtgacacttcggggccctgagcctggctctcactttcccgaaggagagcatgtgattcgttacactgcctatgaccgagcctacaaccgggccagctgcaagttcattgtgaaagtacaagtgagacgctgcccaactctgaaacctccgcagcacggctacctcacctgcacctcagcgggggacaactatggtgccacctgtgaataccactgtgatggcggttatgatcgccaggggacaccctcccgggtctgtcagtccagccgccagtggtcaggttcaccaccaatctgtgctcctatgaagattaacgtcaacgtcaactcagctgctggtctcttggatcaattctatgagaaacagcgactcctcatcatctcagctcctgatccttccaaccgatattataaaatgcagatctctatgctacagcaatccacctgtggactggatttgcggcatgtgaccatcattgaactggtgggacagccacctcaggaggtggggcgcatccgggagcaacagctgtcagccaacatcatcgaggagctcaggcaatttcagcgcctcactcgctcctacttcaacatggtgttgattgacaagcagggtattgaccgagaccgctacatggaacctgtcacccccgaggaaatcttcacattcattgatgactacctactgagcaatcaggagttgacccagcgtcgggagcaaagggacatatgcgagtgaacttgagccagggcatggttaaagtcaagggaaaagctcctctagttagctgaaactgggacctaataaaaggaggaaatgttttcccacagttctagggacaggactctgaggtgggtgagtttgacaaatcctgcagtgtttccaggcatccttttaggactgtgtaatagtttccctagaagctaggtagggactgaggacaggccttgggcagtgggttgggggtagaagttcttcctttcctaacccgggcccctgcccagctctccaaagtctttcagaaaagtaaatcctaaattcagtgataaactaactgttttaactggttcctctaccctgaggtgacagcagagggcagcacgagcacaacagaaaccagcttacactttaagcaagtgtagctggattttccttacaggatgaggggtgggtagcagggtacaaaacatccttttttttttttttttgagacggagtcttgccttgcgcccaggctggagtgcagtggcgcgatcttggctcaccgcaagctccgtctcctgggttcatgccattctcctgcctcagcctcccgagaagctgggactacaggcgcccaccaccacacccggctaacgttttgtatttttagtagagacgggttttgaccatgttagccaggatggtctctatctcctgacctcgcgatccacccgcctcggcctcccaaagtgctgggattacaggcgtgagccaccacgcccagcccaaaacattcttgaacttgtttgtcatttccccttctagggcactgggcagcaaatgttatctgaaccattgcttcactgttagaaaaaccctgcagtgggagagagctt

SEQ ID NO: 340577 - DNA, 2033 bp, Homo sapiens
tggagccagtgccattcacacttccccctcttctgcagcagacggactgagttcctctaatccctgtgttccttctcccccatctttctaaaacccttctctgagagaggaataactatagcttcagggataatatagctttaaggaaacttttggcagatgtggacgtcgtaacatctgggcagtgttaacagaatcccggaggccgggacagaccaggagccactcgttctaggaatgttaaagtagaaggttttttccaattgatgagaggagcagagaggaaggagaaagaggaggagagagaaaaagggcacaaaataccataaaacagatcccatatttctgcttcccctcacttttagaagttaattgatggctgacttctgaaagtcactttcctttgccctggtacttcaggccatatacatcttttcttgtctccataatcctccctttcaaggatggccagtcagctaactcaaagaggagctctctttctgctgttcttcctaactccggcagtgacaccaacatggtatgcaggttctggctactatccggatgaaagctacaatgaagtatatgcagaggaggtcccacaggctcctgccctggactaccgagtcccccgatggtgttatacattaaatatccaggatggagaagccacatgctactcaccgaagggaggaaattatcacagcagcctgggcacgcgttgtgagctctcctgtgaccggggctttcgattgattggaaggaggtcggtgcaatgcctgccaagccgtcgttggtctggaactgcctactgcaggcagatgagatgccacgcactaccattcatcactagtggcacttacacctgcacaaatggagtgcttcttgactctcgctgtgactacagctgttccagtggctaccacctggaaggtgatcgcagccgaatctgcatggaagatgggagatggagtggaggcgagcctgtatgtgtagacatagatccccccaagatccgctgtccccactcacgtgagaagatggcagagccagagaaattgactgctcgagtatactgggacccaccgttggtgaaagattctgctgatggtaccatcaccagggtgacacttcggggccctgagcctggctctcactttcccgaaggagagcatgtgattcgttacactgcctatgaccgagcctacaaccgggccagctgcaagttcattgtgaaagtacaagtgagacgctgcccaactctgaaacctccgcagcacggctacctcacctgcacctcagcgggggacaactatggtgccacctgtgaataccactgtgatggcggttatgatcgccaggggacaccctcccgggtctgtcagtccagccgccagtggtcaggttcaccaccaatctgtgctcctatgaagattaacgtcaacgtcaactcagctgctggtctcttggatcaattctatgagaaacagcgactcctcatcatctcagctcctgatccttccaaccgatattataaaatgcagatctctatgctacagcaatccacctgtggactggatttgcggcatgtgaccatcattgaactggtgggacagccacctcaggaggtggggcgcatccgggagcaacagctgtcagccaacatcatcgaggagctcaggcaatttcagcgcctcactcgctcctacttcaacatggtgttgattgacaagcagggtattgaccgagaccgctacatggaacctgtcacccccgaggaaatcttcacattcattgatgactacctactgagcaatcaggagttgacccagcgtcgggagcaaagggacatatgcgagtgaacttgagccagggcatggttaaagtcaagggaaaagctcctctagttagctgaaactgggacctaataaaaggaggaaatgttttcccacagttctagggacaggactctgaggtgggcagtgggctacatcagtgggctacgtcagtgggtcatcagttgggtacaccag

SEQ ID NO: 340578 - DNA, 399 bp, Homo sapiens
tttttgcatatggaagtacaagtgctccagcaccgtttgtttgaaggctatctttcttccacttaattgtttttgcacttttgtcaaaaatcatttcaacacacctgtgtgggtttacttctgggctctctatttttttccattgacctatttgtcttttcaccaacaccacactgtcttgattactatacttctagcttgcctttcttctattgctacagtcccccgatggtgttatacattaaatatccaggatggagaagccacatgctactcaccgaagggaggaaattatcacagcagcctgggcacgcgttgtgagctctcctgtgaccggggctttcgattgattggaaggaggtcggtgcaatgcctgccaagccgtcgttggtctggaac

SEQ ID NO: 340579 - DNA, 2450 bp, Homo sapiens
  misc_feature (151)..(151): n is a, c, g, or t
  misc_feature (849)..(849): n is a, c, g, or t
  misc_feature (1154)..(1154): n is a, c, g, or t
  misc_feature (1164)..(1164): n is a, c, g, or t
  misc_feature (2317)..(2317): n is a, c, g, or t
atgaagttggaggtgttcgtccctcgcgcggcccacggggacaagcagggcagtgacctggagggcgcgggcggcagcgacgcgccgtccccgctgtcggcggcgggagacgactccctgggctcagatggggactgcgcggccaagccgnccgcgggcggcggcgccagagatacgcagggcgacggcgaacagagtgcgggaggcgggccgggcgcggaggaggcgatcccggcagcagctgctgcagcggtggtggcggagggcgcggaggccggggcggcggggccaggcgcgggcggcgcggggagcggcgagggtgcacgcagcaagccatatacgcggcggcccaagcccccctactcgtacatcgcgctcatcgccatggccatccgcgactcggcgggcgggcgcttgacgctggcggagatcaacgagtacctcatgggcaagttcccctttttccgcggcagctacacgggctggcgcaactccgtgcgccacaacctttcgctcaacgactgcttcgtcaaggtgctgcgcgacccctcgcggccctggggcaaggacaactactggatgctcaaccccaacagcgagtacaccttcgccgacggggtcttccgccgccgccgcaagcgcctcagccaccgcgcgccggtccccgcgcccgggctgcggcccgaggaggccccgggcctccccgccgccccgccgcccgcgcccgccgccccggcctcgccccgcatgcgctcgcccgcccgccaggaggagcgcgccagccccgcgggcaagttctccagctccttcgccatcgacagcatcctgcgcaagcccttccgcagccgncgcctcagggacacggcccccgggacgacgcttcagtggggcgccgcgccctgcccgccgctgcccgcgttccccgcgctcctccccgcggcgccctgcagggccctgctgccgctctgcgcgtacggcgcgggcgagccggcgcggctgggcgcgcgcgaggccgaggtgccaccgaccgcgccgcccctcctgcttgcacctctcccggcggcggcccccgccaagccactccgaggcccggcggccggcggcgcgcacctgtactgccccctgcggctgcccgcagccctgcaggcggcctnagtccgccgncctggcccgcacctgccgtacccggtggagacgctcctagcctgagtagcgccgcggggcccgggaacgccgagtgcgcgccgtcggggaggcgggaacgcgggcccgcgcgcggactttgcactttgaatccagaggaagatgaatttttaaaatctccatcaaacgtgccttaaagctaaagcattttgacaggagtatttaaacttagtccaggatattttcctttgtgttttataactttacagaggaccaaagcaattcttgttttagtttctttgcgaagcctgctcctccttcccttcataaggactttttttgtctttctttaacgcccaggcttcgtcttatttctactgtttttgtcgcaacttccattgatttatgtcccttccctcccccctaagtacatcagggaacctttccacactataaatgatatgactactgtttggggtttctgggcccccatccgtgtacgtatgtggcatttccaggtatgactgagtgtgagagacatgtcagaggctcttcagtgatttcttgctattgaccgatgcttcactgtgccaaaagagaaaaaaaatgttgggttttgtaattaaattatttatatatttttgaaacccgaattgaaaatgttgcaggcaacgggctacagctttattagtggttctctaactgtggtctccttgggccaagcaatttctttaaaggaaaagttgattatgtatgtggggtgccaggaccactgccttgaaagcaagtgtgatttttatttttaatattattttatttgtgtctgtgtacatattcatgtataaattttatgaaacccaagcatagtgcttattttttaataaaacaactgacttaacacattgtgaaaaaaaaaaaaaaaaaacaaacaaaaaaattttttggggccctcgcccagaaaagtttttaaacccctctttgggcgccgggcccacaatgtatgcaaaactgggcaacgtctgccccaagagcaaacccgggtctagaagatgtgcttgtgcttttccccacccaataaaaaacgcgcgcggggacacccgggttttggaacaatcacaatggatgctcgggctaactggtcctcacaaccagggcccccgagtcgataaacacnccgcgccgggagaggaagagagcgcacgacgacagcacgagcgactacgagcacagagagggcgcaaccaagcacacaacagaaaaagaagaagcaacaaacagatagagaagacgcgaacagcgaagaacga

SEQ ID NO: 340580 - DNA, 271 bp, Homo sapiens
  misc_feature (6)..(6): n is a, c, g, or t
gtcctntggtttttttttttcccctttttctgaaaaccggggtctcgctatattgcccaggcaggtctcgaactccttgggccaagcaatttctttaaaggaaaagttgattatgtatgtggggtgccaggaccactgccttgaaagcaagtgtgatttttatttttaatattattttatttgtgtctgtgtacatattcatgtataaattttatgaaacccaagcatagtgcttattttttaataaaacaactgacttaacacattgtga

SEQ ID NO: 340581 - DNA, 2097 bp, Homo sapiens
  misc_feature (151)..(151): n is a, c, g, or t
  misc_feature (849)..(849): n is a, c, g, or t
  misc_feature (1154)..(1154): n is a, c, g, or t
  misc_feature (1164)..(1164): n is a, c, g, or t
atgaagttggaggtgttcgtccctcgcgcggcccacggggacaagcagggcagtgacctggagggcgcgggcggcagcgacgcgccgtccccgctgtcggcggcgggagacgactccctgggctcagatggggactgcgcggccaagccgnccgcgggcggcggcgccagagatacgcagggcgacggcgaacagagtgcgggaggcgggccgggcgcggaggaggcgatcccggcagcagctgctgcagcggtggtggcggagggcgcggaggccggggcggcggggccaggcgcgggcggcgcggggagcggcgagggtgcacgcagcaagccatatacgcggcggcccaagcccccctactcgtacatcgcgctcatcgccatggccatccgcgactcggcgggcgggcgcttgacgctggcggagatcaacgagtacctcatgggcaagttcccctttttccgcggcagctacacgggctggcgcaactccgtgcgccacaacctttcgctcaacgactgcttcgtcaaggtgctgcgcgacccctcgcggccctggggcaaggacaactactggatgctcaaccccaacagcgagtacaccttcgccgacggggtcttccgccgccgccgcaagcgcctcagccaccgcgcgccggtccccgcgcccgggctgcggcccgaggaggccccgggcctccccgccgccccgccgcccgcgcccgccgccccggcctcgccccgcatgcgctcgcccgcccgccaggaggagcgcgccagccccgcgggcaagttctccagctccttcgccatcgacagcatcctgcgcaagcccttccgcagccgncgcctcagggacacggcccccgggacgacgcttcagtggggcgccgcgccctgcccgccgctgcccgcgttccccgcgctcctccccgcggcgccctgcagggccctgctgccgctctgcgcgtacggcgcgggcgagccggcgcggctgggcgcgcgcgaggccgaggtgccaccgaccgcgccgcccctcctgcttgcacctctcccggcggcggcccccgccaagccactccgaggcccggcggccggcggcgcgcacctgtactgccccctgcggctgcccgcagccctgcaggcggcctnagtccgccgncctggcccgcacctgccgtacccggtggagacgctcctagcctgagtagcgccgcggggcccgggaacgccgagtgcgcgccgtcggggaggcgggaacgcgggcccgcgcgcggactttgcactttgaatccagaggaagatgaatttttaaaatctccatcaaacgtgccttaaagctaaagcattttgacaggagtatttaaacttagtccaggatattttcctttgtgttttataactttacagaggaccaaagcaattcttgttttagtttctttgcgaagcctgctcctccttcccttcataaggactttttttgtctttctttaacgcccaggcttcgtcttatttctactgtttttgtcgcaacttccattgatttatgtcccttccctcccccctaagtacatcagggaacctttccacactataaatgatatgactactgtttggggtttctgggcccccatccgtgtacgtatgggggccgcggttccaccctcgggtgcccgagcacgccgggcttagatggcatttccaggtatgactgagtgtgagagacatgtcagaggctcttcagtgatttcttgctattgaccgatgcttcactgtgccaaaagagaaaaaaaatgttgggttttgtaattaaattatttatatatttttgaaacccgaattgaaaatgttgcaggcaacgggctacagctttattagtggttctctaactgtggtctccttgggccaagcaatttctttaaaggaaaagttgattatgtatgtggggtgccaggaccactgccttgaaagcaagtgtgatttttatttttaatattattttatttgtgtctgtgtacatattcatgtataaattttatgaaacccaagcatagtgcttattttttaataaaacaactgacttaacacattgtga

SEQ ID NO: 340582 - DNA, 2051 bp, Homo sapiens
  misc_feature (151)..(151): n is a, c, g, or t
  misc_feature (849)..(849): n is a, c, g, or t
  misc_feature (1154)..(1154): n is a, c, g, or t
  misc_feature (1164)..(1164): n is a, c, g, or t
atgaagttggaggtgttcgtccctcgcgcggcccacggggacaagcagggcagtgacctggagggcgcgggcggcagcgacgcgccgtccccgctgtcggcggcgggagacgactccctgggctcagatggggactgcgcggccaagccgnccgcgggcggcggcgccagagatacgcagggcgacggcgaacagagtgcgggaggcgggccgggcgcggaggaggcgatcccggcagcagctgctgcagcggtggtggcggagggcgcggaggccggggcggcggggccaggcgcgggcggcgcggggagcggcgagggtgcacgcagcaagccatatacgcggcggcccaagcccccctactcgtacatcgcgctcatcgccatggccatccgcgactcggcgggcgggcgcttgacgctggcggagatcaacgagtacctcatgggcaagttcccctttttccgcggcagctacacgggctggcgcaactccgtgcgccacaacctttcgctcaacgactgcttcgtcaaggtgctgcgcgacccctcgcggccctggggcaaggacaactactggatgctcaaccccaacagcgagtacaccttcgccgacggggtcttccgccgccgccgcaagcgcctcagccaccgcgcgccggtccccgcgcccgggctgcggcccgaggaggccccgggcctccccgccgccccgccgcccgcgcccgccgccccggcctcgccccgcatgcgctcgcccgcccgccaggaggagcgcgccagccccgcgggcaagttctccagctccttcgccatcgacagcatcctgcgcaagcccttccgcagccgncgcctcagggacacggcccccgggacgacgcttcagtggggcgccgcgccctgcccgccgctgcccgcgttccccgcgctcctccccgcggcgccctgcagggccctgctgccgctctgcgcgtacggcgcgggcgagccggcgcggctgggcgcgcgcgaggccgaggtgccaccgaccgcgccgcccctcctgcttgcacctctcccggcggcggcccccgccaagccactccgaggcccggcggccggcggcgcgcacctgtactgccccctgcggctgcccgcagccctgcaggcggcctnagtccgccgncctggcccgcacctgccgtacccggtggagacgctcctagcctgagtagcgccgcggggcccgggaacgccgagtgcgcgccgtcggggaggcgggaacgcgggcccgcgcgcggactttgcactttgaatccagaggaagatgaatttttaaaatctccatcaaacgtgccttaaagctaaagcattttgacaggagtatttaaacttagtccaggatattttcctttgtgttttataactttacagaggaccaaagcaattcttgttttagtttctttgcgaagcctgctcctccttcccttcataaggactttttttgtctttctttaacgcccaggcttcgtcttatttctactgtttttgtcgcaacttccattgatttatgtcccttccctcccccctaagtacatcagggaacctttccacactataaatgatatgactactgtttggggtttctgggcccccatccgtgtacgtatgtggcatttccaggtatgactgagtgtgagagacatgtcagaggctcttcagtgatttcttgctattgaccgatgcttcactgtgccaaaagagaaaaaaaatgttgggttttgtaattaaattatttatatatttttgaaacccgaattgaaaatgttgcaggcaacgggctacagctttattagtggttctctaactgtggtctccttgggccaagcaatttctttaaaggaaaagttgattatgtatgtggggtgccaggaccactgccttgaaagcaagtgtgatttttatttttaatattattttatttgtgtctgtgtacatattcatgtataaattttatgaaacccaagcatagtgcttattttttaataaaacaactgacttaacacattgtga

SEQ ID NO: 340583 - DNA, 2401 bp, Homo sapiens
  misc_feature (151)..(151): n is a, c, g, or t
  misc_feature (849)..(849): n is a, c, g, or t
  misc_feature (1154)..(1154): n is a, c, g, or t
  misc_feature (1164)..(1164): n is a, c, g, or t
  misc_feature (2268)..(2268): n is a, c, g, or t
atgaagttggaggtgttcgtccctcgcgcggcccacggggacaagcagggcagtgacctggagggcgcgggcggcagcgacgcgccgtccccgctgtcggcggcgggagacgactccctgggctcagatggggactgcgcggccaagccgnccgcgggcggcggcgccagagatacgcagggcgacggcgaacagagtgcgggaggcgggccgggcgcggaggaggcgatcccggcagcagctgctgcagcggtggtggcggagggcgcggaggccggggcggcggggccaggcgcgggcggcgcggggagcggcgagggtgcacgcagcaagccatatacgcggcggcccaagcccccctactcgtacatcgcgctcatcgccatggccatccgcgactcggcgggcgggcgcttgacgctggcggagatcaacgagtacctcatgggcaagttcccctttttccgcggcagctacacgggctggcgcaactccgtgcgccacaacctttcgctcaacgactgcttcgtcaaggtgctgcgcgacccctcgcggccctggggcaaggacaactactggatgctcaaccccaacagcgagtacaccttcgccgacggggtcttccgccgccgccgcaagcgcctcagccaccgcgcgccggtccccgcgcccgggctgcggcccgaggaggccccgggcctccccgccgccccgccgcccgcgcccgccgccccggcctcgccccgcatgcgctcgcccgcccgccaggaggagcgcgccagccccgcgggcaagttctccagctccttcgccatcgacagcatcctgcgcaagcccttccgcagccgncgcctcagggacacggcccccgggacgacgcttcagtggggcgccgcgccctgcccgccgctgcccgcgttccccgcgctcctccccgcggcgccctgcagggccctgctgccgctctgcgcgtacggcgcgggcgagccggcgcggctgggcgcgcgcgaggccgaggtgccaccgaccgcgccgcccctcctgcttgcacctctcccggcggcggcccccgccaagccactccgaggcccggcggccggcggcgcgcacctgtactgccccctgcggctgcccgcagccctgcaggcggcctnagtccgccgncctggcccgcacctgccgtacccggtggagacgctcctagcctgagtagcgccgcggggcccgggaacgccgagtgcgcgccgtcggggaggcgggaacgcgggcccgcgcgcggactttgcactttgaatccagaggaagatgaatttttaaaatctccatcaaacgtgccttaaagctaaagcattttgacaggagtatttaaacttagtccaggatattttcctttgtgttttataactttacagaggaccaaagcaattcttgttttagtttctttgcgaagcctgctcctccttcccttcataaggactttttttgtctttctttaacgcccaggcttcgtcttatttctactgtttttgtcgcaacttccattgatttatgtcccttccctcccccctaagtacatcagggaacctttccacactataaatgatatgactactgtttggggtttctgggcccccatccgtgtacgtatgtggcatttccaggtatgactgagtgtgagagacatgtcagaggctcttcagtgatttcttgctattgaccgatgcttcactgtgccaaaagagaaaaaaaatgttgggttttgtaattaaattatttatatatttttgaaacccgaattgaaaatgttgcaggcaacgggctacagctttattagtggttctctaactgtggtctccttgggccaagcaatttctttaaaggaaaagttgattatgtatgtggggtgccaggaccactgccttgaaagcaagtgtgatttttatttttaatattattttatttgtgtctgtgtacatattcatgtataaattttatgaaacccaaaaaaaaaaaaaaaaacaaacaaaaaaattttttggggccctcgcccagaaaagtttttaaacccctctttgggcgccgggcccacaatgtatgcaaaactgggcaacgtctgccccaagagcaaacccgggtctagaagatgtgcttgtgcttttccccacccaataaaaaacgcgcgcggggacacccgggttttggaacaatcacaatggatgctcgggctaactggtcctcacaaccagggcccccgagtcgataaacacnccgcgccgggagaggaagagagcgcacgacgacagcacgagcgactacgagcacagagagggcgcaaccaagcacacaacagaaaaagaagaagcaacaaacagatagagaagacgcgaacagcgaagaacga

SEQ ID NO: 340584 - DNA, 1888 bp, Homo sapiens
cgcccgggcaggttagaattcagcgaccgcttaattctaggctcagtcccgacgtggaactcagcagcggaggctggacgcttgcatggcgcttgagagattccatcgtgcctggctcacataagcgcttcctggaagtgaagtcgtgctgtcctgaacgcgggccaggcagctgcggcctgggggttttggagtgatcacgaatgagcaaggcgtttgggctcctgaggcaaatctgtcagtccatcctggctgagtcctcgcagtccccggcagatcttgaagaaaagaaggaagaagacagcaacatgaagagagagcagcccagagagcgtcccagggcctgggactaccctcatggcctggttggtttacacaacattggacagacctgctgccttaactccttgattcaggtgttcgtaatgaatgtggacttcaccaggatattgaagaggatcacggtgcccaggggagctgacgagcagaggagaagcgtccctttccagatgcttctgctgctggagaagatgcaggacagccggcagaaagcagtgcggcccctggagctggcctactgcctgcagaagtgcaacgtgcccttgtttgtccaacatgatgctgcccaactgtacctcaaactctggaacctgattaaggaccagatcactgatgtgcacttggtggagagactgcaggccctgtatacgatccgggtgaaggactccttgatttgcgttgactgtgccatggagagtagcagaaacagcagcatgctcaccctcccactttctctttttgatgtggactcaaagcccctgaagacactggaggacgccctgcactgcttcttccagcccagggagttatcaagcaaaagcaagtgcttctgtgagaactgtgggaagaagacccgtgggaaacaggtcttgaagctgacccatttgccccagaccctgacaatccacctcatgcgattctccatcaggaattcacagacgagaaagatctgccactccctgtacttcccccagagcttggatttcagccagatccttccaatgaagcgagagtcttgtgatgctgaggagcagtctggagggcagtatgagctttttgctgtgattgcgcacgtgggaatggcagactccggtcattactgtgtctacatccggaatgctgtggatggaaaatggttctgcttcaatgactccaatatttgcttggtgtcctgggaagacatccagtgtacctacggaaatcctaactaccactggcaggaaactgcatatcttctggtttacatgaagatggagtgctaatggaaatgcccaaaaccttcagagattgacacgctgtcattttccatttccgttcctggatctacggagtcttctaagagattttgcaatgaggagaagcattgttttcaaactatataactgagccttatttataattagggatattatcaaaatatgtaaccatgaggcccctcaggtcctgatcagtcagaatggatgctttcaccagcagacccggccatgtggctgctcggtcctgggtgctcgctgctgtgcaagacattagccctttagttatgagcctgtgggaacttcaggggttcccagtggggagagcagtggcagtgggaggcatctgggggccaaaggtcagtggcagggggtatttcagtattatacaactgctgtgaccagacttgtatactggctgaatatcagtgctgtttgtaatttttcactttgagaaccaacattaattccatatgaatcaagtgttttgtaactgctattcatttattcagcaaatatttattgatcatctcttctccataagatagtgtgataaacacagtcatgaataaagt

SEQ ID NO: 340585 - DNA, 2074 bp, Homo sapiens
aaagcgagggctggaagtctggagcaggtgcgcggctgcaacggcagccgcgggaagctcgggccggcagggtttccccgcacgctggcgcccagctcccggcgcggaggccgctgtaagtttcgctttccattcagtggaaaacgaaagctgggcggggtgccacgagcgcggggccagaccaaggcgggcccggagcggaacttcggtcccagctcggtccccggctcagtcccgacgtggaactcagcagcggaggctggacgcttgcatggcgcttgagagattccatcgtgcctggctcacataagcgcttcctggaagtgaagtcgtgctgtcctgaacgcgggccaggcagctgcggcctgggggttttggagtgatcacgaatgagcaaggcgtttgggctcctgaggcaaatctgtcagtccatcctggctgagtcctcgcagtccccggcagatcttgaagaaaagaaggaagaagacagcaacatgaagagagagcagcccagagagcgtcccagggcctgggactaccctcatggcctggttggtttacacaacattggacagacctgctgccttaactccttgattcaggtgttcgtaatgaatgtggacttcaccaggatattgaagaggatcacggtgcccaggggagctgacgagcagaggagaagcgtccctttccagatgcttctgctgctggagaagatgcaggacagccggcagaaagcagtgcggcccctggagctggcctactgcctgcagaagtgcaacgtgcccttgtttgtccaacatgatgctgcccaactgtacctcaaactctggaacctgattaaggaccagatcactgatgtgcacttggtggagagactgcaggccctgtatacgatccgggtgaaggactccttgatttgcgttgactgtgccatggagagtagcagaaacagcagcatgctcaccctcccactttctctttttgatgtggactcaaagcccctgaagacactggaggacgccctgcactgcttcttccagcccagggagttatcaagcaaaagcaagtgcttctgtgagaactgtgggaagaagacccgtgggaaacaggtcttgaagctgacccatttgccccagaccctgacaatccacctcatgcgattctccatcaggaattcacagacgagaaagatctgccactccctgtacttcccccagagcttggatttcagccagatccttccaatgaagcgagagtcttgtgatgctgaggagcagtctggagggcagtatgagctttttgctgtgattgcgcacgtgggaatggcagactccggtcattactgtgtctacatccggaatgctgtggatggaaaatggttctgcttcaatgactccaatatttgcttggtgtcctgggaagacatccagtgtacctacggaaatcctaactaccactggcaggaaactgcatatcttctggtttacatgaagatggagtgctaatggaaatgcccaaaaccttcagagattgacacgctgtcattttccatttccgttcctggatctacggagtcttctaagagattttgcaatgaggagaagcattgttttcaaactatataactgagccttatttataattagggatattatcaaaatatgtaaccatgaggcccctcaggtcctgatcagtcagaatggatgctttcaccagcagacccggccatgtggctgctcggtcctgggtgctcgctgctgtgcaagacattagccctttagttatgagcctgtgggaacttcaggggttcccagtggggagagcagtggcagtgggaggcatctgggggccaaaggtcagtggcagggggtatttcagtattatacaactgctgtgaccagacttgtatactggctgaatatcagtgctgtttgtaatttttcactttgagaaccaacattaattccatatgaatcaagtgttttgtaactgctattcatttattcagcaaatatttattgatcatctcttctccataagatagtgtgataaacacagtcatgaataaagt

SEQ ID NO: 340586 - DNA, 1018 bp, Homo sapiens
  misc_feature (788)..(788): n is a, c, g, or t
gttgacattttgacacttctaacaacttcaactttgtcaggccagttgttttaagaatattgtactactcagatataaggtggtattaaaataatcaaactcattatgccccagaaagtagccccagtgaatgccactggaatgcttcgagccactcttgggccaggtgccagtgatttcctcactgcctgagttattccagttaccttggagtaggatgaaatttgcaaaatcaagacaatttttcccattttaattaccacatttgtagttcaaaaaatttcaaatctatacaaaagcaaatgaataccccatatgtctatctttttgccatatatgctttctctctctcgctctctttacacacacacacacacacacacacacacacacacagagtacataaatccctagaaatagcagtagtgatgacaggacatattatctatgaacagagcttaaatagtgctgtgaggaagctccattacattaatatatatcaataaaatgtgaaaacaattttatatagacaactccaaagagcgagataaagaacaagagaaaaacaagagaaaagcagaaggaacttataaggcagaaaaaaacttagggtgttagaaagacaccagaaagtgtagtgagtgagtgaattaataatcagctctttgggaaaggtttcctccgtttttacagtggctctgggaaatacttttaagccaatagcgggcaattggttcgtcacttttcacagaacattttcccccgtggggggatttctcaagtggggncactaaaagaatccacggtttcaaagacaaaacaccaccctttttctgccctgcagaacaaaatgtgggtgtcaatttctcttcaccatgtgttttcacaacatttatctcttcggtcttaacacaggttttctgccacagaaaatatgtctctcttctagcgatggatgagcgtgagcacatcacttcttggacaaaccacacactctcttgttcgtgacaagcatata

SEQ ID NO: 340587 - DNA, 383 bp, Homo sapiens
aggaaagtgtatattcaaggttgaaatgtgtctatgggtcaagaggtcaagcctaaagcttctaagcacctaccagagccacaatgaggaactctcaggacaatgcacacactgatgacagcactgtagcaccagtgaaaacactcaggccatcaacagcatgttcatgaattattcttccaattacactttaattataaaaactagcttattaattaaactaatctactctggtaagatcagttaccacacaaaagcaatggctcttcaagttaccttcatggaatacagtacagagtttgtgttaaaaatgcattttcacttagttgtggttattaaagactttgatcaaggcagaacctctggaaatacaacgaatcttg

SEQ ID NO: 340588 - DNA, 658 bp, Homo sapiens
gttctatgccacttgagaataatgtacatttgagctatttgttaggctctggcttcactccatgcatatctttataaagcaaaactttgttgtttaaatatgggttcatagtaatttatttcctccatcaaatttgtatagaaacttgttaaattctcacacaaggttgtatatttgccaattcctccttattttgttcattttctttaaatatgttgagaccattaatgactttataacttcttagtggatttcttttcttttatcattatacagcattctgctttatccatattggtgcttttgccttaaaatctcttttaccaagtgctaatgttgttatacaaacttttttttcatatttttcactcaatttatgttaagccatcttgtgcagctttgttttatgtctcttgtaacagcacttagcttttgcaattttatctgataatcttagctttttaatgaatttttatttgttttcatttattatgattccagatgtatatggacctgtatcttctgtggtagtgttgaccattcttaatttgtgtttttttgtgtgtctctttcctgatttctgatggattgatataaaattctatattctcccttttccccctgctggtttggaaattaaagacaaaatttctgtaat

SEQ ID NO: 340589 - DNA, 2219 bp, Homo sapiens
aagggcaggtctccagcccagctctctgaaaacattttgctgaaaatataagcaaacatcggccttgtcctccttgtgttcatacactgtggaagcttttctctgcctcctccgtgagagtgcgtggccgggagaccagaaacgtggtcctttctcttgcctgtgagctggtgcagagatggaggaagaagaatatgaacaaattccccaggagaatcccccagaagagctgtcccaggatcctgtgctggagctgtcaggaggtctcgccagaggtggcagacgctatctgccaagccatcgtcttatccgccccagggccccacgccgtgctcctggtgacacaactgggccggttcacggatgaggatcagcaggtggtcaggcgcctgcaggaggtctttggagtgggggttctgggtcacaccatcctggtgttcacccggaaggaagacctggctggcggctccctggaagactatgtgcgagagaccaacaaccaggcccttgcctggctggatgtgacccttgcacggcgccattgcggcttcaacaacagggcacagggggaggagcaggaggcccaactgcgagagctcatggagaaagttgaagccattatgtgggaaaacgaaggagattattacagcaacaaggcttaccaatatacccagcaaaactttcggctgaaagaactacaggaaaggcaagtaagccagggccaaggctctgaggacgtgcctggtgaggagtcttggctggaaggactgtcccagatccagaaggaatctgaggaagcccacagatgcctgctggggaaggctgacctttgagcctgtgctggacttgagccaaggacaccatcagcctttgcacccccctgtgtccagccctctgtttctctttccatcccatggagtgcttcccagtctccaggtcatgacgtctggtgtaggaagaggggcatggggcttgaggacagggtccagcatgcccagatcacattccagttccttcattccttcttccagaacatctgggtcctccctcctctgtgccccaacagcacgctgtcttcctattggaccttctatctcattggcattgcctttcatgagttacttgtctatactctgatagaaccaaagtttcttgagggcaggcctgtatcttttacttctgtgtaacttccacagcttttgactgcattggagtcatgcagtcacgtttggtgcggcaactccatgcaagctgttgaccagatgacttctcatctctccccacaccatgatggtttaaggtgcctgttgtgtctggtggagacagtgctgggagatgatcagaaatctcagggcacagcctcaggtctacctggacactcatccactgttggagatgctcaacagctagacacagatgctcacagccgacctgtggcctcttgctctgaagccatcccccatcttccctagacacagcagacatctgagaaagcttcagcatttctcttgctaacagattcagaaaagtgtctcaaagcagagcacagagttatttggtgtttgctgaagacagcctttgtgccacaatcacttattaaataagcgatcaatttcccattgaactgaacatgcaacatttatcatacattcagttctcattcacactccttaagatttggtcagaatttttatttctgttcatgtcttctacttttctactcctgtatgaataaaatattgatttgattacagtggctttgactataatgtgggagccaatttttgcctcagtcttcatttttatatttaccttgttattctcaggcatttttttcttctatgtgagagttaaaatcattctgtaatttccccccaaaatcatattggtattctagttggcaatgtcttacatttatgttaagtttgagggaattggtagttcaagtataagttaattaaggccattttatttctaagtgaacagacttgaaactccagagctactgaagtaaaagttagaatcatttgcattttcattcagataggagataattttgtaaattttgatgctattattttaactctattagcttaagtaatgtcataatagaaaacacaagcatttgaccaaatgagatccattcagcgactaactggcaaggcactcaaaacatgtcattcattaaatgttgtttttatttacctcaaaaatggtgt

SEQ ID NO: 340590 - DNA, 3410 bp, Homo sapiens
aagggcaggtctccagcccagctctctgaaaacattttgctgaaaatataagcaaacatcggccttgtcctccttgtgttcatacactgtggaagcttttctctgcctcctccgtgagagtgcgtggccgggagaccagaaacgtggtcctttctcttgcctgtgagctggtgcagagatggaggaagaagaatatgaacaaattccccaggagaatcccccagaagagctgtcccaggatcctgtgctggagctgtcaggaggtctaagggagaaagaacagaagaccccaaggagactgaggctcattctcatggggaaaacagggagtgggaagagtgcaacaggaaacagcatcctcggcagggacgtcttcgagtctaaactcagcaccagacccgtgaccaagacctcccagagacggagccgagagtgggctgggaaggagcttgaggtgattgacacacccaacattctgtccccccaggtctcgccagaggtggcagacgctatctgccaagccatcgtcttatccgccccagggccccacgccgtgctcctggtgacacaactgggccggttcacggatgaggatcagcaggtggtcaggcgcctgcaggaggtctttggagtgggggttctgggtcacaccatcctggtgttcacccggaaggaagacctggctggcggctccctggaagactatgtgcgagagaccaacaaccaggcccttgcctggctggatgtgacccttgcacggcgccattgcggcttcaacaacagggcacagggggaggagcaggaggcccaactgcgagagctcatggagaaagttgaagccattatgtgggaaaacgaaggagattattacagcaacaaggcttaccaatatacccagcaaaactttcggctgaaagaactacaggaaaggcaagtaagccagggccaaggctctgaggacgtgcctggtgaggagtcttggctggaaggactgtcccagatccagaaggaatctgaggaagcccacagatgcctgctggggaaggctgacctttgagcctgtgctggacttgagccaaggacaccatcagcctttgcacccccctgtgtccagccctctgtttctctttccatcccatggagtgcttcccagtctccaggtcatgacgtctggtgtaggaagaggggcatggggcttgaggacagggtccagcatgcccagatcacattccagttccttcattccttcttccagaacatctgggtcctccctcctctgtgccccaacagcacgctgtcttcctattggaccttctatctcattggcattgcctttcatgagttacttgtctatactctgatagaaccaaagtttcttgagggcaggcctgtatcttttacttctgtgtaacttccacagcttttgactgcattggagtcatgcagtcacgtttggtgcggcaactccatgcaagctgttgaccagatgacttctcatctctccccacaccatgatggtttaaggtgcctgttgtgtctggtggctggaacatggcagtggtgctgagacatggggagggttggagactgggtggggagggttggagactgggctgggaggagagcaagcaggaacagggatggaggcaggaggagcagcccttttattcactcttgagctgtaacaaacaagccccgttggaacttcctagtgggaatgatgggagaagtttggggcagggtatccaagaagtcagactgtggtcaagtaggtggtcccttgccctggctacagaacatggaagcccctagggatgcaagtggacttgggcagaggaggtcacaccaccccaccaaggtagacttagattagagatgacttgcatctgttacttcccctttttccatgggtttcatggcccctcatgatatttgccttctgctcctagaaggcacagactactttcaacctgcctcgcccttcactgccacccctcccttctcccttgataatgggagcatgtggatggggtgtctgcgtgtgcaaacgggttccctagcaaagtatttgtgggggtccaatgcaaggaggcagggaagaaagggggcctgcaaaggaagcagtagagtgacttaaacatcttgcgaggcagcctgcctggtttatgggagaactctgaagcccatgatgttttcctggaaggctgttcctacagacggggtttataagtactgatactggacaggatgagaagggagtaggatgtcatcctgtctcaggcctcggataggaagctgcctgccagcaagaggagactgatgtgccccgggtgcaccccacctcctttgaggtccaagatgctcctggggagttgaccgacatttgggaagataataggaggcattggggaaactgctccccaatatattcctcttttcctttcttcaagctgcgtagcagggggcctttagctagtttctcccgagaggggcgggaagtacagctggtggagacagtgctgggagatgatcagaaatctcagggcacagcctcaggtctacctggacactcatccactgttggagatgctcaacagctagacacagatgctcacagccgacctgtggcctcttgctctgaagccatcccccatcttccctagacacagcagacatctgagaaagcttcagcatttctcttgctaacagattcagaaaagtgtctcaaagcagagcacagagttatttggtgtttgctgaagacagcctttgtgccacaatcacttattaaataagcgatcaatttcccattgaactgaacatgcaacatttatcatacattcagttctcattcacactccttaagatttggtcagaatttttatttctgttcatgtcttctacttttctactcctgtatgaataaaatattgatttgattacagtggctttgactataatgtgggagccaatttttgcctcagtcttcatttttatatttaccttgttattctcaggcatttttttcttctatgtgagagttaaaatcattctgtaatttccccccaaaatcatattggtattctagttggcaatgtcttacatttatgttaagtttgagggaattggtagttcaagtataagttaattaaggccattttatttctaagtgaacagacttgaaactccagagctactgaagtaaaagttagaatcatttgcattttcattcagataggagataattttgtaaattttgatgctattattttaactctattagcttaagtaatgtcataatagaaaacacaagcatttgaccaaatgagatccattcagcgactaactggcaaggcactcaaaacatgtcattcattaaatgttgtttttatttacctcaaaaatggtgt

SEQ ID NO: 340591 - DNA, 1808 bp, Homo sapiens
  misc_feature (1582)..(1582): n is a, c, g, or t
  misc_feature (1620)..(1620): n is a, c, g, or t
  misc_feature (1671)..(1671): n is a, c, g, or t
  misc_feature (1747)..(1747): n is a, c, g, or t
aagggcaggtctccagcccagctctctgaaaacattttgctgaaaatataagcaaacatcggccttgtcctccttgtgttcatacactgtggaagcttttctctgcctcctccgtgagagtgcgtggccgggagaccagaaacgtggtcctttctcttgcctgtgagctggtgcagagatggaggaagaagaatatgaacaaattccccaggagaatcccccagaagagctgtcccaggatcctgtgctggagctgtcaggaggtctaagggagaaagaacagaagaccccaaggagactgaggctcattctcatggggaaaacagggagtgggaagagtgcaacaggaaacagcatcctcggcagggacgtcttcgagtctaaactcagcaccagacccgtgaccaagacctcccagagacggagccgagagtgggctgggaaggagcttgaggtgattgacacacccaacattctgtccccccaggtctcgccagaggtggcagacgctatctgccaagccatcgtcttatccgccccagggccccacgccgtgctcctggtgacacaactgggccggttcacggatgaggatcagcaggtggtcaggcgcctgcaggaggtctttggagtgggggttctgggtcacaccatcctggtgttcacccggaaggaagacctggctggcggctccctggaagactatgtgcgagagaccaacaaccaggcccttgcctggctggatgtgacccttgcacggcgccattgcggcttcaacaacagggcacagggggaggagcaggaggcccaactgcgagagctcatggagaaagttgaagccattatgtgggaaaacgaaggagattattacagcaacaaggcttaccaatatacccagcaaaactttcggctgaaagaactacaggaaaggcaagtaagccagggccaaggctctgaggacgtgcctggtgaggagtcttggctggaaggactgtcccagatccagaaggaatctgaggaagcccacagatgcctgctggggaaggctgacctttgagcctgtgctggacttgagccaaggacaccatcagcctttgcacccccctgtgtccagccctctgtttctctttccatcccatggagtgcttcccagtctccaggtcatgacgtctggtgtaggaagaggggcatggggcttgaggacagggtccagcatgcccagatcacattccagttccttcattccttcttccagaacatctgggtcctccctcctctgtgccccaacagcacgctgtcttcctattggaccttctatctcattggcattgcctttcatgagttacttgtctatactctgatagaaccaaagtttcttgagggcaggcctgtatcttttacttctgtgtaacttccacagcttttgactgcattggagtcatgcagtcacgtttggtgcggcaactccatgcaagctgttgaccagatgacttctcatctctccccacaccatgatggtttaaggtgcctgttgtgtctggtggctggagtgcagtggtgcatctcagctcactgcaacctncgcctcctgggttcaggtgattctcctgcctccgcctnctgagtagctgggattaaaggcatgtgccactgtgcttggctaattttttngattcttagtagagatgggatttcaccatgttggccaggctggtcttgaaatcctgatcttaagtgatccacccancctagccttccaaagtgttgggattacaggcgtgagccaccgtcttggccccctgtctctt

SEQ ID NO: 340592 - DNA, 2954 bp, Homo sapiens
aagggcaggtctccagcccagctctctgaaaacattttgctgaaaatataagcaaacatcggccttgtcctccttgtgttcatacactgtggaagcttttctctgcctcctccgtgagagtgcgtggccgggagaccagaaacgtggtcctttctcttgcctgtgagctggtgcagagatggaggaagaagaatatgaacaaattccccaggagaatcccccagaagagctgtcccaggatcctgtgctggagctgtcaggaggtctaagggagaaagaacagaagaccccaaggagactgaggctcattctcatggggaaaacagggagtgggaagagtgcaacaggaaacagcatcctcggcagggacgtcttcgagtctaaactcagcaccagacccgtgaccaagacctcccagagacggagccgagagtgggctgggaaggagcttgaggtgattgacacacccaacattctgtccccccaggtctcgccagaggtggcagacgctatctgccaagccatcgtcttatccgccccagggccccacgccgtgctcctggtgacacaactgggccggttcacggatgaggatcagcaggtggtcaggcgcctgcaggaggtctttggagtgggggttctgggtcacaccatcctggtgttcacccggaaggaagacctggctggcggctccctggaagactatgtgcgagagaccaacaaccaggcccttgcctggctggatgtgacccttgcacggcgccattgcggcttcaacaacagggcacagggggaggagcaggaggcccaactgcgagagctcatggagaaagttgaagccattatgtgggaaaacgaaggagattattacagcaacaaggcttaccaatatacccagcaaaactttcggctgaaagaactacaggaaaggcaagtaagccagggccaaggctctgaggacgtgcctggtgaggagtcttggctggaaggactgtcccagatccagaaggaatctgaggaagcccacagatgcctgctggggaaggctgacctttgagcctgtgctggacttgagccaaggacaccatcagcctttgcacccccctgtgtccagccctctgtttctctttccatcccatggagtgcttcccagtctccaggtcatgacgtctggtgtaggaagaggggcatggggcttgaggacagggtccagcatgcccagatcacattccagttccttcattccttcttccagaacatctgggtcctccctcctctgtgccccaacagcacgctgtcttcctattggaccttctatctcattggcattgcctttcatgagttacttgtctatactctgatagaaccaaagtttcttgagggcaggcctgtatcttttacttctgtgtaacttccacagcttttgactgcattggagtcatgcagtcacgtttggtgcggcaactccatgcaagctgttgaccagatgacttctcatctctccccacaccatgatggtttaaggtgcctgttgtgtctggtggctggaacatggcagtggtgctgagacatggggagggttggagactgggtggggagggttggagactgggctgggaggagagcaagcaggaacagggatggaggcaggaggagcagcccttttattcactcttgagctgtaacaaacaagccccgttggaacttcctagtgggaatgatgggagaagtttggggcagggtatccaagaagtcagactgtggtcaagtaggtggtcccttgccctggctacagaacatggaagcccctagggatgcaagtggacttgggcagaggaggtcacaccaccccaccaaggtagacttagattagagatgacttgcatctgttacttcccctttttccatgggtttcatggcccctcatgatatttgccttctgctcctagaaggcacagactactttcaacctgcctcgcccttcactgccacccctcccttctcccttgataatgggagcatgtggatggggtgtctgcgtgtgcaaacgggttccctagcaaagtatttgtgggggtccaatgcaaggaggcagggaagaaagggggcctgcaaaggaagcagtagagtgacttaaacatcttgcgaggcagcctgcctggtttatgggagaactctgaagcccatgatgttttcctggaaggctgttcctacagacggggtttataagtactgatactggacaggatgagaagggagtaggatgtcatcctgtctcaggcctcggataggaagctgcctgccagcaagaggagactgatgtgccccgggtgcaccccacctcctttgaggtccaagatgctcctggggagttgaccgacatttgggaagataataggaggcattggggaaactgctccccaatatattcctcttttcctttcttcaagctgcgtagcagggggcctttagctagtttctcccgagaggggcgggaagtacagctggtggagacagtgctgggagatgatcagaaatctcagggcacagcctcaggtctacctggacactcatccactgttggagatgctcaacagctagacacagatgctcacagccgacctgtggcctcttgctctgaagccatcccccatcttccctagacacagcagacatctgagaaagcttcagcatttctcttgctaacagattcagaaaagtgtctcaaagcagagcacagagttatttggtgtttgctgaagacagcctttgtgccacaatcacttattaaataagcgatcaatttcccattgaactgaacatgcaacatttatcatacattcagttctcattcacactccttaagatttggtcagaatttttatttctgttcatgtcttctacttttctactcctgtatgaataaaatattgatttgattacagtggctttga

SEQ ID NO: 340593 - DNA, 475 bp, Homo sapiens
atgggagaaatgtgtaagggggtaaacctgttccttcactccccaacttcagtttgggagactgggaagttactgccggtggtcttaagaaacagatattaaaaaccaaccaaaccactccttcaccagcggaggccgagagcacctggcaggcagcctctggccagcactggactggagcatgtgcgcctgccatccttaggttacaagaaaacgctttctggttcctccgtgtgtcttctaccggcctgttagagccagctttgtggaaactcttccccagactagacgcagctttggcaagtgccagtactgaaggggatggcttcaattcagcatggcctgggctgtcttgtgagtgcgtggaagtcgtgcttaggaatgaccgcccctgtagtggctaaagagttcattaaaaaatatctcctgaaaaccggtccaggtgcacttttcagcaggtcattgaggagagttt

SEQ ID NO: 340594 - DNA, 161 bp, Homo sapiens
ccccatagaacaagtcccaacatgctctctcccagtgacatgtccacagagagccacagcttaccgttctaccaggagtccatcagacgctggtcctggctcattcttgcccagccctgtggtatggcaatgcttggaaggctcttttttttttttttttt

SEQ ID NO: 340595 - DNA, 270 bp, Homo sapiens
atctcttaagcaggctcatccttattgatgaatatatcagagggactggtggtgatgaaaactacaataatggtaaccaagttgattcctggattccacctatttccatagtagtacaagggagtctccattcagggcatgatccagcttttcttatgattctgctgtggcagcagaaagctagttctttcttcatttgtctttcttccttcttcccttactctcacatctccccccttgacaatactactcagtatcagtacttcaacc

SEQ ID NO: 340596 - DNA, 442 bp, Homo sapiens
cgtaggacttgaatctccaattttccctagcaatgcacagtgtctgcccatctctgcccagatagtacctgaaattagagtagacttcactagtggaaggaataggatttattccaatttgtgtggaaggagaactcataaggatttaggaagtggcatctattgattgtctgtcttcattcagtttgagattttcctggttcttagtgtgtcaagtgattttcgatggaaacttggacatttttgtattatgttatgtgactctagatcttgtttgaaacctttggttttaactggctttgtctgacacctctatagcaggggaagcagtgggtgccgccttgtcaccccgacatggaggtaaaaatcccatttctccacctgtcctctgttgacatgctgtgtatgtgtgtggggtgtccttgttactgttgggcacagg

SEQ ID NO: 340597 - DNA, 458 bp, Homo sapiens
gtgtggtggcatgtgcctgtaatcccagctactcaggaggctgaggcaggagaattgcctgaactggggaggtggaggttgcagtgagccaagatcaagccactgcactccagcctgggcaacaagagtaaaactccatcccccctgcccaaaaaaaaaaaagtttcccaattaggatgaactacctgcagctcccagaatagcagtgttgtttttaaagacttgtagtggtgtggtcctctccaccaggtatgcctgtttttgcctatctggcaaatatcctctctcacaactgtactcaaaagtcaccttctctgtgaagcctcttctgcagcctcacagcctgcaccctgctcaggaacacccggctctcccattctaggggcacacgtagcagttaacaggcctgtagtggcagccatctcacccctcgtcattgtcccttgacaggcatggct

SEQ ID NO: 340598 - DNA, 270 bp, Homo sapiens
caatactttcttgtctgtctttttgattagtgtctcattgtgatgttaatttgcctagattgagtgacttttggttgtatttggtttagctagtttcacttcatttaatgaatgccctttttagtgttataaaaattaggagctgaaatgaataatacatagtccttccttgcaaggagctcatagttccttcaggaagacagacaacaaaacaatgacagtatagcttgttaagtgctgctgaagggagttgaggacaagatgctctgg

SEQ ID NO: 340599 - DNA, 348 bp, Homo sapiens
gcagaagaaccgcttgaacctgggaggcagaggctgcagtgagccgagatagccccattgcactccagcctgggcgacaagagtgaaactttgtctcaaaaaataataataaaaaaaaaattgaaaagatcaccaaccgttctctcaatctccatttatctaaattctttgaaatcaaacttgttttcctgtcactccccattctgactcttttcccaaattccctgcctccgctaatggtattattagtaattcagttactgagctttaagtctcagaattgttctcaagtatttgctccttattcctttgccaataacacacatactcatacaccatgtataatta

SEQ ID NO: 340600 - DNA, 421 bp, Homo sapiens
atggcagtaaaaaggtatatgtgatcgcataagtgggtagtaattggctacaggtgtctgagggggccttagggaagcaagaggaaggagacctggagaatagctggctaacaaccgtggacaccaaaacaagtcaggtcagtcagttacagaagagatatctatgtgcaagcatgaggtagggtttttagctttctcatgtgtgttctcaaattaagctccaacaccagaaacagcattggtcagcaggtctagaggattttggactaactgaggaggtccttgattgccacacaaactggcactgcctactgccaaggccagaacgctaagaagaaaatgaatgctgcttaaatttaagaatgtccttaaattactactatcttcacctctcctaggcttaccactaatcttttttttt

SEQ ID NO: 340601 - DNA, 348 bp, Homo sapiens
cctcccattgtgaggaaaagatccccaacacatgggcttttgtacccgtccttccttccctgcagttttgatccagcagttctgaggcttggtggggggctgcaatttggacacagaagcactccccatcccaggagtgcttggggacacagcagctatacagagcctgctgcagcgggtggctgggtgctggcgccttctggctggcctccctccatcaacctcgcttccctggggtgcactccctgctgaagggctggcacaactgctccagctccagctgtgtcttctgggaagcctgaattttttttttttttttttttttattgagacggggtctcactctgt

SEQ ID NO: 340602 - DNA, 625 bp, Homo sapiens
gacaggccagcaggacaatgaagtctacgctgcccagctctttttctgggtggaaagccctctttccctcacagaatttccatccatggagagcagtgagcaatgcaaagcattacaaccatttttcttccagctatttctaggcacacaaataacatctaaggactcaaggccagcctgagaaacaattgagccaggaaatactcaagccagtgcagaggtaacagagcctaaaaaagttaaaagcagagggcgatgccttcatggcgagcttcctggcttttcccagacagactgcctgctccaaatgcgaagtttgataaggactgtggggctagtactccaatcacagggactcaattagagtttaggaaaaaatggcctgaagttttcagggataagtgtccaaatttgtttccaagtcaacaaattcattgcacatctactatatcccattttcctgaaatccatcaactctcctagcaataagaaacgctgcattcaggcttttccatttacaaagatctcaggatggatctctgtcacaaaacctggactgccagtatcttcccaaagtcaaatttaagagatcaatcctaaagaaactatttctgtccatctgcca

SEQ ID NO: 340603 - DNA, 321 bp, Homo sapiens
cccaggtatctactaccatggattttatgttttagtcttttgcttttaaaagaaaatagttttgtaattcctaaacaatgtattgtttgtttttgagctttgtaaaaatggtattctatatgtggtaattggcaacttgccaattgaaaaaaaagttcagtatatttttgaagtgtagctgtagttcattcatttgcattcctgtctagttaagattatactacacctaagcttttgattatcctgctgatggattttttgttgttgttgttgttttacgaatagaacgcttctatgggcattctcacacatgtctcctga

SEQ ID NO: 340604 - DNA, 600 bp, Homo sapiens
gattcaacaatgcccagcattgaaactaccttgtttcccagttactcagttccttgtcctgttgctcaaggtgaagtgtccatctttcctgaaattatccactaccccttctttgtttaagtcaccggccttgcctcagacttcactgagaaaacagaagccgtcagaaagttaagtcctatattctacctccaattcaccttgcacttgtgcccccattctttgtcttctgccacactgcgttgtcttgctcccactaaaggcaagtgttcttcctgtgtcttgaattccttaagaatgctgctcccggccaggcatggtggctcacacctataatcccaacattttgggaggcctaggtgcgtggatcacctgaggtcaggagttcgagaccagcctggctaacatggtggacccgtctctactaaaaatacaaaattagctgggtgtggtggtgcatacctgtaattctagctacttgggaggctgaggcaggagaattgcttgaacccaagaggtggaggttgcagtgagctgagattgcgccactgcactccagcctgggcaacaagagcaaaactgtctccaaaaaaaaaaaaa

SEQ ID NO: 340605 - DNA, 504 bp, Homo sapiens
ggaggtctgaaggaaatgtagaaacaatcaaaatagagctaggagggccggttctggaggtggtggaagaacagactgatttgctggtttggctgtggccatcagggagtgacccacagggatgagatcaggccagggaagaggcacagccccccaataaccatcctactccactgaggttggcctctttctggatgcctgttggacaccccctctcagcagcctctgtgcaaagtgctgctgggcactggcctcacaattcctgcttttcaaggcccacatcaggttccgaatgccaagtttataaatgtctggtctcaagagagaaacggacgtggtgacaacataatcacccaagcagttcccttaggttacacctttccttaagggagtcttgggagcttcttcccacccttctcccattcccactcagcagccaaaaccagttgggtaaagtaacctagttctgagaccaccctgccgcatcaccttggataagtcacc

SEQ ID NO: 340606 - DNA, 399 bp, Homo sapiens
cacagcatgggtgaaccatggtaggaccatgcttccctgcggtgtactcctcagcgcctcacacatggagggctttggaaatgtttgtgtggactctactcccagcctcgagggctgaaccgctagtgagttgtgcagatggctcatgaggagatttctccaacatttccttgagggagctgctggacacaggtaaacactcagcaaggagcagaatggggcttcagggggctgctagtccactgagcctgggtgactccaggaggagaggagccagcagagctatgcatgaccatgaccttttttaggattagatgagttttactgggggtctgaagaaactccccaggcctccacaaataagttcatagggggtctaaaggaactccccaaacctcc

SEQ ID NO: 340607 - DNA, 135 bp, Homo sapiens
ctcatgccattcctttcctcctttaaacagaaaaataattagcaggcaaataagtatttcccttttgcttctcctatgagccactaccaggtagacagatggaatattcttttttatttttattttttctccttt

SEQ ID NO: 340608 - DNA, 1279 bp, Homo sapiens
ggccagagttccaatcgaggtgtgagcagggccacactgcctcagagggctccaggggaggctccttcctgcctctctggcttctggtggctccaggtgctccttggcttgtggttgtgcccctgccatccctgcctccacatcgtccctgtgcgtctgtgtccgctcttttttttttttttttgagacagagtcccgctctgttgcccaggctggagtacagtggcgcgatctcggctcactgcaacctctgcctcctgggtttgagcgatcctcctgcctcagcgtccctagtagctgggactacaggcgtgcaccaccatacctggctaatttttgtatttttagtagagacagggtttcaccaggttgtccaggctagtcttaaactcctgacctcaggtgatccacccacctcggcctcccaaagtgctaggattacaggcgtcagccactgcctccggcctgtgtccacgcttcttgtagggacaccagtcattggctttagggcccaccctcctctgagatggcctcatctcaggagcctcaattccatctgcaaaggctctattccaaataagatcctgtccacagggtctgcgtggacatgggctttggggggggaccctgttctacccacactgcccttgtccttggaaagccacctctggccgtgtttttggtgtccatgcgttgaccctcgctgcttctctccaggacttctgggtccatctcatcttggcacactgggccatgccccacctcccaggagagggtctgcaggtttcagaccagactgtgacctcccttgggttcctgcctccaccccaggtacctccatctctccccattttcacacaggcagacagagccaggggcaaacccgggacctgcccagccagcagcctgagtggctctgggaggagcagagccattgatggggacgtcttgaggcctcttctctgagggcctctgcacacagcaggcagtggtcatttggggctggggccggcccgccggctggaacctcacccacagcctgcgtccccctagggtggcctgtgcagggtgcttgctgtgacagtgagcgtgttctggatctaccccggccagtgcgacagctgccagcgcgtggcgggtgcgactgaggaatggcgtttttcaacctactgaatcgtaatgaatttaagttgaatagccccgtgcggctagtggcccctgtattagaagccctagaacagggtcccagggcatggcctgcatgccagggggaggcagg

SEQ ID NO: 340609 - DNA, 2106 bp, Homo sapiens
cagtttgcaaagggacagaattcgtctcacttattcactgcttattgtgtgcctctcgtgttttttcttcttgtgggtcggtgtatttgatgctggttagtagagacaaagaagaaggacaaacaggataaaggtggatctttggtgtggaccctctgcactgcgaaagaagccacatcaccgccaatgtggaaaatatgcaaagtgccgttaggaagaaggaaggatatgtgtgcagcatatgaagtgccttgaatacgattaacttcccttcatgagtagtaaatagtagataactctgatcaaaaaagggattcatgtgatttatcaagctgagcaactgcgcgtctgcagagaagctggaggtcaatcttgaaatctagggcaagaggagcactaggcaattgccaggactaagaagttaatcatacccttggactgcttccatctgtctcagagtgacagcgctgctctcagcgagcaggcatgctttatagcagcagatcaggaattaatattttctgtgaaacctcaagcatcatttgcagtaacttgggttttataaaaatggaacataattttatatgaataaatcacgttcagctagaaatacgagaggctgcaaaaaattatgcttgacttaaaaaaaaagagagaggaacgagcaaaaaagccaacatgaaaacagttgttgaagcgatggcacttggagggcacagatagccatgtggttaaattgtgcatataatcatctgaaatgtcagcctgcgactccagcaacggctacatttttatagccttggagatgcatcaccagactgtaacctgtctgcccatctggcagtatctcaggcccaagatccatttatattgaaatccaaacaactgccattgatttattcatttatttcacaaatatttactgaacgcatccagcatgctctgtggggtgctgtgctggggctgggggtgccaggatgagaaacagccgtgtggctgtgctcttggcttcaccagccagacgagtgttgcctttgcaaggagaaaggactcacaaggcttacacatttgctgccctcagttttgccctttctcaaataaatctcacacatccaatctccttgttgcccattagggagtatataatgaaattaagtaaatgaggaattgcctaaaactaagggagtttcacctccatgtaggtagaagaatgtgaaatggtctgtgtccagaagccagatcagaaatggtccatagcaaggtggggagggcagcgggtacccacctggcagtgtagggggttggattcagcttcatcttcctgaccccttgtcaagtggacgagctccagccaaacaaaggaagtgtgttggagtggccaccagcacagaagtgtacctttctgggtaatgtgtcacccagtcccctggccatgtgagaggacaggcacagttgccacacagtactaatagttggtctcttctttaagggtcaaaaaaaaggaggtggagcacttttaagaaagtgttaaggttccatgaagatgttatggtggcgtgctggcaggtgcatatcaaccctgccctgaggccctcagcagccttcggtctccccaaagcaatatggctccttataaagaagtcttttagggctgggctcggtagctcatgcctgtaatcccagcactttgggaggccaaggcgggcggatcacaaggtcaggagttcaagaccagcatgatcaatatggtgaaatcccatctttactaaaaattcaaaaattagctgggcgtggtggcgtgcacctgtaatcccagctactcaggaggctgaggcaggagaatcgcttgaacccaggaggcgggggttgcagtgagccgagatcacaccattgcactccagcctggatgacagagcgagactctgtctcaaaaaaaaaaaaaaaaaaaaaatcttttaagtatgccatatgaataaaaaacttttaaaaaatccattacctcaagcatttatcccttgtgttatactcttttagttatttttaaatgtacaattaagttgtgaataaaaactttgagagctttagagtttagaatcactatcacat

SEQ ID NO: 340610 - DNA, 580 bp, Homo sapiens
  misc_feature (443)..(443): n is a, c, g, or t
  misc_feature (446)..(446): n is a, c, g, or t
  misc_feature (448)..(448): n is a, c, g, or t
aatgggaatcgcccacagctcagaaggcagacattgacactgactgttagcacacagctcaaacacaaaacaccaaggttaaaaaaaaaaaatcaatcctttatggcgcaggaatgtgtgcatgagcgcaggtggaggtatctagacacgtcacaccctatgtctaatttttcccttttgggatcaacagttcttttcttgaatcagatatgcactccatttagcatatttatacagaaatcacagcattaggggttcagctttgcaaacatctctctcactttgctaaattaatgacatagttctcacatacagaatgtttctagatgggccatcaccaccgagctgttcccccccgtgtcccccatggtacatgacagtgcaatagcacgctgtccttcagaggacagaaaattaatcaggaaacatttactgggcaaccngcntnactgtgccagggacaggctctggagataaaaagatgagtccaaataaagctttgaatctaaggaaaggaaaaagaaatccaggtagtatttcaatcaaatcatttctcttaaccctttcaaactctctgagg

SEQ ID NO: 340611 - DNA, 394 bp, Homo sapiens
taagcccaaaaaactcaggtcatttcttgcctgtactgttgcaatagcctcataataactagtcttctcctttatcaaccacagtcgtctccgctacacaaagaagagagggtgctaatctaaagtgtaaattattttaaatcagcacccttcttgtaatttcccagtggtttttcctgtcataagaataacatgcaaaattccttgcttgcaaagccaggtatgaccttgccccgtctaccttactggcatcgtctctcatgactcttcccctttttcactctccatcttgccttttcccaaccatgcctgctagtgagccttagcccttgtgttttctctgccagggatgcatgactggcttctttactttattctgatctctctgctcaaa

SEQ ID NO: 340612 - DNA, 411 bp, Homo sapiens
tcattaatcaatgggttcttttaagtaaaaaaacctataatctagattaaatccacagaccatctacattaggaagactaaataacagtgtaattttgaagtcagggggagcctgggattgaactatcccagctacgtgggaggctgaggcaggagaatcacttgaacccgggaggcggacgttgcggtgagccgagatcacgccactgcactccagcctgggcaacaagagcaaaactccgtttccaaaaaaaagactcttccatttctgaccatgaaagagtagctggtatcaaacttgccctcctgccaaagcaaccagaaaactggaaaaaatatatgaaacaactgttttccaacatcgtacacaggcattacagggtaatccctgagagaagggaaacagattag

SEQ ID NO: 340613 - DNA, 439 bp, Homo sapiens
tgtgtccccacccagatctcatcttaaatccccacgtgttgtgggaaggacccagtgggaggtaaatgaatcatggggacaagtctttcccatgctgttcttgtgacagtgaatacgtctcatgagatctgatggttttaaaaagaggaattcccatacacaagctttctctctttgcctgctgccatccatgaaagatgtgacttgctcctccttgccttccatcatgattgtgaggcttccccagccacatggaactgtaagtccagttaaacctctttcttttgtaaattgtaagtttggggtatagctttatcagcatgtgaaaatggactaatatagtaaattggtaccaatagagtgaggtgttgctgaaaagataactgaaaatgtggaagcaactttggaactgggtaacagcagaggttggaacagtttg

SEQ ID NO: 340614 - DNA, 133 bp, Homo sapiens
attcggggttgctttctcttaatttctatagccatttcacaaggcctgtaatgacaggccagctaaagtgcatggaaggcatcatgaataaatcctttcaggaattccattaagggaagactggattccaacc

SEQ ID NO: 340615 - DNA, 376 bp, Homo sapiens
ctactaaatttgggggtaatgtcattcagcaatagataactaatacaaagatgtataagttaatactcaagaatataagcttcttgaaaatagtcgctatgtatttatctttgtatctctgacagcaccatgtccatggtaaagttactcaaatgtttgctcaactgaactgcagttgagtggtaatttttcaagtcatggcttagacactccgtaagcaagggcaaaataatctctgcctgtttcctcacttttacaaactgaattaataatggtgtctacctcgtgggattattgtgaggctcaaatgaaataatacatgtaacattcttagaacaatgccaagcacattaaaaggtgttaaagaaatgttaac

SEQ ID NO: 340616 - DNA, 434 bp, Homo sapiens
tttagacagggtcttgctctgtcacccaggctagagtgcagtggcatgatcttggctcactgcaacctctgcctccagggctcaagcaattctcttgcctcagcttggattagaggtgtgtgccatcacgtctggctaatttttgtatttttagtagagaccgggatcttgccatgttggccaggctggtctcaaactcctgacctcaagtgatccactcgcctcagtctcccaaagcgctgggattacaggcatgagctaccgtggctggctggcttaatggttttttaaatttatttggagggaatgatcgttggttttgggtacatgacagtgatagctatggaggagtaccttgaggcttgggggtcaactgttgcccttggggggcccttgctctcttttctgtgttagtcacaaacccttctattcca

SEQ ID NO: 340617 - DNA, 156 bp, Homo sapiens
gctcctgcaagaggaaggcttttggatttggggcagaggcttgaccagggtctggaagagaaagtggccctaaagagcagtcctccttggaggttgcagtgagctgagatcgcgccactgcactccagcctgggcaacagagtgagactccatctc

SEQ ID NO: 340618 - DNA, 466 bp, Homo sapiens
catttcaaaagctatcaaattttgctcaaattaccaatcatcacctgtagttggcaatgactgctttgaagtttcttataagctaggtccaaccaagggacttctatttctcagtagtacactccacctgggaataatgactttaaatttttaagagactgagtcttactctgcgcccaagctggagtgcagcagcacaatcacagcttactgcaaccactgcagccttgaactcctgggctcaagggatcctcatacttcagcctcccaaatagctgggattacaggtacatgccaccacacctggctaatttttaacattctcgtggagatggggtctcactgtgctgcccaggctggtttcaaactcctggcttcaggtgatcctcccacctcagcctcccacagcactgggattacaggtatgagcctctgcacctggcctgatgttttaaaaagtatgaaa

SEQ ID NO: 340619 - DNA, 612 bp, Homo sapiens
aaaaatggttaagatagtcaatgttatgttatatgtattttaatacaatttttaaattggaaaaaatgtcagtaggggagacagtcacagaagtacaaacactgtatgattccactttatatggaacacctggagtagaaacaaagtagaatgatgtttgccaagggctaggaggagaaaggaatgtggaattgttgtttaatgaatactgtgattcattttgggaagctgaaaaagttctggagatggtggtgatagttacacaacaataggaatgtactaagctgaatacttaaagttgctaaaatggtcaattttatgttatgtatattttaaaagctttcttttaaatcaacagggagaaaccagttgatagagggagaaagtgaatatactaaaaagaggagaaaatgattagttacccacaacatgatggtggtggagccaaagcgtagtggaggatgaaccccagcaggcgggagtcagagggaagaaggtgcgagtggtgtagctggaggcagtcagtattagaaggatgagagggcttctattttctctgcaaagtggcatgcaaggccaagtcagaaggaggctgagggggaaagaggtttt

SEQ ID NO: 340620 - DNA, 493 bp, Homo sapiens
acacacacacacacacacaaaatactatatgaatgtggttgccagggaatgtgaggtgggaggaatgtggaattgttgtttaatgaatactgtgattcattttgggaagctgaaaaagttctggagatggtggtgatagttacacaacaataggaatgtactaagctgaatacttaaagttgctaaaatggtcaattttatgttatgtatattttaaaagctttcttttaaatcaacagggagaaaccagttgatagagggagaaagtgaatatactaaaaagaggagaaaatgattagttacccacaacatgatggtggtggagccaaagcgtagtggaggatgaaccccagcaggcgggagtcagagggaagaaggtgcgagtggtgtagctggaggcagtcagtattagaaggatgagagggcttctattttctctgcaaagtggcatgcaaggccaagtcagaaggaggctgagggggaaagaggtttt

SEQ ID NO: 340621 - DNA, 845 bp, Homo sapiens
cagatcctgagcactgaggccttggcataggactgttgccaatgaacccagagacaaatccaatgagacctctcagactctagcagcctgtttcttcctactcacagacctaagttaatagagctggtataggttaggaggccaggctctatacagagtattcatttcaggaccagctgtggctagttaataccatagataatagggacgaaacagagggctagatctggagtaagcctgtaaagcttctaaagtgggatatatcatgcccataaccctggccacaagtccaggacaaggaatggtgttctctggaaataaaagctaaaagtctaagaaataaaagctataggtctactgtgagagctttagccacacagtatggaataattttctgtgaagggtccaagaaagtgacagtggtaggctatgagactgtggtctctgaagaacagttcattcatctgttttggtttaggcatagtttactctaagggtacggagggaaggatgggagaaggatacaatgacgcttcacggggtctttgatctataatttacgacagagctgtccgatgtatgtatgcaaaaccccataacaaatcaatgcattttgtagagaaggttggatttttccaggtgggctagtcctgcctctctcccctggctcaacaatgaggaggatatgaggatatgactaacatgaggttctgcagtgccatgaagtgaggaacaagatcctttttggcagatgggtggcacaatcttttttttttttcactcttttgcccaggctgaagtgcagtggtgtgatcaatcacagctcactgtagccttgatctccc

SEQ ID NO: 340622 - DNA, 361 bp, Homo sapiens
attttgtttgactaatgagatcaaacataggttaggattaagaaacagaacctcacaccgtaactgcagaaagtaaatgtcagaacaattctgatgcaaacaatgttcaagttaaaagaatgatgtacacttactgctcttccaaaaacaaagaaggaaaatccatgccagcctgggaaatttgttctgaacagaatatagcatatttagctattctctaccaatctaacttctcttttctctccacccagactaaccccacctcagagtctctacacctatccaatcccattttactgactctacttattttatttcaaaaccccaagaaaatcatgtgcatgataggatgctctcctta

SEQ ID NO: 340623 - DNA, 613 bp, Homo sapiens
gcaatgtaaatgacatacaaggtgaatccatgggataggagaatagaggggcaaaatgagggaagtaaagtgtgaaaaaataaggtaacggagatgatgaagatttgaggctacgtgactgggagaatgaaaatgcccagagctgagaatagaaatgactggaacatgaaaggatgaagtggtgaatggtctggaagaaatattaaaactttgctctgaacatatataatctgaggcatctgaggagccatgtcaattaggagatgccccttgctcacaatcagaaaaggaatgccggagtcaggcagacattcaggattcaacatggaaattttggagtcaccgtcacataagaacaggtaaggacagttcaagcggtgggatcagtaaggtcaaagggatactacaggatgaaaaaattaaaagcaaggcagatattggagaaatacattaagttagtagagtctagaaaagcctttgagggagagacaactaaaggtgagaaagtaaagaaaacaagcaagggaaagtgttcagggctgtagagagagcgagcagattaaagatgcaggatttaccctgaaactagtgtccaggtatctcatcgccacag

SEQ ID NO: 340624 - DNA, 620 bp, Homo sapiens
  misc_feature (107)..(107): n is a, c, g, or t
  misc_feature (135)..(135): n is a, c, g, or t
  misc_feature (144)..(144): n is a, c, g, or t
  misc_feature (151)..(151): n is a, c, g, or t
  misc_feature (163)..(163): n is a, c, g, or t
  misc_feature (177)..(177): n is a, c, g, or t
  misc_feature (199)..(200): n is a, c, g, or t
ttcattacgcaatttacatcactactcagtgaatccattggatacgaaactaagcggctaaatgagggaaataacagtgtgtcacaattaatgtaccggatatgatnaatattttaggctacgttactgggaaanctctaatgnccacatntgagcatacaanctactgacacatcntcggattacatcgtcactgctnngacccacctgtcgaactttgctctgaacatatataatctgaggcatctgaggagccatgtcaattaggagatgccccttgctcacaatcagaaaaggaatgccggagtcaggcagacattcaggattcaacatggaaattttggagtcaccgtcacataagaacaggtaaggacagttcaagcggtgggatcagtaaggtcaaagggatactacaggatgaaaaaattaaaagcaaggcagatattggagaaatacattaagttagtagagtctagaaaagcctttgagggagagacaactaaaggtgagaaagtaaagaaaacaagcaagggaaagtgttcagggctgtagagagagcgagcagattaaagatgcaggatttaccctgaaactagtgtccaggtatctcatcgccacag

SEQ ID NO: 340625 - DNA, 330 bp, Homo sapiens
ccggtgttcaaatttccctaaccatcctaaaggaatgtttagaacagttgtttcattggaaagaaggtcaaaacaaatacattttacatttttaggccagtcttgaaagtaagtgtaaaaccatgtgtggggtaggaggtgggactagactctcaaggtggggcctggataccagacccagttgaggactagctaagacagattccacagtgaataacaccaggaggtgggaatattaaggtccattgtgaaggatggctaccacaattttttgatcaactagttatcaaccctgactgaagctgagagagatttgtttttgcttttttt

SEQ ID NO: 340626 - DNA, 297 bp, Homo sapiens
gaccaaaaaacagcaacatgtgtgctcctcaggaatgatgcttcccttaagattagcatccagactctagaaatccccactccagaatgacagctgtggcagtggaaccagaggatttgctgtcatcagttggcctctatggagagtgagacgctgtcctggagatagaaatgtggagttggtttccttcctttccttcttggggaaaatcaaaccatttacagttcatttccattgctgtggcttaggaaatgtcagtgtctgaacagatggagaagtgagatggcagcatgtgca

SEQ ID NO: 340627 - DNA, 178 bp, Homo sapiens
tattccccttcactaagatgcttttggaaaaaatgtggaacagttagtctggttatctaaatgtttattctagttagcagctgaaaagagaatgatgaaaacaatcagctgcttctttttcttcctcttgtgtatcctgtctacagtaatgacaccagtaagtcactcggtggtggag

SEQ ID NO: 340628 - DNA, 798 bp, Homo sapiens
caccaccatgcctgcctgatctttgtgttttcagtagagatggggttttaccaagttggtcaagctggtcttgaactcctggcctcaaatgatccacctacctcggcctcccaaagtgctgggattacaggtgtgagccatcatgcccagcctgcattgtcttaaacggattttatgtgtatcttctacatcttgcttagattctgtgcttactatgtaaccacctgattactattataattcagacttccacattcgcctgctcctagaaaagaagtgtcccaacaaagataggctaggctgtttctagaagggcaggtttattgtagtctgcattgcggaaaactgaactaacatgcttatttctgcaacagtcttttaagagtttggctccagtgaaccagactccatttagatgtggtgccacagaggtggtgcctggccccacgaggtcctgtcccagccatcagaaagccttgtgcactgacagcccttctcttcagagtgcagcctgtgtgtgtgttcttgctatatcaggctaatcagcagagtcccttttggcccaagacgatctccagtgtgcagccgttacccacttcacagagctggctggaggggaaagggcctgggagcataaagccaggagcagaggcaggcatgctagcccagtcttgggcccttccactcagctttattcactccaggatcaagattatgttgagaaggagactgcaggatagcctagcagttaggaacatggacttcgtgttagagaaggctgcttttcatcttgatttg

SEQ ID NO: 340629 - DNA, 512 bp, Homo sapiens
gctatttctgctcagatgacattaaattgaaatatagatttatacttgttttcttcgtgacatagataacatcactgatgtaaataaaccctgtcaaagttgggctcgtttatttaatgacaggagaagatgaattcatagttatttaacttgaagaatcttgaagaactacaaatataaaaattagtcttgagcaaagagcactgcagtatctacagtactagtcccatagcattcttattactgctggaacactatttactacctaattacaatatgtaaatttttttctggtaaatattctttttacattctatatataatgtcgactgctctgtgtatagataatagtattctaatgtcattagttaattctatttacatttttagttgccacttttatcttatgttcttagtgagtttgctaataatgtttgctgatggagtttttttcacttctgttttggaaccatttttatagttaatggaatgctggatttttcaaatttcct

SEQ ID NO: 340630 - DNA, 541 bp, Homo sapiens
gcacagtgacgattcgagagattctggaggacgcatgttgggtgttggtggttttccagttggtatcatagtgtcatattctcttcaattgtaggtttagctctttgggacccaaaaagacaagattagtcaggatagtgacatgcacttggcatgctgtggcttctgttgaggaaaaagtgacccaaatttgaacatccaacttcaattcttagtaattggcaatggctccttgcatctctttctgcttgactataaaactataaaatgctgctattaactttgaaggctgccacttacaaggctaggtgaacagacttttatattaacaactcagactaaccctgggaagcatctgtgctccctaacggagaagttgctttcacgtttttcacggtcaacctgggtggccctcaccatcaggagtgtggaatctcaagagtaacagcacaaaggggtggcaacttgaacccctgggttctagtcccaggtcagctgctaactgctgtatgaactcaaggaagtcatccaatgggatcat

SEQ ID NO: 340631 - DNA, 506 bp, Homo sapiens
ttcagatatgacataatgaaaatggcacattacttctctggtctttctctcccaaacctataaccctagactaatcatgagaaaacacataagaaaaatctcaactgggggacattgcacaaaatacctgatcagtaccccccaaaattgtcatcaaaaagaagaaaatttataatcaagagttgcttaatagctaggtatggtggcatacacctatagtcacagctacttgggaggctgaggtgaaaggctcacttgagcccaggaggtcgaggctgcagcgacctgtgatcacaccgctgcacaccagtctgggtgacgggaagacactgtctcaaagacaagagacagagacacagacagaaacagagagagagagagagacagagacagagagagagaggagttgcccatgaagacatgactattaaatataatgtgatgagcagggcacagtggctcatgcctataatcccagcgctttgggaggccaagtggggaggact

SEQ ID NO: 340632 - DNA, 311 bp, Homo sapiens
gctaagaatctcctcccatttgccttcattctgggtcccgggcctaaaaagtcaaagtacactttgtctggcctggcctagtccagccccttttggagcagagattctagcatattgtcttttcaagcttatagttgggcactggggagaggtatgctagagccagcaggggctgcttagagtcacagaaatcccagtggctttttggaggtgttaacagatggaaagttggagggggctctgtgagccagtcacttctccctgtcttaaaagtctactgtgatgctaagagagaaaccaagtgcagagag

SEQ ID NO: 340633 - DNA, 178 bp, Homo sapiens
ttagttactcaaacaacccttgaaatatttcatttacttaaccaaaaacaaatacttgctgatactttacctagcatcctaagatgttcaggatgtctccctcaatggaactcctggtaaatactgtgtattcaagtaatcatgtgccaaagccagggcagagcttctagttctttgc

SEQ ID NO: 340634 - DNA, 329 bp, Homo sapiens
gctggtctcaaactcttgggctcaagcagtccacctgccttggcctcccaaagtgttgggagttacaggtgtgagccaccgtgcctagcctgaaatgagatcttaaggaaataaaaaagtttcattttggatatattttggggatatttaaataaaaaattttatagatttctaacaaaaatattagtattttgaggtgtaagatgtagaggttatttcctactaacacttgccaacattgacacatctgcatgtctaataacacttaatagaggaggccgaacttcataagaggttaaagcttataccattgcatagtagcacagagt

SEQ ID NO: 340635 - DNA, 369 bp, Homo sapiens
ccaggctggagtgcagtggcgtgatctcggctcacttcgacctctgcctcccaggttcaagcgattctcctgcctcagcctccccagttgctgggattacaggtgcccgccaccatgcctggctaatttggatacatatttttaaaacatcctttgtttactctttaaaaattttaaaattaaaaacccttttttttctatttatagctgctttatcattcatttggcttttccatgacaccacccaagtggctggatattacaagagaacttcagattcatgaccaaaaatccgaagtagacactcagcactgcccggcaaagctaccattgaatcttaataagatctttttgcctatcactatttca

SEQ ID NO: 340636 - DNA, 108 bp, Homo sapiens
gattcgaggagatgaagaggtaggaggagatggtgcccagaaaggccacatccaaagcctggaagcggaatccagggaatttggcatgactgagagcctgtgctgcct

SEQ ID NO: 340637 - DNA, 406 bp, Homo sapiens
ataggaatccaacaacaagaaagcaatcatgtgatggtcttggaggacagctttccagagagaatgagcagttaaagcaaaaatcgtaaggcacagtgtgatcaaggaacagaacaagcagagagtggtgtaggagtaaaaacagaggaaaggtcatggggaaatactcatatttcattccaagcaaaatgggaaggtattttgagagttttaagcagatgagtgacatgaattggtttgtgtttaaaaaaaaaatggtgagttccaattctggaaaagatggagtaagcacaatctaccctgtctctcccactgaatgcaactataaatcatagaatgcactgagctgaagatgaagactcaaaaaataaatgttagaaggtgcctatcaaaagacgagaaactg

SEQ ID NO: 340638 - DNA, 707 bp, Homo sapiens
tgatgcctggtagggggtggatgctgcttttcgagcctctgagtcagcttgggggttccccaaggcaatcgaggtagaagctcgctggtgtcctctgcagtgcatgagccaccttttggggcttccacactgcctctaataattgcaggatctcttgctgatactttatgtcttttctcccagcgttcaacagggctttttccttgtagaatgccccacgcagttggagagttaaaaaggcataccaagagtcagtgtaaatgtttacagtcttaccttcacttagctcaaaggccagaattaaagcaatgagtttggtcttgcgggctgaagtgccctggggcaacgatttggcttcaatgacagcatccaggattaccatatcctacacacctctcttcttgtgggtcgacaaagctgctcccgtccacgtacagctcccagtctactgttgtccaaggatggtctcggaggtcgggcctgctagaataaactgactgcaacacctctacacagttatgttcaacttggctctctgataccaggagcaaggtggcggggttcagggtgttgcaaacttcaatggttatgcggggattctcacagagcaagctttggtacctagttagtctagcattcgttagccagttacgtcctttggtgttcattagtgttaccacagcatggggaggcctttatgttttttc

SEQ ID NO: 340639 - DNA, 521 bp, Homo sapiens
  misc_feature (333)..(333): n is a, c, g, or t
ctcaagtgatccacccacctaaacctcccaaagtgctgggattataggtgtgaaccactgcgccaagccagatgtgtctatttcttttaatctgctagttttaccttcatatattttgaagctccgttattagggtcacaaacctttgtgattgttatatcttcctgatgaattgaccatttttttactatgaagtgtcccttgtagacagctcttttattcattctgacaatctctgatatttaattggaatatttagttcgtttacatttaatgtaattcttatgtatggatttggatacaaatctgttcattcagaaacagagctagacngtctcataaaaaggaaaaaaaaaaatagaaagaggcaagaatgaatgactgaatagtgcttaatctttctaatgaatgattagttacaacctttctggaaaggaaggtttgtgaagatgtctgtattttccaaattaatctgtacatttattgcaattccaatcaaaattgcaattatattttttata

SEQ ID NO: 340640 - DNA, 284 bp, Homo sapiens
aaaaaaaaattagtccactgtaattcacttcagcatttagccagcaaattacttgagtgggaagtaaaaaagatacaaagacaccaaatcctgcttactgcctcagaagattttaagtgggagagacaagtgtgtacataaaaaaattgtaaaacagaattgatataagtccagactacggaaggaaaaaatgatgcgaacactcagctatcagccactaattcctttcggggatgacttcacaggagaggtgaagtttgattctatagatagatgtcagttgc

SEQ ID NO: 340641 - DNA, 277 bp, Homo sapiens
ctgctcaagactcagctacgggtttgagaagctgggagattgaaagaaaggagattttccttcttaagatctgtccacgttcctggacttgaatctgccctttcacttttattatgtctaacaattaaagattgatttggggaatctctgaataccagtctatgtgttcactactcagatctaataatactagcattgggatgtggtattaatatggtttattcttttccggaatgtaggaatgaattgtggaaataactttttttggagacagggt

SEQ ID NO: 340642 - DNA, 561 bp, Homo sapiens
tggctatcaagtatttattgaggtctctgtgtgccctgtgcttacgttgaacagcttgcaatggttcagcagacaaaatagaatgcaagtaaaacaatgagtgatgagataggtgctaagttgtgtagtatagactaggtgatataaaagtgcagaggaaagaggaagaaagaagtcctggtattccttctttaaccatacaacaagtatttactgagtgcttactatgtggtaggggaattttctgtgctctttttggggaatcagtagagagcaaaaatagatacacagaccctaaagtttataggggtgggggaagggagtatgacaaatgaatcaaataattacacaaacatataaacttacaaaaccaagaaaagaaagataaattatgtcatgagatcctacctaaggggattcaactacagttgggatggttagagagggcatcctaagctaaggttttctatgggtatggtttagaatggatgtcagccacaagagtgaaggactggagctgaaacaggtaagtacacatgggacaggaagatcactactctg

SEQ ID NO: 340643 - DNA, 383 bp, Homo sapiens
tgctgaatcattcaatcagttaatatttattgagactttatcccaccccagatactgtgacctatgagggaactatgataattactacaacatacctgtgacccccaagatgtttgctgtcaagagccagacagagatgcagacagacacctgaatgtgaagtgagacatgctgtgggcaaaagattgatgagtcacaggggacggtgctcagttaccgaagagatcaagtgagtcttttttattaattaagaaggtgatcgatgtttgaaaagatgtcaatgataattaattagaccctagcaggttaccatggttaaggactctgtgaagtaatttaactgagacaataaatggtggtgtcagtgctcatgtgaatatcat

SEQ ID NO: 340644 - DNA, 197 bp, Homo sapiens
tatattataataaagtgagttaaagaaaatgttattaagaagatcataaggaagataaaatatatttactattcattaactagaagtagatcctcataaagctcttcatccttatcctttacactgaggaggaagaagcgttgatcttgctgttgtaggggtggcagagggggaagaaaatttgcgtgtaaatggac

SEQ ID NO: 340645 - DNA, 430 bp, Homo sapiens
cccatacatacagacacagagatacaccagacacacacacaatcacacacagacacaccccatacatacagagatacaccagacacacacacaatcacacagacacaccccatacatacagacacagaaatacaccacagacacacaatcagacacatcccatacatacagacacagaaatagaccacacacacacaatcacacagacacaccccatatacacagatacaccacagacacacaatcacagacacacccagacacagagatacaccacagacacacaatcacacagacacaccccatacatacagacacagatacaccacagacacacacaatcatacagacacaccccatacatacacagagatacaccacagacacacacacaatcacacacagacacaccccatacagacacagatac

SEQ ID NO: 340646 - DNA, 576 bp, Homo sapiens
  misc_feature (542)..(542): n is a, c, g, or t
  misc_feature (545)..(546): n is a, c, g, or t
gaataagcctgtaaagaatattctaagcagaaggaaaagtaagagaaggatcctgaggcagggaagagcctggagtggtcaagaagcaacaacaaggccagtgtagcaggagtaggatgtagggatgggagaagaattggagagggagccagagaggttagccgggaccagatgatagaaagccttgggagccacaggaaggagtttgtatttcaagtgggagggaaagccgttctgaggttaacaggcaagactgtggataataggtgctagggtgttaatagtggcaatacagatggtgttgatctggcttgggctggtagcagtagaaattgtcagaagtggactgactgggggttgttctgaagtcaaagctggcagacttgctgatgcattaagtggatgtgcaatgtgaaagaatgggaacggaggcatcatggtgaagcccagtcttttggcccaagcaacgaggtgaacagtgggctatttaccgacattggggaaaactggtagaggatcagattttcatgggggcaggggtnganncggccgcgaatttagtagtagtagtagacc

SEQ ID NO: 340647 - DNA, 450 bp, Homo sapiens
caatgcatactttacaaaactgttaaggatgaagtggtaacacagaagtatttatcacagtgccttgaacattgcagatgccctatcaatgtaaatttcattcttgtcccattttgacaataactgtttgtctaggcttcgcacattattaatttttggagggtgtcatctttcttatttgtaaaatgagaaagtgagaacaaagaactcctagaatgcattttttctctaaatttataaattgtgattcaatttttgtttttaaatttaaaaacattctggtgaaagtagagttgtagatattttaatatggtactaaaacatcaactaatttttactaataatgactgtgtttgggtgtctgataaacagagatgaagcaacaaatgaaacaataaaatacaattataaatgaatatatatatatgtgagacattaataatacatttt

SEQ ID NO: 340648 - DNA, 242 bp, Homo sapiens
tatcatacagctatcaatcatgtcaaaagcttcacagaacattcaagataaaagcatttaattctaggaaaaccaaaaattattagtttaatctaggggctggaaatttaacttattttttattcccttgttccccacaacagtgatcaaatgttttgaaaataaaaatcaacttaacaatggccaagcagacctaattatcttcctctgtttcagtatacttttttttttttttttttttt

SEQ ID NO: 340649 - DNA, 466 bp, Homo sapiens
aatttatacctctaatctagacctagtctctgaattccagacatatattctgctgcctgattgacatctccatgtcaatatttaataggtgtctaaaagttgtcatgtccaaaatggagctcttgatgtttcccaaaatagtaaatcctacagttttcctcatcccagttaatggaaaatcatcatttctctcatacgctgcttccagtctgtcatcaaatccacctcaagtatattcaaaatttgaccacttctcaccagcaccactgtcattatcctgattcaagcctccatcatctctcatcgttactgtgacctcctgatcattctccttgcttcagccctggcccctgcaggcagcattcagtattagcagtagagttgtttctataaaaatgtagtcagctgggtgtggtgtctcacgctgtaatcccagcactttgggaggccaaggtgggaggatcac

SEQ ID NO: 340650 - DNA, 405 bp, Homo sapiens
ttattttgggtggtggaaaaggtgaaaataagacaactgcagacaggactttttaaggaaattgaagttttccataaagcattaaaagctatagaaatataaggtcatatttattcagtcaccattttaagcacctataatatactctgagtagcaccaagtcctggggatacccaagtgcatatactgtcatcacgtggcatccatgaagaattggttccaggatcccctgccaataccaaaatctgcagatgctcaagtcctttatataaaatgtctagtatttgcatgtaacctatgcacatcctcctgtatactttaaatcatctctagattacatatgatatctaataaaatgtaaatactatgtgaataattgttatattttattgtttagggaattac

SEQ ID NO: 340651 - DNA, 232 bp, Homo sapiens
ccgagctgtctcatctgtgttttaccgttctgctctttccggctgcttgtagttagaagagaagtgatttcctggaaatgcatggggctagaaagggagctgaaacataaattagcggtgtttatccaagatgacgatgctcctgctttgtcaggtttgcttcctgtccctgccagttattagctaggaaacgtggggaaaattgcttagcttttccaaactccatctttaa

SEQ ID NO: 340652 - DNA, 377 bp, Homo sapiens
tcatcctgcatttgtgtgtcctgctgcctctgtctgggctgccttggacagtccccctttttgcctggtgacttcctttccagctcttaaggcctgttccagtgctccccgcaactcagtgtgttctccggccaagcccagcttacctggacttcagcaacactttcctgcctcttgcagttgccccagcttcctgggctgaccttccagagcacttgttaccccatcctccactgaaacaatgcccagacttgtctctccggcctgaatgagtatcatgacctctcctcattcatccctggcaccctggcacctggcacagaatgtggcaccactaggggcttaggagatgggaactgaatgaagaaatgtagaca

SEQ ID NO: 340653 - DNA, 629 bp, Homo sapiens
gcatgggccactgcactcagccaacacctatccttgaggaatagaaagatccaggctccacaccacacaccatcactgactcaagtggctgttctgattcccagctgagcctgaggggttcggggaggtaatctctgaggtcctcactgctgggccgtgcctgggcatggcctcttcctgcaattttccaactaaactctccgggggggctcagcgccatggggtggttcgaagaaccatgatgaaggctggttcgaattgtgatgaccatttttgtccacatctcctaggacccataagccagagtttctctggagcttatagctagaaggggttctgggtcctggagtgcaggcctgtcaactttacaggagagcactagattgctttctgaagtggctgaaccaggttatgcttccatcagctgtgtatgagcatccccatcttcttgaccacacttgaagccatcagtttccttgaagcatatgggttgcacacttcattttgcatgtatcaaatttatataataaaaaatgtaaggaagccatggaaataaaaacataggtgtgccttctgtaggctgctacgctcctgtgcacgagggcgtctagaactttgccctccatgca

SEQ ID NO: 340654 - DNA, 370 bp, Homo sapiens
cctaaccacgcctctatgagtagcgccttcattaaaatctttagcactttcggacccatagatacagaagggaccaccttcctatagcaggacactgatcctcttctaccccaggacaggaccaggaagtattatgttaggattgctctgaaatctcaagtccttggagttggaacttttagaggccttctcccctctcctggactcaccaacccaggcactgtgtctattgcaagctcctctaggctgaaattacctggagaagcatcacagcaggtactctctgttccaggaaacagaaggtagcccagattgtttgagaactgctgacatccacagatcctcacagttaggttaaaaattgttgaaa

SEQ ID NO: 340655 - DNA, 391 bp, Homo sapiens
gccagaaagaagtttctcagtaggagactagaagccattattaagctgcatttagtgacctcacatttcagcccacggttgttaaggaagaacaaggggagctgcttcttgatctgcaaagggtctctcccacccatccctgctgctttcaccccctccctcattccttatgggatgtccagttgttctttgtgtataaacagaaggcaggggttggggcagcatatgactcttcctcctatgttctggaggagggtcttagggtcagaaggtggcctggaagtgtatatctaagtcagatggtctgtagagaagcagagtgagttcatatgctcctctgggacaaaataagcagaccacacattgcacctgcaagtatagtcatcagcaa

SEQ ID NO: 340656 - DNA, 1281 bp, Homo sapiens
atcattgtggtaaggattaagagattggttggtgtgcggaaacattgtgagcagcttggatgaaaagatgacctggccgcacgtggtggctcatgcctgtaatcccagaactttgtgaggctgaagcgggtggatcacaaggtcaggagttcaagaccagcctggccaagatggtgaaaccccgtctctactaaaaatacaaaaattagccaggtgtggaggcgggcgcctataatcccagctactcagtaggctgaggcagagaattgcttgagcctgggaggcggaggttgcagtgaactgagattgcaccactgcactccagtctgggcaacagagcgagactccgtctcaaaaaataataataataaataaataaaagaatgacctgactgtggactggaagggtctggaattgctaaagatgagcccctgaggtattgctgccatgagttccagattcgtgtcagtttttttggcacccacagcaggaactggggacctttgtgattcctggtttgtcatttttcctggtgactacagagtggagagtcttacgtcttcagcaagacttggatgttgtattggacagctgtgcctcgtatgtagttaaggagacagcacagttcaccgcacaaagagagtgtctccatccttgggtttataagcttcacacttcagtttttctttcctatgcctcttctgcatacaaagcagtggacttccattaaactttgtgaggtgacattttcctaggtccaaggagggagcctagtctagtggcagtagcccggggctcagctctctcaacagaaatccattcccagcttgtctctgacctcaatagggaaattccaagggatttgtccatttttttttccacattctctcttaccagatctccccagagaagcccattgtcaggcttgggctgggaatccagtgagtcactacgcagaggttttgctgacttactggctgagggcaggatgatacattgagaagagattgcttacaggaatgaatacaacactttgtgaggaaagaggggcgctaactaccattacaggcagaattagatccatttgcatctgccccctgcatggcctctccaacggggccatgaatatgctggaggtgtttgtgtctagcctggaggagtttcagccagacctggtggtcctttctggattgcacatgatggagggacaaagcaaggagctccagaggaagagactcttggaggtaatggcactgttacagaatttcacagatctcagc

SEQ ID NO: 340657 - DNA, 307 bp, Homo sapiens
aggtggacgttattgttatcctcattttgcagatgaggaatgcgaggctcagagaggaaacataacttgtccaaagtcacccacaagtatttagcagagcctaaatttgaagagtcagtttgacttgaaaacaaattgtatcacacatataaatggattcaccttttataagactgtaagttctttgcaggcagaaatgggtctcatgggttgtttttcacttttgcacaaagctgtaagctttattgctatatattaagcaaacatgtattgtctaagtaattcagatgcattctgtcacactatt

SEQ ID NO: 340658 - DNA, 338 bp, Homo sapiens
tgttaagagcaatgacttgggaagaaagggcttagcttgaaggtgggacgtcgcaattgggttttgtcacccattaaaataaagtgagctactgagaccaatgaccgctaacattctataaatctatgatcacacaatgatatacagtagtcccccattatccttgagggatacatttcaagactcccagcagaagcctgaaatcatggatagtactgaactctatatatactgtgttcttcctatacaaacagatttccaaatttataaatccgacacagtaaaagattaacaacaataattaacagaacaattttaacactatgtcagcatcacta

SEQ ID NO: 340659 - DNA, 157 bp, Homo sapiens
caaatcaaactcagagtaatagaaaagaaatatttaacacaaactaataattaaaacacaaatttcacctattgttcaggatatctttttgagaaaggtttttgttaaagaaaatttcagatacaaacataaagaaaattaaacaatcaatccccat

SEQ ID NO: 340660 - DNA, 566 bp, Homo sapiens
  misc_feature (560)..(563): n is a, c, g, or t
tgtggtgtcgcacacctgtggtcccagctactcgggaggctgaggcaggagaatcacttgaacccgggaggcggaggttgcagtgagctgagattgcaccactgcactccagcctaggtgaaagagtaagactccgtctctaaaataaaataaaatagaataaacaattcaaaattccttttctcggttgcaccagccacgtctcaaacactgaacagccacgtgtggccactggctactgtattgaacagcagatgcgtaggcattcccagcactgtggagcgctttatagcccacatgtacccgttcttagatcttggcctcccaaagtgctgagagtacaggcgtgagccactgcatccagctcttagcatgtgcttttaaagtaaaaaccacgaggagaaggtactcattacttcataacttgtgtctcacccaccttgctgtcttcacatccccactttctgtatgcacattggaaggtgaatttgttcagctcacattaatttataggaataattttcattgctctgtgaataaaatgtgctaccactttaaannnnaaa

SEQ ID NO: 340661 - DNA, 986 bp, Homo sapiens
cgttgccggggtaacggcgagcgcgtggggccaagaaagaatacctcctctgaaaaatggcagaagcagttttccatgccccaaagaggaaaagaagagtgtatgagacttacgagtctccattgccaatcccttttggtcaggaccatggtcctctgaaagaattcaagatattccgtgctgaaatgattaacaacaatgtgattgtgaggaatgcggaggacattgagcagctctatgggaaaggttattttggaaaaggtattctttcaagaagccgtccaagcttcacaatttcagatcctaaactggttgctaaatggaaagatatgaagacaaacatgcctatcatcacatcaaagaggtatcagcatagtgttgagtgggcagcagagctgatgcgtagacaggggcaggatgagagtacagtgcgcagaatcctcaaggattacacgaaaccgcttgagcatcctcctgtgaaaaggaatgaagaggctcaagtgcatgacaagcttaactctggaatggtttccaacatggaaggcacagcagggggagagagaccttctgtggtaaacggggactctggaaagtcaggtggtgtgggtgatccccgtgagccattaggctgcctgcaggagggctctggctgccacccaacaacagagagctttgagaaaagcgtgcgagaggatgcctcacctctgccccatgtctgttgctgcaaacaagatgctctcatcctccagcgtggccttcatcatgaagacggcagccagcacatcggcctcctgcatcctggggacagagggcctgaccatgagtacgtgctggtcgaggaagcggagtgtgccatgagcgagagggaggctgccccaaatgaggaattggtgcaaagaaacaggttaatatgcagaagaaatccatataggatctttgagtatttgcaactcagcctagaagaggtatgttttcaacatattatt

SEQ ID NO: 340662 - DNA, 543 bp, Homo sapiens
ggaataaatatggaaacattcataaaaatcttttatttttattgatttaagccagtttgtaacatttgtattttcttagatttttaaaaaaatctaagacatttgaatgaaccatttatattaaaaatatgtgacttttggccaggtgtggtggctcacacctgtaatcccagcactttgggaggccgaggcaggtggatcatgaggtcaggagatcgagaccatcctggctaacactgtgaaacccgtctctactgaaaaaaatacaaaaaattagccgggcgtggcggcgggcgcctgtagtcccagctactcgggaggctgaggcaggagaatggtgtgaacccaggaggcggagcttgcagtgagcggagatgtgccaccgcactccagcctggacgacagagtgagactccgtttcaaaaacaaacaaacaaaatatatgtgtgtgtgtgtgtgtgtgtgtgtgtgtgtgtgtgtgtgtgacctttttgatgatgacttaagagcatttgtatttgaggtgaaaagagatcagtctgt

SEQ ID NO: 340663 - DNA, 392 bp, Homo sapiens
  misc_feature (386)..(389): n is a, c, g, or t
cctccccaactcctggcacccaccattttactttctgtccctatgaatgtgatggctctagggacctcctctgagtggaatcagacagcattttccttttttgactggcttatttcactgagccaagtgcggtggcacacgcttggcctcccaaagtgctgagagtacaggcgtgagccactgcatccagctcttagcatgtgcttttaaagtaaaaaccacgaggagaaggtactcattacttcataacttgtgtctcacccaccttgctgtcttcacatccccactttctgtatgcacattggaaggtgaatttgttcagctcacattaatttataggaataattttcattgctctgtgaataaaatgtgctaccactttaaannnnaaa

SEQ ID NO: 340664 - DNA, 3954 bp, Homo sapiens
  misc_feature (1970)..(1970): n is a, c, g, or t
  misc_feature (2061)..(2061): n is a, c, g, or t
  misc_feature (3584)..(3584): n is a, c, g, or t
  misc_feature (3948)..(3951): n is a, c, g, or t
cgttgccggggtaacggcgagcgcgtggggccaagaaagggcctgggcgaggaaagcgcggccctttccgagtttggtgttttgcagcgaaaggaaatctcgctcttccgaaagtcctccagggcgagagaggaaagggcctaggtactgtgctggggtcgcacagccggccgagacagtgccgggacggggagccaggcttccgagtgcgcccggtcactgactcctccgcgctttcctcgtgcgcctgcagcccttggttcttggaaacgccggcgccttgttcagggctggtggggctggggcgcaaggtgcagctgacaatgcccgagaggagccgcagcctctggtggagttcggtcgggtgtgggggtagtcaaggaaagaagcaaagggaatacctcctctgaaaaatggcagaagcagttttccatgccccaaagaggaaaagaagagtgtatgagacttacgagtctccattgccaatcccttttggtcaggaccatggtcctctgaaagaattcaagatattccgtgctgaaatgattaacaacaatgtgattgtgaggaatgcggaggacattgagcagctctatgggaaaggttattttggaaaaggtattctttcaagaagccgtccaagcttcacaatttcagatcctaaactggttgctaaatggaaagatatgaagacaaacatgcctatcatcacatcaaagaggtatcagcatagtgttgagtgggcagcagagctgatgcgtagacaggggcaggatgagagtacagtgcgcagaatcctcaaggattacacgaaaccgcttgagcatcctcctgtgaaaaggaatgaagaggctcaagtgcatgacaagcttaactctggaatggtttccaacatggaaggcacagcagggggagagagaccttctgtggtaaacggggactctggaaagtcaggtggtgtgggtgatccccgtgagccattaggctgcctgcaggagggctctggctgccacccaacaacagagagctttgagaaaagcgtgcgagaggatgcctcacctctgccccatgtctgttgctgcaaacaagatgctctcatcctccagcgtggccttcatcatgaagacggcagccagcacatcggcctcctgcatcctggggacagagggcctgaccatgagtacgtgctggtcgaggaagcggagtgtgccatgagcgagagggaggctgccccaaatgaggaagcctttttcttggtctatgctctgggatgtttaagtatttactatgagaaggagcctttaacgatagtgaagctctggaaagctttcactgtagttcagcccacgttcagaaccacctacatggcctaccattactttcgaagcaagggctgggtgcccaaagtgggactcaagtacgggacagatttactgctatatcggaaaggccctccattttaccatgcaagttattctgtcattatcgagctagttgatgaccattttgaaggctctctccgcaggcctctcagttggaagtccctggctgccttgagcagagtttccgttaatgtctctaaggtaacacaacatcagctttgccattggagtgtcacttaaatggttcagtttttttttttttcttaaatgtagtagaatcaaaaaagttagttgtagaaacttcataacattcctgccagtgacatgctggaagatttggggtcattcgtacccttcccttattgcgctagaagttgtcctcccctcatgttacattttattgtcccctccctcccaactgctgctgagctccaatgacggagctttggagtgtcccatggtgatctgatctgggtaggcattgcttctcttcccaggggtatcgttgctatgtgacttgttttatactgcaatttaacattcactcatacacatattcacaaaggagtcaaaacattgaaagtttgnagatctcttagagaggaagggacttgatatttgttgctaagcactttcccaccctgttgttatcctcatcctgaggatgagaaaccaaggntggagccgttgagtggctaatccaagatcacacagctcatgtgcatactcgggatccaaacccacagctctctggctccctggcttttgtttcactatatccttcgtgttgccatcagagataggagggactcagcttacacaaggactatcaagaaagaaagctgtgtgtgttctcattactcagtgatttgctggctgaaaacaaattgtagataccctctaatttcatcctcatgctgctggaggtgaggtggggctgaggccagagggtcttgcagggctagagatgactgccctttagagcaggttaggttgcctaggctttagcttggtcctatagaaaattagggagcctatactgtttctagaatttttatgcccattttaggggacttgtagcatatacttaatatgtcctcacttaacattgttgatatgttcttggaaactgcaactttaatgtcgtataacaaaaccgttttttcttctcatcatttcaagaaaacaatgttgaagtttatttgaagacctgctgtacatctgtattagtccattctcatgctgctataaagaaatacttgagactgggtaatttataatgaaaagaggtttaattgactcacagttccatgtggctggggaggcctcaggaaacttacaatcatagtggaaggcacctcttcagagggtggcaggagcaagaatgagaggatgagtgaaggaggaagccccttataaaaccatcacatctcatgagaactcactgtcacaagaacagcatggggaccgtcccccataatctaatcacctcccacgaggtccctccatgacacgtggggattgtgggaactacaagatgagatttgggtgggggcacagccaaaccgtatcaacatcatttcacttaaagtccgtgtccaagaacctatcaaggacatttgaggacttactatatttagtattcttaatgctgtgtttataatcaatgtatctgcttatatctgttgccatgttcagtgattactaaacggcaggtacttagtcagaacgtaaatcccagttatggtttccccaggaggaaactgatgtgctctgtgagtttccacttggagtgcacagtgagagggactggagaccacctgcatttcctgctgatgcacccaaatttgtactattattttgtaggatacagaagtggtttttcatttctcaataggaacttatgctgtgctatttgattaaaccctctactatgactgacaaggaaatggagtcaccagaatgtatgaaaaggattaaagttcaggaggtgattctgagtcgatgggtttcttcacgagagaggagtgaccaagacgatctttaacaattcaacctcaaatttctaatttcaccaacaactatttattgagggctagtctcgctctgtcgtccaggctggagtccaatgctgcgatcttggatcactgcaacctctgcctgctgggtttaagcgattctcatgcctcagcctcctgagtngctgggattacaggcacgcaccaccacacacggctaatttttgtatttttagtagagacggggtttcactatgttggccaggctggtctggaactcctgacctcaagtgatctgcccgccttggcctcccaaagtgctgagagtacaggcgtgagccactgcatccagctcttagcatgtgcttttaaagtaaaaaccacgaggagaaggtactcattacttcataacttgtgtctcacccaccttgctgtcttcacatccccactttctgtatgcacattggaaggtgaatttgttcagctcacattaatttataggaataattttcattgctctgtgaataaaatgtgctaccactttaaannnnaaa

SEQ ID NO: 340665 - DNA, 2395 bp, Homo sapiens
cgttgccggggtaacggcgagcgcgtggggccaagaaagaatacctcctctgaaaaatggcagaagcagttttccatgccccaaagaggaaaagaagagtgtatgagacttacgagtctccattgccaatcccttttggtcaggaccatggtcctctgaaagaattcaagatattccgtgctgaaatgattaacaacaatgtgattgtgaggaatgcggaggacattgagcagctctatgggaaaggttattttggaaaaggtattctttcaagaagccgtccaagcttcacaatttcagatcctaaactggttgctaaatggaaagatatgaagacaaacatgcctatcatcacatcaaagaggtatcagcatagtgttgagtgggcagcagagctgatgcgtagacaggggcaggatgagagtacagtgcgcagaatcctcaaggattacacgaaaccgcttgagcatcctcctgtgaaaaggaatgaagaggctcaagtgcatgacaagcttaactctggaatggtttccaacatggaaggcacagcagggggagagagaccttctgtggtaaacggggactctggaaagtcaggtggtgtgggtgatccccgtgagccattaggctgcctgcaggagggctctggctgccacccaacaacagagagctttgagaaaagcgtgcgagaggatgcctcacctctgccccatgtctgttgctgcaaacaagatgctctcatcctccagcgtggccttcatcatgaagacggcagccagcacatcggcctcctgcatcctggggacagagggcctgaccatgagtacgtgctggtcgaggaagcggagtgtgccatgagcgagagggaggctgccccaaatgaggaattggtgcaaagaaacaggttaatatgcagaagaaatccatataggatctttgagtatttgcaactcagcctagaagaggcctttttcttggtctatgctctgggatgtttaagtatttactatgagaaggagcctttaacgatagtgaagctctggaaagctttcactgtagttcagcccacgttcagaaccacctacatggcctaccattactttcgaagcaagggctgggtgcccaaagtgggactcaagtacgggacagatttactgctatatcggaaaggccctccattttaccatgcaagttattctgtcattatcgagctagttgatgaccattttgaaggctctctccgcaggcctctcagttggaagtccctggctgccttgagcagagtttccgttaatgtctctaaggaacttatgctgtgctatttgattaaaccctctactatgactgacaaggaaatggagtcaccagaatgtatgaaaaggattaaagttcaggaggtgattctgagtcgatgggtttcttcacgagagaggagtgaccaagacgatctttaacaattcaacctcaaatttctaatttcaccaacaactatttattgagggctaggtaaaaagttctttttgttgtaatcgtccattaattcataagttttaaagggcatggtgctcccagcaccagaaaactatcagtgtttttaaagataaattacacaagggaggagaaagatccctgtgctaggactgcagattctatacttgcgttggcctctaactctccaatccagagcctcctgcctctggcgtcagtcttttccctcatccactcactggggagattggactagaggagtcctgagaggacacttccaacaagagacatttattctctgattttacctgaaaatggtagtagtttacatttatacagtacagtttatgaagcactttcatacgcaggcatctcttgttacctacatctaagctgttcccgaaagagtgttacagaacacaacagtattgtacaatattcgataagcatatcttcactgcacttgttataaaaatgagtggtgaaataatgtttggagacataatgaaagcgattaacatttggcaaaatataataaagcctttttgtaattggtgagaaagtcatgaagacttaagttgcctcagggcatctggtggcaagaggagggagatgggtggctgggcatggtggcccatacctgtaatcccagcacttgggaggccttgggaggccaaggcacatggatcgcttgagcccaggagttggagaccagcttgggcaacatggtgaaacctcctctctactaacaaaaattatccaagcattgtagcacatgcctgtaattccagctgctcaggagactaaggtaggaggatcgcttgagcccaggaggaagaggttgcagtgagcggagattgtgccactgcaatccagcctgagcaatagagcaaggtcctgtctcaaa

SEQ ID NO: 340666 - DNA, 2218 bp, Homo sapiens
cgttgccggggtaacggcgagcgcgtggggccaagaaagaatacctcctctgaaaaatggcagaagcagttttccatgccccaaagaggaaaagaagagtgtatgagacttacgagtctccattgccaatcccttttggtcaggaccatggtcctctgaaagaattcaagatattccgtgctgaaatgattaacaacaatgtgattgtgaggaatgcggaggacattgagcagctctatgggaaaggttattttggaaaaggtattctttcaagaagccgtccaagcttcacaatttcagatcctaaactggttgctaaatggaaagatatgaagacaaacatgcctatcatcacatcaaagaggtatcagcatagtgttgagtgggcagcagagctgatgcgtagacaggggcaggatgagagtacagtgcgcagaatcctcaaggattacacgaaaccgcttgagcatcctcctgtgaaaaggaatgaagaggctcaagtgcatgacaagcttaactctggaatggtttccaacatggaaggcacagcagggggagagagaccttctgtgcgtggccttcatcatgaagacggcagccagcacatcggcctcctgcatcctggggacagagggcctgaccatgagtacgtgctggtcgaggaagcggagtgtgccatgagcgagagggaggctgccccaaatgaggaattggtgcaaagaaacaggttaatatgcagaagaaatccatataggatctttgagtatttgcaactcagcctagaagaggcctttttcttggtctatgctctgggatgtttaagtatttactatgagaaggagcctttaacgatagtgaagctctggaaagctttcactgtagttcagcccacgttcagaaccacctacatggcctaccattactttcgaagcaagggctgggtgcccaaagtgggactcaagtacgggacagatttactgctatatcggaaaggccctccattttaccatgcaagttattctgtcattatcgagctagttgatgaccattttgaaggctctctccgcaggcctctcagttggaagtccctggctgccttgagcagagtttccgttaatgtctctaaggaacttatgctgtgctatttgattaaaccctctactatgactgacaaggaaatggagtcaccagaatgtatgaaaaggattaaagttcaggaggtgattctgagtcgatgggtttcttcacgagagaggagtgaccaagacgatctttaacaattcaacctcaaatttctaatttcaccaacaactatttattgagggctaggtaaaaagttctttttgttgtaatcgtccattaattcataagttttaaagggcatggtgctcccagcaccagaaaactatcagtgtttttaaagataaattacacaagggaggagaaagatccctgtgctaggactgcagattctatacttgcgttggcctctaactctccaatccagagcctcctgcctctggcgtcagtcttttccctcatccactcactggggagattggactagaggagtcctgagaggacacttccaacaagagacatttattctctgattttacctgaaaatggtagtagtttacatttatacagtacagtttatgaagcactttcatacgcaggcatctcttgttacctacatctaagctgttcccgaaagagtgttacagaacacaacagtattgtacaatattcgataagcatatcttcactgcacttgttataaaaatgagtggtgaaataatgtttggagacataatgaaagcgattaacatttggcaaaatataataaagcctttttgtaattggtgagaaagtcatgaagacttaagttgcctcagggcatctggtggcaagaggagggagatgggtggctgggcatggtggcccatacctgtaatcccagcacttgggaggccttgggaggccaaggcacatggatcgcttgagcccaggagttggagaccagcttgggcaacatggtgaaacctcctctctactaacaaaaattatccaagcattgtagcacatgcctgtaattccagctgctcaggagactaaggtaggaggatcgcttgagcccaggaggaagaggttgcagtgagcggagattgtgccactgcaatccagcctgagcaatagagcaaggtcctgtctcaaa

SEQ ID NO: 340667 - DNA, 2452 bp, Homo sapiens
cgttgccggggtaacggcgagcgcgtggggccaagaaagaatacctcctctgaaaaatggcagaagcagttttccatgccccaaagaggaaaagaagagtgtatgagacttacgagtctccattgccaatcccttttggtcaggaccatggtcctctgaaagaattcaagatattccgtgctgaaatgattaacaacaatgtgattgtgaggaatgcggaggacattgagcagctctatgggaaaggttattttggaaaaggtattctttcaagaagccgtccaagcttcacaatttcagatcctaaactggttgctaaatggaaagatatgaagacaaacatgcctatcatcacatcaaagaggggccattctaagtatatgtgctgccgcatcgagcactgttcagtcttcttaaccaggtatcagcatagtgttgagtgggcagcagagctgatgcgtagacaggggcaggatgagagtacagtgcgcagaatcctcaaggattacacgaaaccgcttgagcatcctcctgtgaaaaggaatgaagaggctcaagtgcatgacaagcttaactctggaatggtttccaacatggaaggcacagcagggggagagagaccttctgtggtaaacggggactctggaaagtcaggtggtgtgggtgatccccgtgagccattaggctgcctgcaggagggctctggctgccacccaacaacagagagctttgagaaaagcgtgcgagaggatgcctcacctctgccccatgtctgttgctgcaaacaagatgctctcatcctccagcgtggccttcatcatgaagacggcagccagcacatcggcctcctgcatcctggggacagagggcctgaccatgagtacgtgctggtcgaggaagcggagtgtgccatgagcgagagggaggctgccccaaatgaggaattggtgcaaagaaacaggttaatatgcagaagaaatccatataggatctttgagtatttgcaactcagcctagaagaggcctttttcttggtctatgctctgggatgtttaagtatttactatgagaaggagcctttaacgatagtgaagctctggaaagctttcactgtagttcagcccacgttcagaaccacctacatggcctaccattactttcgaagcaagggctgggtgcccaaagtgggactcaagtacgggacagatttactgctatatcggaaaggccctccattttaccatgcaagttattctgtcattatcgagctagttgatgaccattttgaaggctctctccgcaggcctctcagttggaagtccctggctgccttgagcagagtttccgttaatgtctctaaggaacttatgctgtgctatttgattaaaccctctactatgactgacaaggaaatggagtcaccagaatgtatgaaaaggattaaagttcaggaggtgattctgagtcgatgggtttcttcacgagagaggagtgaccaagacgatctttaacaattcaacctcaaatttctaatttcaccaacaactatttattgagggctaggtaaaaagttctttttgttgtaatcgtccattaattcataagttttaaagggcatggtgctcccagcaccagaaaactatcagtgtttttaaagataaattacacaagggaggagaaagatccctgtgctaggactgcagattctatacttgcgttggcctctaactctccaatccagagcctcctgcctctggcgtcagtcttttccctcatccactcactggggagattggactagaggagtcctgagaggacacttccaacaagagacatttattctctgattttacctgaaaatggtagtagtttacatttatacagtacagtttatgaagcactttcatacgcaggcatctcttgttacctacatctaagctgttcccgaaagagtgttacagaacacaacagtattgtacaatattcgataagcatatcttcactgcacttgttataaaaatgagtggtgaaataatgtttggagacataatgaaagcgattaacatttggcaaaatataataaagcctttttgtaattggtgagaaagtcatgaagacttaagttgcctcagggcatctggtggcaagaggagggagatgggtggctgggcatggtggcccatacctgtaatcccagcacttgggaggccttgggaggccaaggcacatggatcgcttgagcccaggagttggagaccagcttgggcaacatggtgaaacctcctctctactaacaaaaattatccaagcattgtagcacatgcctgtaattccagctgctcaggagactaaggtaggaggatcgcttgagcccaggaggaagaggttgcagtgagcggagattgtgccactgcaatccagcctgagcaatagagcaaggtcctgtctcaaa

SEQ ID NO: 340668 - DNA, 2442 bp, Homo sapiens
  misc_feature (2072)..(2072): n is a, c, g, or t
  misc_feature (2436)..(2439): n is a, c, g, or t
cgttgccggggtaacggcgagcgcgtggggccaagaaagggcctgggcgaggaaagcgcggccctttccgagtttggtgttttgcagcgaaaggaaatctcgctcttccgaaagtcctccagggcgagagaggaaagggcctagaatacctcctctgaaaaatggcagaagcagttttccatgccccaaagaggaaaagaagagtgtatgagacttacgagtctccattgccaatcccttttggtcaggaccatggtcctctgaaagaattcaagatattccgtgctgaaatgattaacaacaatgtgattgtgaggaatgcggaggacattgagcagctctatgggaaaggttattttggaaaaggtattctttcaagaagccgtccaagcttcacaatttcagatcctaaactggttgctaaatggaaagatatgaagacaaacatgcctatcatcacatcaaagaggtatcagcatagtgttgagtgggcagcagagctgatgcgtagacaggggcaggatgagagtacagtgcgcagaatcctcaaggattacacgaaaccgcttgagcatcctcctgtgaaaaggaatgaagaggctcaagtgcatgacaagcttaactctggaatggtttccaacatggaaggcacagcagggggagagagaccttctgtggtaaacggggactctggaaagtcaggtggtgtgggtgatccccgtgagccattaggctgcctgcaggagggctctggctgccacccaacaacagagagctttgagaaaagcgtgcgagaggatgcctcacctctgccccatgtctgttgctgcaaacaagatgctctcatcctccagcgtggccttcatcatgaagacggcagccagcacatcggcctcctgcatcctggggacagagggcctgaccatgagtacgtgctggtcgaggaagcggagtgtgccatgagcgagagggaggctgccccaaatgaggaattggtgcaaagaaacaggttaatatgcagaagaaatccatataggatctttgagtatttgcaactcagcctagaagaggcctttttcttggtctatgctctgggatgtttaagtatttactatgagaaggagcctttaacgatagtgaagctctggaaagctttcactgtagttcagcccacgttcagaaccacctacatggcctaccattactttcgaagcaagggctgggtgcccaaagtgggactcaagtacgggacagatttactgctatatcggaaaggccctccattttaccatgcaagttattctgtcattatcgagctagttgatgaccattttgaaggctctctccgcaggcctctcagttggaagtccctggctgccttgagcagagtttccgttaatgtctctaaggaacttatgctgtgctatttgattaaaccctctactatgactgacaaggaaatggagtcaccagaatgtatgaaaaggattaaagttcaggaggtgattctgagtcgatgggtttcttcacgagagaggagtgaccaagacgatctttaacaattcaacctcaaatttctaatttcaccaacaactatttattgagggctagtttctcatcccagtttccccagcctcctgtgaaggtgtcagagaaagaagatagccctctcttcatgtgctttctgaactctgccttttcagtgggcagaggaagtgctttgtagcagcaaacccaacccctgagcctccatgtgtcgggtcaggcaaaatgaaattgacacaggctggaattttactgatttcagtcattgctgggctcgtttgtgcaaatagactcagaagagctcctttaaaaggagtgaccatttcctgatttagattctgagggggtttttggttttttttactgttgttcactatcatgagcttaccatgtgcttttttcttttttttttcttgtgatgtagtctcgctctgtcgtccaggctggagtccaatgctgcgatcttggatcactgcaacctctgcctgctgggtttaagcgattctcatgcctcagcctcctgagtngctgggattacaggcacgcaccaccacacacggctaatttttgtatttttagtagagacggggtttcactatgttggccaggctggtctggaactcctgacctcaagtgatctgcccgccttggcctcccaaagtgctgagagtacaggcgtgagccactgcatccagctcttagcatgtgcttttaaagtaaaaaccacgaggagaaggtactcattacttcataacttgtgtctcacccaccttgctgtcttcacatccccactttctgtatgcacattggaaggtgaatttgttcagctcacattaatttataggaataattttcattgctctgtgaataaaatgtgctaccactttaaannnnaaa

SEQ ID NO: 340669 - DNA, 450 bp, Homo sapiens
tcagtctgtaaaatggtttcacaagaatgtgaaactatttgtaatgagcattttctgcttgctgtattttcaggcctttttcttggtctatgctctgggatgtttaagtatttactatgagaaggtaagatgctttgtttacatacaacccacttaaaatttccctgttgttaaaagcaggttgtactaatttctatattgcattaatacaaatgtttctactcttactgaataaaataggaattgaatttttctctaaagttttggatttgggtcctgaggtgggactgttcgagcaaaaggcatctttgacccttttagattgcatttcattcctcaaaactaggagaagtacagtatcttgtactggataatgattaggaaatctgtgtcagaacagtattaaaaattaacaaaaataaaagttacccgtatttggcacctactatg

SEQ ID NO: 340670 - DNA, 2148 bp, Homo sapiens
cgttgccggggtaacggcgagcgcgtggggccaagaaagggcctgggcgaggaaagcgcggccctttccgagtttggtgttttgcagcgaaaggaaatctcgctcttccgaaagtcctccagggcgagagaggaaagggcctagaatacctcctctgaaaaatggcagaagcagttttccatgccccaaagaggaaaagaagagtgtatgagacttacgagtctccattgccaatcccttttggtcaggaccatggtcctctgaaagaattcaagatattccgtgctgaaatgattaacaacaatgtgattgtgaggaatgcggaggacattgagcagctctatgggaaaggttattttggaaaaggtattctttcaagaagccgtccaagcttcacaatttcagatcctaaactggttgctaaatggaaagatatgaagacaaacatgcctatcatcacatcaaagaggtatcagcatagtgttgagtgggcagcagagctgatgcgtagacaggggcaggatgagagtacagtgcgcagaatcctcaaggattacacgaaaccgcttgagcatcctcctgtgaaaaggaatgaagaggctcaagtgcatgacaagcttaactctggaatggtttccaacatggaaggcacagcagggggagagagaccttctgtggtaaacggggactctggaaagtcaggtggtgtgggtgatccccgtgagccattaggctgcctgcaggagggctctggctgccacccaacaacagagagctttgagaaaagcgtgcgagaggatgcctcacctctgccccatgtctgttgctgcaaacaagatgctctcatcctccagcgtggccttcatcatgaagacggcagccagcacatcggcctcctgcatcctggggacagagggcctgaccatgagtacgtgctggtcgaggaagcggagtgtgccatgagcgagagggaggctgccccaaatgaggaattggtgcaaagaaacaggttaatatgcagaagaaatccatataggatctttgagtatttgcaactcagcctagaagaggcctttttcttggtctatgctctgggatgtttaagtatttactatgagaaggagcctttaacgatagtgaagctctggaaagctttcactgtagttcagcccacgttcagaaccacctacatggcctaccattactttcgaagcaagggctgggtgcccaaagtgggactcaagtacgggacagatttactgctatatcggaaaggccctccattttaccatgcaagttattctgtcattatcgagctagttgatgaccattttgaaggctctctccgcaggcctctcagttggaagtccctggctgccttgagcagagtttccgttaatgtctctaaggaacttatgctgtgctatttgattaaaccctctactatgactgacaaggaaatggagtcaccagaatgtatgaaaaggattaaagttcaggaggtgattctgagtcgatgggtttcttcacgagagaggagtgaccaagacgatctttaacaattcaacctcaaatttctaatttcaccaacaactatttattgagggctaggtaaaaagttctttttgttgtaatcgtccattaattcataagttttaaagggcatggtgctcccagcaccagaaaactatcagtgtttttaaagataaattacacaagggaggagaaagatccctgtgctaggactgcagattctatacttgcgttggcctctaactctccaatccagagcctcctgcctctggcgtcagtcttttccctcatccactcactggggagattggactagaggagtcctgagaggacacttccaacaagagacatttattctctgattttacctgaaaatggtagtagtttacatttatacagtacagtttatgaagcactttcatacgcaggcatctcttgttacctacatctaagctgttcccgaaagagtgttacagaacacaacagtattgtacaatattcgataagcatatcttcactgcacttgttataaaaatgagtggtgaaataatgtttggagacataatgaaagcgattaacatttggcaaaatataataaagcctttttgtaattgg

SEQ ID NO: 340671 - DNA, 2500 bp, Homo sapiens
cgttgccggggtaacggcgagcgcgtggggccaagaaagggcctgggcgaggaaagcgcggccctttccgagtttggtgttttgcagcgaaaggaaatctcgctcttccgaaagtcctccagggcgagagaggaaagggcctagaatacctcctctgaaaaatggcagaagcagttttccatgccccaaagaggaaaagaagagtgtatgagacttacgagtctccattgccaatcccttttggtcaggaccatggtcctctgaaagaattcaagatattccgtgctgaaatgattaacaacaatgtgattgtgaggaatgcggaggacattgagcagctctatgggaaaggttattttggaaaaggtattctttcaagaagccgtccaagcttcacaatttcagatcctaaactggttgctaaatggaaagatatgaagacaaacatgcctatcatcacatcaaagaggtatcagcatagtgttgagtgggcagcagagctgatgcgtagacaggggcaggatgagagtacagtgcgcagaatcctcaaggattacacgaaaccgcttgagcatcctcctgtgaaaaggaatgaagaggctcaagtgcatgacaagcttaactctggaatggtttccaacatggaaggcacagcagggggagagagaccttctgtggtaaacggggactctggaaagtcaggtggtgtgggtgatccccgtgagccattaggctgcctgcaggagggctctggctgccacccaacaacagagagctttgagaaaagcgtgcgagaggatgcctcacctctgccccatgtctgttgctgcaaacaagatgctctcatcctccagcgtggccttcatcatgaagacggcagccagcacatcggcctcctgcatcctggggacagagggcctgaccatgagtacgtgctggtcgaggaagcggagtgtgccatgagcgagagggaggctgccccaaatgaggaattggtgcaaagaaacaggttaatatgcagaagaaatccatataggatctttgagtatttgcaactcagcctagaagaggcctttttcttggtctatgctctgggatgtttaagtatttactatgagaaggagcctttaacgatagtgaagctctggaaagctttcactgtagttcagcccacgttcagaaccacctacatggcctaccattactttcgaagcaagggctgggtgcccaaagtgggactcaagtacgggacagatttactgctatatcggaaaggccctccattttaccatgcaagttattctgtcattatcgagctagttgatgaccattttgaaggctctctccgcaggcctctcagttggaagtccctggctgccttgagcagagtttccgttaatgtctctaaggaacttatgctgtgctatttgattaaaccctctactatgactgacaaggaaatggagtcaccagaatgtatgaaaaggattaaagttcaggaggtgattctgagtcgatgggtttcttcacgagagaggagtgaccaagacgatctttaacaattcaacctcaaatttctaatttcaccaacaactatttattgagggctaggtaaaaagttctttttgttgtaatcgtccattaattcataagttttaaagggcatggtgctcccagcaccagaaaactatcagtgtttttaaagataaattacacaagggaggagaaagatccctgtgctaggactgcagattctatacttgcgttggcctctaactctccaatccagagcctcctgcctctggcgtcagtcttttccctcatccactcactggggagattggactagaggagtcctgagaggacacttccaacaagagacatttattctctgattttacctgaaaatggtagtagtttacatttatacagtacagtttatgaagcactttcatacgcaggcatctcttgttacctacatctaagctgttcccgaaagagtgttacagaacacaacagtattgtacaatattcgataagcatatcttcactgcacttgttataaaaatgagtggtgaaataatgtttggagacataatgaaagcgattaacatttggcaaaatataataaagcctttttgtaattggtgagaaagtcatgaagacttaagttgcctcagggcatctggtggcaagaggagggagatgggtggctgggcatggtggcccatacctgtaatcccagcacttgggaggccttgggaggccaaggcacatggatcgcttgagcccaggagttggagaccagcttgggcaacatggtgaaacctcctctctactaacaaaaattatccaagcattgtagcacatgcctgtaattccagctgctcaggagactaaggtaggaggatcgcttgagcccaggaggaagaggttgcagtgagcggagattgtgccactgcaatccagcctgagcaatagagcaaggtcctgtctcaaa

SEQ ID NO: 340672 - DNA, 2575 bp, Homo sapiens
cgttgccggggtaacggcgagcgcgtggggccaagaaagggcctgggcgaggaaagcgcggccctttccgagtttggtgttttgcagcgaaaggaaatctcgctcttccgaaagtcctccagggcgagagaggaaagggcctaggtactgtgctggggtcgcacagccggccgagacagtgccgggacggggagccaggcttccgagtgcgcccggtcactgactcctccgcgctttcctcgtgcgcctgcagcccttggttcttggaaacgccggcgccttgttcagggctggtggggctggggcgcaaggtgcagctgacaatgcccgagaggagccgcagcctctggtggagttcggtcgggtgtgggggtagtcaaggaaagaagcaaagggaatacctcctctgaaaaatggcagaagcagttttccatgccccaaagaggaaaagaagagtgtatgagacttacgagtctccattgccaatcccttttggtcaggaccatggtcctctgaaagaattcaagatattccgtgctgaaatgattaacaacaatgtgattgtgaggaatgcggaggacattgagcagctctatgggaaaggttattttggaaaaggtattctttcaagaagccgtccaagcttcacaatttcagatcctaaactggttgctaaatggaaagatatgaagacaaacatgcctatcatcacatcaaagaggtatcagcatagtgttgagtgggcagcagagctgatgcgtagacaggggcaggatgagagtacagtgcgcagaatcctcaaggattacacgaaaccgcttgagcatcctcctgtgaaaaggaatgaagaggctcaagtgcatgacaagcttaactctggaatggtttccaacatggaaggcacagcagggggagagagaccttctgtgcgtggccttcatcatgaagacggcagccagcacatcggcctcctgcatcctggggacagagggcctgaccatgagtacgtgctggtcgaggaagcggagtgtgccatgagcgagagggaggctgccccaaatgaggaattggtgcaaagaaacaggttaatatgcagaagaaatccatataggatctttgagtatttgcaactcagcctagaagaggcctttttcttggtctatgctctgggatgtttaagtatttactatgagaaggagcctttaacgatagtgaagctctggaaagctttcactgtagttcagcccacgttcagaaccacctacatggcctaccattactttcgaagcaagggctgggtgcccaaagtgggactcaagtacgggacagatttactgctatatcggaaaggccctccattttaccatgcaagttattctgtcattatcgagctagttgatgaccattttgaaggctctctccgcaggcctctcagttggaagtccctggctgccttgagcagagtttccgttaatgtctctaaggaacttatgctgtgctatttgattaaaccctctactatgactgacaaggaaatggagtcaccagaatgtatgaaaaggattaaagttcaggaggtgattctgagtcgatgggtttcttcacgagagaggagtgaccaagacgatctttaacaattcaacctcaaatttctaatttcaccaacaactatttattgagggctaggtaaaaagttctttttgttgtaatcgtccattaattcataagttttaaagggcatggtgctcccagcaccagaaaactatcagtgtttttaaagataaattacacaagggaggagaaagatccctgtgctaggactgcagattctatacttgcgttggcctctaactctccaatccagagcctcctgcctctggcgtcagtcttttccctcatccactcactggggagattggactagaggagtcctgagaggacacttccaacaagagacatttattctctgattttacctgaaaatggtagtagtttacatttatacagtacagtttatgaagcactttcatacgcaggcatctcttgttacctacatctaagctgttcccgaaagagtgttacagaacacaacagtattgtacaatattcgataagcatatcttcactgcacttgttataaaaatgagtggtgaaataatgtttggagacataatgaaagcgattaacatttggcaaaatataataaagcctttttgtaattggtgagaaagtcatgaagacttaagttgcctcagggcatctggtggcaagaggagggagatgggtggctgggcatggtggcccatacctgtaatcccagcacttgggaggccttgggaggccaaggcacatggatcgcttgagcccaggagttggagaccagcttgggcaacatggtgaaacctcctctctactaacaaaaattatccaagcattgtagcacatgcctgtaattccagctgctcaggagactaaggtaggaggatcgcttgagcccaggaggaagaggttgcagtgagcggagattgtgccactgcaatccagcctgagcaatagagcaaggtcctgtctcaaa

SEQ ID NO: 340673 - DNA, 4138 bp, Homo sapiens
  misc_feature (1796)..(1796): n is a, c, g, or t
  misc_feature (1887)..(1887): n is a, c, g, or t
  misc_feature (3768)..(3768): n is a, c, g, or t
  misc_feature (4132)..(4135): n is a, c, g, or t
cgttgccggggtaacggcgagcgcgtggggccaagaaagggcctgggcgaggaaagcgcggccctttccgagtttggtgttttgcagcgaaaggaaatctcgctcttccgaaagtcctccagggcgagagaggaaagggcctagaatacctcctctgaaaaatggcagaagcagttttccatgccccaaagaggaaaagaagagtgtatgagacttacgagtctccattgccaatcccttttggtcaggaccatggtcctctgaaagaattcaagatattccgtgctgaaatgattaacaacaatgtgattgtgaggaatgcggaggacattgagcagctctatgggaaaggttattttggaaaaggtattctttcaagaagccgtccaagcttcacaatttcagatcctaaactggttgctaaatggaaagatatgaagacaaacatgcctatcatcacatcaaagaggtatcagcatagtgttgagtgggcagcagagctgatgcgtagacaggggcaggatgagagtacagtgcgcagaatcctcaaggattacacgaaaccgcttgagcatcctcctgtgaaaaggaatgaagaggctcaagtgcatgacaagcttaactctggaatggtttccaacatggaaggcacagcagggggagagagaccttctgtggtaaacggggactctggaaagtcaggtggtgtgggtgatccccgtgagccattaggctgcctgcaggagggctctggctgccacccaacaacagagagctttgagaaaagcgtgcgagaggatgcctcacctctgccccatgtctgttgctgcaaacaagatgctctcatcctccagcgtggccttcatcatgaagacggcagccagcacatcggcctcctgcatcctggggacagagggcctgaccatgagtacgtgctggtcgaggaagcggagtgtgccatgagcgagagggaggctgccccaaatgaggaattggtgcaaagaaacaggttaatatgcagaagaaatccatataggatctttgagtatttgcaactcagcctagaagaggcctttttcttggtctatgctctgggatgtttaagtatttactatgagaaggagcctttaacgatagtgaagctctggaaagctttcactgtagttcagcccacgttcagaaccacctacatggcctaccattactttcgaagcaagggctgggtgcccaaagtgggactcaagtacgggacagatttactgctatatcggaaaggccctccattttaccatgcaagttattctgtcattatcgagctagttgatgaccattttgaaggctctctccgcaggcctctcagttggaagtccctggctgccttgagcagagtttccgttaatgtctctaaggtaacacaacatcagctttgccattggagtgtcacttaaatggttcagtttttttttttttcttaaatgtagtagaatcaaaaaagttagttgtagaaacttcataacattcctgccagtgacatgctggaagatttggggtcattcgtacccttcccttattgcgctagaagttgtcctcccctcatgttacattttattgtcccctccctcccaactgctgctgagctccaatgacggagctttggagtgtcccatggtgatctgatctgggtaggcattgcttctcttcccaggggtatcgttgctatgtgacttgttttatactgcaatttaacattcactcatacacatattcacaaaggagtcaaaacattgaaagtttgnagatctcttagagaggaagggacttgatatttgttgctaagcactttcccaccctgttgttatcctcatcctgaggatgagaaaccaaggntggagccgttgagtggctaatccaagatcacacagctcatgtgcatactcgggatccaaacccacagctctctggctccctggcttttgtttcactatatccttcgtgttgccatcagagataggagggactcagcttacacaaggactatcaagaaagaaagctgtgtgtgttctcattactcagtgatttgctggctgaaaacaaattgtagataccctctaatttcatcctcatgctgctggaggtgaggtggggctgaggccagagggtcttgcagggctagagatgactgccctttagagcaggttaggttgcctaggctttagcttggtcctatagaaaattagggagcctatactgtttctagaatttttatgcccattttaggggacttgtagcatatacttaatatgtcctcacttaacattgttgatatgttcttggaaactgcaactttaatgtcgtataacaaaaccgttttttcttctcatcatttcaagaaaacaatgttgaagtttatttgaagacctgctgtacatctgtattagtccattctcatgctgctataaagaaatacttgagactgggtaatttataatgaaaagaggtttaattgactcacagttccatgtggctggggaggcctcaggaaacttacaatcatagtggaaggcacctcttcagagggtggcaggagcaagaatgagaggatgagtgaaggaggaagccccttataaaaccatcacatctcatgagaactcactgtcacaagaacagcatggggaccgtcccccataatctaatcacctcccacgaggtccctccatgacacgtggggattgtgggaactacaagatgagatttgggtgggggcacagccaaaccgtatcaacatcatttcacttaaagtccgtgtccaagaacctatcaaggacatttgaggacttactatatttagtattcttaatgctgtgtttataatcaatgtatctgcttatatctgttgccatgttcagtgattactaaacggcaggtacttagtcagaacgtaaatcccagttatggtttccccaggaggaaactgatgtgctctgtgagtttccacttggagtgcacagtgagagggactggagaccacctgcatttcctgctgatgcacccaaatttgtactattattttgtaggatacagaagtggtttttcatttctcaataggaacttatgctgtgctatttgattaaaccctctactatgactgacaaggaaatggagtcaccagaatgtatgaaaaggattaaagttcaggaggtgattctgagtcgatgggtttcttcacgagagaggagtgaccaagacgatctttaacaattcaacctcaaatttctaatttcaccaacaactatttattgagggctagtttctcatcccagtttccccagcctcctgtgaaggtgtcagagaaagaagatagccctctcttcatgtgctttctgaactctgccttttcagtgggcagaggaagtgctttgtagcagcaaacccaacccctgagcctccatgtgtcgggtcaggcaaaatgaaattgacacaggctggaattttactgatttcagtcattgctgggctcgtttgtgcaaatagactcagaagagctcctttaaaaggagtgaccatttcctgatttagattctgagggggtttttggttttttttactgttgttcactatcatgagcttaccatgtgcttttttcttttttttttcttgtgatgtagtctcgctctgtcgtccaggctggagtccaatgctgcgatcttggatcactgcaacctctgcctgctgggtttaagcgattctcatgcctcagcctcctgagtngctgggattacaggcacgcaccaccacacacggctaatttttgtatttttagtagagacggggtttcactatgttggccaggctggtctggaactcctgacctcaagtgatctgcccgccttggcctcccaaagtgctgagagtacaggcgtgagccactgcatccagctcttagcatgtgcttttaaagtaaaaaccacgaggagaaggtactcattacttcataacttgtgtctcacccaccttgctgtcttcacatccccactttctgtatgcacattggaaggtgaatttgttcagctcacattaatttataggaataattttcattgctctgtgaataaaatgtgctaccactttaaannnnaaa

SEQ ID NO: 340674 - DNA, 3668 bp, Homo sapiens
  misc_feature (1796)..(1796): n is a, c, g, or t
  misc_feature (1887)..(1887): n is a, c, g, or t
  misc_feature (3298)..(3298): n is a, c, g, or t
  misc_feature (3662)..(3665): n is a, c, g, or t
cgttgccggggtaacggcgagcgcgtggggccaagaaagggcctgggcgaggaaagcgcggccctttccgagtttggtgttttgcagcgaaaggaaatctcgctcttccgaaagtcctccagggcgagagaggaaagggcctagaatacctcctctgaaaaatggcagaagcagttttccatgccccaaagaggaaaagaagagtgtatgagacttacgagtctccattgccaatcccttttggtcaggaccatggtcctctgaaagaattcaagatattccgtgctgaaatgattaacaacaatgtgattgtgaggaatgcggaggacattgagcagctctatgggaaaggttattttggaaaaggtattctttcaagaagccgtccaagcttcacaatttcagatcctaaactggttgctaaatggaaagatatgaagacaaacatgcctatcatcacatcaaagaggtatcagcatagtgttgagtgggcagcagagctgatgcgtagacaggggcaggatgagagtacagtgcgcagaatcctcaaggattacacgaaaccgcttgagcatcctcctgtgaaaaggaatgaagaggctcaagtgcatgacaagcttaactctggaatggtttccaacatggaaggcacagcagggggagagagaccttctgtggtaaacggggactctggaaagtcaggtggtgtgggtgatccccgtgagccattaggctgcctgcaggagggctctggctgccacccaacaacagagagctttgagaaaagcgtgcgagaggatgcctcacctctgccccatgtctgttgctgcaaacaagatgctctcatcctccagcgtggccttcatcatgaagacggcagccagcacatcggcctcctgcatcctggggacagagggcctgaccatgagtacgtgctggtcgaggaagcggagtgtgccatgagcgagagggaggctgccccaaatgaggaattggtgcaaagaaacaggttaatatgcagaagaaatccatataggatctttgagtatttgcaactcagcctagaagaggcctttttcttggtctatgctctgggatgtttaagtatttactatgagaaggagcctttaacgatagtgaagctctggaaagctttcactgtagttcagcccacgttcagaaccacctacatggcctaccattactttcgaagcaagggctgggtgcccaaagtgggactcaagtacgggacagatttactgctatatcggaaaggccctccattttaccatgcaagttattctgtcattatcgagctagttgatgaccattttgaaggctctctccgcaggcctctcagttggaagtccctggctgccttgagcagagtttccgttaatgtctctaaggtaacacaacatcagctttgccattggagtgtcacttaaatggttcagtttttttttttttcttaaatgtagtagaatcaaaaaagttagttgtagaaacttcataacattcctgccagtgacatgctggaagatttggggtcattcgtacccttcccttattgcgctagaagttgtcctcccctcatgttacattttattgtcccctccctcccaactgctgctgagctccaatgacggagctttggagtgtcccatggtgatctgatctgggtaggcattgcttctcttcccaggggtatcgttgctatgtgacttgttttatactgcaatttaacattcactcatacacatattcacaaaggagtcaaaacattgaaagtttgnagatctcttagagaggaagggacttgatatttgttgctaagcactttcccaccctgttgttatcctcatcctgaggatgagaaaccaaggntggagccgttgagtggctaatccaagatcacacagctcatgtgcatactcgggatccaaacccacagctctctggctccctggcttttgtttcactatatccttcgtgttgccatcagagataggagggactcagcttacacaaggactatcaagaaagaaagctgtgtgtgttctcattactcagtgatttgctggctgaaaacaaattgtagataccctctaatttcatcctcatgctgctggaggtgaggtggggctgaggccagagggtcttgcagggctagagatgactgccctttagagcaggttaggttgcctaggctttagcttggtcctatagaaaattagggagcctatactgtttctagaatttttatgcccattttaggggacttgtagcatatacttaatatgtcctcacttaacattgttgatatgttcttggaaactgcaactttaatgtcgtataacaaaaccgttttttcttctcatcatttcaagaaaacaatgttgaagtttatttgaagacctgctgtacatctgtattagtccattctcatgctgctataaagaaatacttgagactgggtaatttataatgaaaagaggtttaattgactcacagttccatgtggctggggaggcctcaggaaacttacaatcatagtggaaggcacctcttcagagggtggcaggagcaagaatgagaggatgagtgaaggaggaagccccttataaaaccatcacatctcatgagaactcactgtcacaagaacagcatggggaccgtcccccataatctaatcacctcccacgaggtccctccatgacacgtggggattgtgggaactacaagatgagatttgggtgggggcacagccaaaccgtatcaacatcatttcacttaaagtccgtgtccaagaacctatcaaggacatttgaggacttactatatttagtattcttaatgctgtgtttataatcaatgtatctgcttatatctgttgccatgttcagtgattactaaacggcaggtacttagtcagaacgtaaatcccagttatggtttccccaggaggaaactgatgtgctctgtgagtttccacttggagtgcacagtgagagggactggagaccacctgcatttcctgctgatgcacccaaatttgtactattattttgtaggatacagaagtggtttttcatttctcaataggaacttatgctgtgctatttgattaaaccctctactatgactgacaaggaaatggagtcaccagaatgtatgaaaaggattaaagttcagtctcgctctgtcgtccaggctggagtccaatgctgcgatcttggatcactgcaacctctgcctgctgggtttaagcgattctcatgcctcagcctcctgagtngctgggattacaggcacgcaccaccacacacggctaatttttgtatttttagtagagacggggtttcactatgttggccaggctggtctggaactcctgacctcaagtgatctgcccgccttggcctcccaaagtgctgagagtacaggcgtgagccactgcatccagctcttagcatgtgcttttaaagtaaaaaccacgaggagaaggtactcattacttcataacttgtgtctcacccaccttgctgtcttcacatccccactttctgtatgcacattggaaggtgaatttgttcagctcacattaatttataggaataattttcattgctctgtgaataaaatgtgctaccactttaaannnnaaa

SEQ ID NO: 340675 - DNA, 271 bp, Homo sapiens
gatgctcagtaagtctttgctagccttatgaaatctttattgattatcctgctagcttgaaagctgtattccattagtgtcacatgtgagtgttgaggtaaagacaagaggaaggatacaaacaagcaccctggtggtctgggactctctttccaacatactctaaaacaaaatatagaggcatcagacatttggagccttcatctagtgaaaattctgcagctccagtaagtgctgcaatgtgcctgtgcaatccacatcgtctgccact

SEQ ID NO: 340676 - DNA, 103 bp, Homo sapiens
aaattatcatactccacaaagcatcgtgtgcccccctggagaggagtgaccctcaccaagtgactgacacatcaagcaagagattcaccaagtccccgagggt

SEQ ID NO: 340677 - DNA, 107 bp, Homo sapiens
atgaaaaggaaacagcaaggaaattaaatgcctgagtaaggtgcaaaccagagaataagagtccccagaaaaactcaagattctgcaaccatggttaagtttcagag

SEQ ID NO: 340678 - DNA, 763 bp, Homo sapiens
tgactcaggaggctgaggtgggaggatcacttgaatccaggagtttgagaccagcctgggcaacatagtgagacctcatatctacaaaaaagaataatagcaaaaaaagcaaaatcagctgggcatggtggtacacacctgtagtcccaactactcaggtggctgaggtgggagcatcatttgagcctgggaggaaggggctgcagtgagcagagattgcaccactgcactccagccagggtgacattgtgagaccatgtctcaaagggaaaaaaaattacatatattttttcctttttttgatatagatacgatatttttctcttctgttcattggtaggttggatctctgatgtgtgccataggggcaaaactttaggcaaggaagagagaaggttttgtgtcctgattctgctcctctctttgtcacttggtctgagtgttattacttagaccctaatagcatcatcaccctgcgtgctcttggaattagtcccagttttgcagtcacagatagctaagcagttggcaccaaaattccatggagcgacatcgtctcatctttattctaggtattttgcaagagtgtagcagccctagagctacatgtttgtgtgataaaactaggaaaggtagcaaggtagaactttttagggagtagaaagtttcagagccactctgcattgaaattacttacctgctttttttctcttgtttaactttattcagtgactttttgcatacagaggagcttactttctag

SEQ ID NO: 340679 - DNA, 151 bp, Homo sapiens
tgagcggagcgaggagaggaggggtggagagggaggaattcccagtttccctagaatgggagggaatctgacagggagatgaatgtcctggaaaaaagcgctgtctttgcctgacagaccctggggcctgtcctggctcagtcactctctt

SEQ ID NO: 340680 - DNA, 227 bp, Homo sapiens
tccttttcccatatacccacatacctgggaaaaatcaactttttctcagatactctagcgcaaaggccaactcaaagttcagcttttccaagaagccttcttaaattcgacctaggaaagcatagtttcctcaatgtttccagataagggcacagcagtagaataaaggcacaatataaagaactcaccgaacagcagctcccggcgcatcatcctcctgactgtgg

SEQ ID NO: 340681 - DNA, 202 bp, Homo sapiens
tccttttcccatatacccacatacctgggaaaaatcaactttttctcagatactctagcgcaaaggccaactcaaagttcagcttttccaagaagccttcttaaattcgacctaggaaagcatagtttcctcaaaccttgcgtgtggagtataatcacctcacatatttgcattttctttttatttttttaacctatcatct

SEQ ID NO: 340682 - DNA, 529 bp, Homo sapiens
tcacacctgtaatcccagcactttgggaggccaaggcaggcagatcacttgaggccaggagttcaagaccagcctggccaacatagtgaaaccctgtctctacaaaaaatacaaaacttagccaggcatggtggtgcatgcctgtaatcccagctacttgggaggttgaggagggaggatcacttgaacctgggaggttgaggctgcagtgagccgagattatgccactgcactccagcctgggcgatagaatgagaccctgtctcaaagaaaaaaaaaaagtcttgggattagtgcagacagggagtccttacaaaagatattgtggaataattgcttatgaagatgctgattttgcaagaaagggtaatggacacccgggccaaacctagtattcaaagcaagcagtctcaaatgcaaaaagtgctggttgtcatatggtttagggataaaaatactgtggtatttttactttattctttaatcacagataggcccaagagatcctcgagtttatgcccaaatctct

SEQ ID NO: 340683 - DNA, 655 bp, Homo sapiens
acatatgtttatagcacacaattcgcaatgtaaaatatggaaccaatctaaaagcccatcaactaacaagtggataaagaaaatgtgctatatatacaccgtggaatactgctcagctataaaaacgaatgaaataatgtattttgcagcaacttggatggagctggaggccattattttaagtgaagtaactcaggaatgaataaccaaatatcgaatgttctcataagtcggagctaaggtatgaggttgcaaaggactccagggggaaatttggaagggggttgagagataaaagagtatatatcgggtacagtatatagtactccggtggtaggtgcactaaaatttcagaaatcaccactaaagaacttatccatgtagtcaaaaaccacctgtagccccaaaactattgaaataaaaaaaataaaaataaatcttcacgatggttcataagtcttcttcgctatggtccataagggtatcatgatgaggcctataggcctccaaccttatccccaaactccagctgccattcttctgcagctcacctgaccctatcttccttgagcataccaagctctctcccacttaaggaccttggtgcttcattccatcagctgaaatgatcagcaccttgcatggctgcctcctc

SEQ ID NO: 340684 - DNA, 220 bp, Homo sapiens
tgctgccttgatgttttattgttttgtttgttgccctcacaccttttgtctggactttatgttgacaagtgtgatggagaagggccttggggttgtgagttttatcccaggacttaaatggaaccagagagttcccatgtgcttctgaggttgctcaaagctcagagttccattggcctggtgtgttttatgtggtggcagcctgggtattggtagcaat

SEQ ID NO: 340685 - DNA, 177 bp, Homo sapiens
taaatatatgaaatgttgcttgatttttattagttattaagaaaatacaacttaaaaccacaatggaatacaattagacactgaccagaatggctaaaatgcagaagaggcaatatcaagtgttgaggatgtggagtaactagaattcgtcgacattggtgttaggattatatattg

SEQ ID NO: 340686 - DNA, 810 bp, Homo sapiens
aagccacaagacgggatgagaatatcaggatagtgtgaacagatagaaagaaggctgggatcactccaatgctgcaagcaaacagaagagaagcaaacagaaaaggggactgaaaagactgatgcgtgagacaggaggagaactgggagagtagggagccctggaagccaagcgaagtaagtgtgccaagaaggggaatgatcagccatgccaaacactactgacgggtgaagtaaggggaggactgcaaactgacttgagggatttaggaacttggagggtattggtgaccttgacaagagtggctttggagaaaagtgacagtgaggacctgaagggagcggctttaaaaaaaaacaggagcaaggaattgaagacagtgagcactgacaactcttcaaattgtttttgctgcaaagggggcaaagaaattgtgcagtagccagcaggagaagttgcatcaagaaaatatgaaagaaatctcagaatgtttgatgctgatgggaataatccagtagagagtgaaaactggtgctacaggagaggtggggagagctgcttatgaattagctgaggagggaagaaggattgagatcttttgtgtggatggagagatcagctttgggcaggatccaggcgagttcatcttggtaaggtgacagaaggcagaatctgtgtgtgtgatgtgatcatagtgggccatagccaaataacaataatggtaatcagtcagaccaatattgtttcctaggaatgggaagggaagagcctttaacgtaggaagaaaccatcccgatctttaaatttctg

SEQ ID NO: 340687 - DNA, 94 bp, Homo sapiens
cccaccacctgtgaacagagttcaggcctccaccattcccccaggggaggaaccctgcatcacccttccaagactgggggacttatggggaatg

SEQ ID NO: 340688 - DNA, 781 bp, Homo sapiens
gccccatggaaagcctcaatctccccacctgtttcttgatgcttcctgcccttgaagggcagctggtgggggtacttagagagacaggcgctagcatgacagagctggtctgtcagcccccttcctccaggaagtcttccaaaacagccctcagccccctctgcctcggcagaacttgcagtgctggggatttggcgggtggccacgtgccgccttgtggcagccagcagtatgcctggagcccagggaagactcagtgtttgtcaaaccgaaccaacatggtgccggcacttctctccccacgtgctcctgtctcctgctctgcgacacaggcctcacaaccaatcctctgactcccaggccctcgtgcagctgatggggaagaagccctggccccacaggcagatgggggtggggagcaaacaagtccctccccctctttgaggctccatccttcttcctgaaatgggaataacgccagctcttattgacgagggtgagccatcgtgtatactaagtgctcatccctggaaggcagccatcagaataataattgtcattgttaccatcaccagtgtcagtcagggtccagtcgagagacagaaactgtaccgttcagataaacagagaaattttggtatagagaattagaccaggcacggtggctcatgcctgtaatcccaacactttgggaggctaaggcaggaggatggcttgagcccaggagttcgagaccagcctgggcaacgtgggaaaacctggtctctatgaaaaaatacaa

SEQ ID NO: 340689 - DNA, 365 bp, Homo sapiens
ttgctagaaatgcatcagaaacaaaataaccattcgcggaaccaagtaaaagccttccactaggaactaaaaaatatcatggttttttatatatatgcatacacaagcaaagccagaggagaataaacagcaaatgaatgaaaactagaagcaaaaacaaacaggaaaccaaccctaaattttcctatttaatttaccctggaggctacagtgttacctagggccccagaaaactcacataatgaatattttattcctgatacacaatttaatatcctttagtttaccagtgtggagagagagtgtggagagggccagtgtggagagagagtgtggagagaccagtgtggagagagagtgtggag

SEQ ID NO: 340690 - DNA, 340 bp, Homo sapiens
acacatcccacatcttttgaaccttcctccgatgtaacttccggttccttcagtgtcctgatctctcttctctgaaaggggatcggtcatctctcttcctccaggcagagcctgggtgcagtacagatccactcatccgccatagggagagcctggtcggtttctagctgaaatccagatacactttgaacaccacgttttccttcctaaggagtagatgctagtgtcatgagatttgttcttaatgaccttcttgccagagaaggcagaagccacatttagaaattctactttctgtctattaaggatgtaatatcataccatctgctccaacagcagt

SEQ ID NO: 340691 - DNA, 519 bp, Homo sapiens
cattaaataaatgtataaaataaacaagaatgagggaatgcttcaccagttaatttacaatcacatattgagtacctttaataagcccagtgttaactgctatagagcacatgggtaaaacataagatgggcaaaacattcttagtgaaaaagggagttctgaggtcaaacgtgtttgggaaatgcaaggtggacaaggctaaaataggtttcttcgcaggaagaattctcagagcctttaataggtcaatatgcattgcaaatctctgagggggaagagattaggcagcgcttctcaaatttacttgaccggaaaactcttgttttacaaagttccccttattgcctacagaaacacttggacaagagaatacatatcaaatatatgatgtacttcaatcaaagagcttataatcttgttggggaagcaaagcttataaatacgcataaaacaaagattacgtggtggctcatggccataatcccagtgctttgggaggccaaggcaggaagatcact

SEQ ID NO: 340692 - DNA, 145 bp, Homo sapiens
gactgtattgtcatatctctttgtctgtctctatttcctgtttcttttccataatagtaaaactcaacttttcctccccaaacaaggaaactacaagaaaggacttggatttgcctgctccttctgcctcctattgtcatgcttc

SEQ ID NO: 340693 - DNA, 570 bp, Homo sapiens
ctcgtttttgggaaaataattcacaaatggtgttcctgagaaaggtaggacaacactttcataaattttttagttatgcaaatccctgaaccccacctctagaggtggagacatggggagagctgcagcagggtacatagaagtatagcaattgtttttccaaatcatcacttattgttccagatcaatttcattcaaagccttccctaatgtgattttcaagaaagttaaaccaggcatcctttattgcaagatccaggtaagacaggaaaaaaggtcaagaaatgccaatgtctggttgaatagacatttttgtttttttaacatgattaacccttattaaaaacttgagattactttcaagagggaaggtatttcaaacatactcaaggcttttccaaaacagttctgaatcaaatttaagcacaagtacctaaaattctgaaaagaggcacgcaacaataacttttagcctaactgaacatgagttacaccccacgtatgtgcaggcttcatgtacaaattctcttctgatacttctaaacgggtatcagcttgaaaattattcaa

SEQ ID NO: 340694 - DNA, 240 bp, Homo sapiens
aataactgtaatgagaggagaagatcatgagggaaaaaaaaaaaaaccttgaagtgacctgaacaccttcctggtttgagaagattagaagaagaatctctatcaggaccagtcttcagccataggggttctgcttctcggcttctataaacaaccagacaaatagtgacggccaaagaaactgtagggaattcatagaatttgtaaaaacttgaaaaattaaatcctacatttagaccc

SEQ ID NO: 340695 - DNA, 862 bp, Homo sapiens
aataactgtaatgagaggagaagatcatgagggaaaaaaaaaaaaaccttgaagtgacctgaacaccttcctggtttgagaagattagaagaagaatctctatcaggaccagtcttcagccataggggttctgcttctcggcttctataaacaaccagacaaatagtgacggccaaagaaactgtagggaattcatagaatttgtaaaaacttgaaaaattaaatcctacatttagacccagatctcttaacattatttatgttatgaaataatagtaatagtaaaggaagagtacaagagcaaaacaacagatatatcctactgaagtaacttatgattcactttctactaaaagtatatagaaaaatgtagtgttgaattaggaacactgtacaggaaaaaaatggataaacctagtttttaaacacattttcaccttgtttgtctgacaaataaaagaaaaatagaaaagtgtatctgataccacatcttagattttaatctggaaaaatcaaatactaaactgagatctttgagcttacctggtccagataaagaaattaaagtccagaggaaaaaatcattttgtcaagggcacatctctagagatggaagttagatggagagctagaacgagaacctgttgtggtctcacttccagataatgttttcaaccacaataccacaatatcactgcctatatttatagttcccatggctttttctgctctttttcttgttacgtatggaatattaagagataccatcacaagtctcttgtctaagaagaaaggcaagaataacagctacaatttctttggaaatacactgttaaactgagtctcatttttgcaagattgc

SEQ ID NO: 340696 - DNA, 658 bp, Homo sapiens
ataggacttttgtgaggattaaataaaggaatacactgtacatacagtgcttacaggtgcttcttccacaaggaatgggcagtacactttaagtattatttatatttctgatatcccaacagttaacactaaaccgtaccaagtatacattattttgctctctctcacacaaatatacacatatataaacaagtcacacagtcccaaccctgaaggtcaacgaggatagtgtttgctacccttgtagagtacaatctttaaactgtgatgacaagacaataaattttcccaaccatttgaatgagctttggaagtggattttttacttgagcttccagaaaaaaagcccagtctggctgatgccttgagttagccttatgagcattgaagcagagaacccagttgagcctgactgaattagtaactatagaaatgtacactaagaaatgaaggttgattttggccaaaaaataataataataatggtaactgtgataatgtgaactggcatcctctcccccacttacagcagacttgaggttaatctagagaatgaattttgggctagaagaaatcatccagtccacaatcagtgtcttcaattctagaatcaattgaaatatttgcttatcatcaaaataacattttcttcaaggca

SEQ ID NO: 340697 - DNA, 436 bp, Homo sapiens
catttctcttccacatgataatccttccctccttcaatcaacccttcttttttccaggctaaacatctccatttaattcattcattctcccacaacatggtttccagttctttctccatcctattcactcttctaatggcagaatccatcatgagtatgtgctctgaccacctaacacagtgtcctgtatatttattcattcaacatagacttagtgacaccaggtattgatattattctaggaattggagatatatcagtgacaaaaatcactgctatcttaaagcttaacatctcatctagcacctagaacaaggccagacacaaagtaagcactcactaaatacttgttgaaaacatcctgcacgaagggcagtatctgaatttgaacacaatgattccaaatgtggttgaacatgttgaaagtggcacactc

SEQ ID NO: 340698 - DNA, 388 bp, Homo sapiens
ttactcccactgctctcctgaaattgctttctcaaatgtcaaagtaccaccagttgattcaattcttccctcccagacttctctgcaacacccttgaaaatgccctccttgaaaagctctctatccttggtatgttctccacactgtggcaactcgagacttttcttcacctctctgacagttcctttcatcttctttgttcttgctccctaaagtaagattctttaaggctttctttgctctctgtgtacaaccttcttgtagaattgggtatttcctgggctttgactattgtatctatgaatgtgaactatcgaagctctttctccagatctggcttctcttcagactccagtcccatgtcttcatttgctacctggaagcctca

SEQ ID NO: 340699 - DNA, 408 bp, Homo sapiens
gtcactgagctcattatccctaagcagcgttcaaacccaggcagtcaggcaggcaggcaggcaggctggctctggagcctgtgccactgccctctctggtaactgattaggaccaaatatccctgtgatagtccttcataaaggctgtccttgacagctgagcctttgacaaatcttgggcagcagtgagtttaaggaaatgtgtgaatcctgatgagttcctgaggggccaacattctggagggctagttactgtggagccgtatgctttacccgtgggctgagatggaataggaccaacagatttccgctcagggtcccagtatgggctctggcttgaactgaaggtgatccatgagctgggttcagaaaagggggtaggcaaatagggaagcaaggccaaagtgc

SEQ ID NO: 340700 - DNA, 851 bp, Homo sapiens
agttgtcctctttctttcctacacctcaatagcctcaatcattacccatacttaagagtacatactcacttaatttgggcccaaatgtgcaaaggggaccagtccttatttaacactgttacttaatgatggctcctccatgatgtaaaaatgatactacatattcatctttccaacaaactcaacaccagaacggacctatgttgtgaaaaaggaatcagccaaaagcactattcaggaagtatccattggatcaaagtttcactactgagtcaaaaataggaaggtcgactttaagaataagatgttccaaaatatctaagctactttacttctaggatatgctttctagaaatgcagaagaaaaaagttcacatgaaaattttatcagctcctgggatttgcttctaattcattcaacaaatatttgctgaacacctatgggcaagcacaacactaagcacttggaaacaaaggtgacaagataatgtgtggtctcccctcctgccaacccccatagaacttatttaaaagctttccagttttttgtctctcccattcatttgttaacatactatatgtctacaatgtggcaggaatgttaggtacttgggggagcaggtgttgactaagacaagactcttgccctcaaagaactgagagatcagtagaaaagaaaaatacaaataaggatgttaagtgctataaaagccacagagatactgtgggtaaccagtggaaaaaaataactaattctagttatattaatcaggacacacttcctaggagatcaatatttaagtagggtctgaagagacaaatgtttcccagatgaaaagaaaagaatattc

SEQ ID NO: 340701 - DNA, 2762 bp, Homo sapiens
gatctcttgtaggctctctgtgttccaataattttttgactatcataccaggaaaaaaccaacaactctattcattcccaaacaaaatctcttcccccttagtcaatagcttgcgaaagacatcttaactcacccttgcagataagtcttggagtgaaacaaataaatagcattgtattcctggccatttgcctggctagttgctgtctacaagggagcatcaaaacatcactacttcttatgtaacttcttccagccagtgcttttattgttcgttttagtttactggggacacacaggagtctttctgtaatgacttatgtggtaaaatgtttgagagtttgcactcaattttaaagaatttgcagtttctaacaaggtgaagaacagctataggatctaaagttccattacagcttactgtgaaagaattgacaagactggcctcagacaagctaatcatggtgcgactctctcccttcctcatccacctctttggggacaagaggattacatctcaggccagcaagatcagctgcttgaagctctgtgtaagagcactgcactgacggtttggagacctgagcctgggtcctgacttttccattgactaagctctgtggccttgggcaagtcactccccctctctgagcttcagtatcctcctgtcacaggagggagttgggctagatcatctttaaggtaggttctagctttgacatcatcttgggggttaggccagaggctgggaagactgggtggactttctcaattgctctgccaggagggaacaagcccagaggctgaagcttcccagtatttagaggtgtggtagggcagtgtctgcattcccaggagacccagggtgattaaaatttattctttaggtggctaggagggctggggaggcccagtggaagagagagagagagagagagagagagagagagagagagagagagatcgagcttgatgtattgctcagtattcacttagaagggtttctttctctttggcctagtttgtgaagggatcttcctttggactttctctaagttgggagaagaacattcttttcaatggagctcatcttctatctctagggtctgttcagcctttcatctatccatccttcctctttattggtagaagaaacagtggagagtagccacttctggttctagcacttctcttttgttaagatagggtttggatttagtatgaagctttggctaaaacccttgggtttgccttagaacactgacactaagaacctggaatgacatggggaggacaaagagagctcaagaggaatgctttgtgagaagtggattctctccgtgtccctgccccccacccaaacttgaactatacctattacatttccaggcagtatccctaagatgagatcctggagaaaggactaggggaagtatctttctggatgcttgtggtcccagaagggtactttctgtgtcataccatgccacttctttaagctcttcagggcagccaaagccagcccttttctcctactgcccccaggagaaatagcactcttctcccttcccccagatggcagggctctggcctccctacacctcataccctgcctgcctcctccaggaggaatctccggggccccttcctgactctccccaccttcgccacttgtctctaggctatgggacaatcatcccattcaccacttgacatccttgacatccttgactttcattcccccaacctccagcaggttggccccaatcctcttcacctctgtgttttcttctagaagatgcattttgggtctgagaggagcattttcctggaaggccatcttttaaggcccctgcttgctgtcatagtgcagagcagaaacttgcacactatttagagagctcccttcccacctctctgcccagccttgttacctcacttctgctctggccatggctgtgaagggcccagccagctccctgttttgatgttctgtgcaacagctccggggtcttgtgactggagatcctcaacaggccctggagccaggactggagtcttggcagctgatgagcagcaccttgccggccaggaggagctgatgctgacgatctccccaacatctgaaggcttaaagaacattgtcgttcttcagccctccttgcttctctcaatacaataagacattgcagaagcaaaagggtggcctctgctccaggcaaggcagctggctctgtctggggcatcggcctggggcttgggtgccacgtgctgagattgcatagtcaaaacagccatttttgccaacaatagcttgtggctccccacattttcctaccctgcactcaagggccagaccactctctgcatggaccagaccatcttcccaaacccatggtgctttttccccaactcaacctagactccaaggtggggagggatgggtcagaggccatagtggcccctggataatcctgacgtggggtggagtggggtgaggcagagggagcagccccaacacctgcactgggccatctatgggaaagaacacgggtcgagtgcagtcgagttgtctggccatctgtatttggatctataactgtactttgcctggcgctgtgcgcaaggtcagaaaacttactgctagtacctagaaacacacaaggctgcccagccaaatcttaatgtaaagtagctagagccatggaagtacagtatgaattaaaaagaaaaaagtattgaactacaataaaaaatggtgt

SEQ ID NO: 340702 - DNA, 1335 bp, Homo sapiens
taggccggagccctgccatctgggggaagggagaagggtactttctgtgtcataccatgccacttctttaagctcttcagggcagccaaagccagcccttttctcctactgcccccaggagaaatagcactcttctcccttcccccagatggcagggctctggcctccctacacctcataccctgcctgcctcctccaggaggaatctccggggccccttcctgactctccccaccttcgccacttgtctctaggctatgggacaatcatcccattcaccacttgacatccttgacatccttgactttcattcccccaacctccagcaggttggccccaatcctcttcacctctgtgttttcttctagaagatgcattttgggtctgagaggagcattttcctggaaggccatcttttaaggcccctgcttgctgtcatagtgcagagcagaaacttgcacactatttagagagctcccttcccacctctctgcccagccttgttacctcacttctgctctggccatggctgtgaagggcccagccagctccctgttttgatgttctgtgcaacagctccggggtcttgtgactggagatcctcaacaggccctggagccaggactggagtcttggcagctgatgagcagcaccttgccggccaggaggagctgatgctgacgatctccccaacatctgaaggcttaaagaacattgtcgttcttcagccctccttgcttctctcaatacaataagacattgcagaagcaaaagggtggcctctgctccaggcaaggcagctggctctgtctggggcatcggcctggggcttgggtgccacgtgctgagattgcatagtcaaaacagccatttttgccaacaatagcttgtggctccccacattttcctaccctgcactcaagggccagaccactctctgcatggaccagaccatcttcccaaacccatggtgctttttccccaactcaacctagactccaaggtggggagggatgggtcagaggccatagtggcccctggataatcctgacgtggggtggagtggggtgaggcagagggagcagccccaacacctgcactgggccatctatgggaaagaacacgggtcgagtgcagtcgagttgtctggccatctgtatttggatctataactgtactttgcctggcgctgtgcgcaaggtcagaaaacttactgctagtacctagaaacacacaaggctgcccagccaaatcttaatgtaaagtagctagagccatggaagtacagtatgaattaaaaagaaaaaagtattgaactacaataaaaaatggtgt

SEQ ID NO: 340703 - DNA, 2708 bp, Homo sapiens
gatctcttgtaggctctctgtgttccaataattttttgactatcataccaggaaaaaaccaacaactctattcattcccaaacaaaatctcttcccccttagtcaatagcttgcgaaagacatcttaactcacccttgcagataagtcttggagtgaaacaaataaatagcattgtattcctggccatttgcctggctagttgctgtctacaagggagcatcaaaacatcactacttcttatgtaacttcttccagccagtgcttttattgttcgttttagtttactggggacacacaggagtctttctgtaatgacttatgtggtaaaatgtttgagagtttgcactcaattttaaagaatttgcagtttctaacaaggtgaagaacagctataggatctaaagttccattacagcttactgtgaaagaattgacaagactggcctcagacaagctaatcatggtgcgactctctcccttcctcatccacctctttggggacaagaggattacatctcaggccagcaagatcagctgcttgaagctctgtgtaagagcactgcactgacggtttggagacctgagcctgggtcctgacttttccattgactaagctctgtggccttgggcaagtcactccccctctctgagcttcagtatcctcctgtcacaggagggagttgggctagatcatctttaaggtaggttctagctttgacatcatcttgggggttaggccagaggctgggaagactgggtggactttctcaattgctctgccaggagggaacaagcccagaggctgaagcttcccagtatttagaggtgtggtagggcagtgtctgcattcccaggagacccagggtgattaaaatttattctttaggtggctaggagggctggggaggcccagtggaagagagagagagagagagagagagagagagagagagagagagagatcgagcttgatgtattgctcagtattcacttagaagggtttctttctctttggcctagtttgtgaagggatcttcctttggactttctctaagttgggagaagaacattcttttcaatggagctcatcttctatctctagggtctgttcagcctttcatctatccatccttcctctttattggtagaagaaacagtggagagtagccacttctggttctagcacttctcttttgttaagatagggtttggatttagtatgaagctttggctaaaacccttgggtttgccttagaacactgacactaagaacctggaatgacatggggaggacaaagagagctcaagaggaatgctttgtgagaagtggattctctccgtgtccctgccccccacccaaacttgaactatacctattacatttccaggcagtatccctaagatgagatcctggagaaaggactaggggaagtatctttctggatgcttgtggtcccagaagggtactttctgtgtcataccatgccacttctttaagctcttcagggcagccaaagccagcccttttctcctactgcccccaggagaaatagcactcttctcccttcccccagatggcagggctctggcctccctacacctcataccctgcctgcctcctccaggaggaatctccggggccccttcctgactctccccaccttcgccacttgtctctaggctatgggacaatcatcccattcaccacttgacatccttgacatccttgactttcattcccccaacctccagcaggttggccccaatcctcttcacctctgtgttttcttctagaagatgcattttgggtctgagaggagcattttcctggaaggccatcttttaaggcccctgcttgctgtcatagtgcagagcagaaacttgcacactatttagagagctcccttcccacctctctgcccagccttgttacctcacttctgctctggccatggctgtgaagggcccagccagctccctgttttgatgttctgtgcaacagctccggggtcttgtgactggagatcctcaacaggccctggagccaggactggagtcttggcagctgatgagcagcaccttgccggccaggaggagctgatgctgacgatctccccaacatctgaaggcttaaagaacattgtcgttcttcagccctccttgcttctctcaatacaataagacattgcagaagcaaaagggtggcctctgctccaggcaaggcagctggctctgtctggggcatcggcctggggcttgggtgccacgtgctgagattgcatacctgcactcaagggccagaccactctctgcatggaccagaccatcttcccaaacccatggtgctttttccccaactcaacctagactccaaggtggggagggatgggtcagaggccatagtggcccctggataatcctgacgtggggtggagtggggtgaggcagagggagcagccccaacacctgcactgggccatctatgggaaagaacacgggtcgagtgcagtcgagttgtctggccatctgtatttggatctataactgtactttgcctggcgctgtgcgcaaggtcagaaaacttactgctagtacctagaaacacacaaggctgcccagccaaatcttaatgtaaagtagctagagccatggaagtacagtatgaattaaaaagaaaaaagtattgaactacaataaaaaatggtgt

SEQ ID NO: 340704 - DNA, 246 bp, Homo sapiens
gagagctggttccagggaggctcaggtcaaaggtgattttattttattttttaatttttaatttttttgagactaggtctagctccttccccaggctggagtgaagtggtgtgatcacagctaaccacagtcttgacctcctgagatctcatggctcattacagcctccacctccctggctcaagcaatcctcccacctcagtctcctgagtagctgggatcacaggcctgcgctaccatgtctag

SEQ ID NO: 340705 - DNA, 171 bp, Homo sapiens
ctacgtccagctaggaacagagattcatttcttacatttctggaggctggaaaatccaaggctgagaggcctgcatctgggcctctggctgtgtctgtcatcccataacaagaggtggaagggcaaaaaagcatgagagagaaagagagagagagagagaaagcaagagag

SEQ ID NO: 340706 - DNA, 663 bp, Homo sapiens
agttctagatttaattacagcagttacaattaattcaagtgaaatattaatctcagagactctatggaaataggtgtgcatttgttagagtatatctatttttcccatgctttaatggataatttgtttttggttagtcattaacaaaaataatcaatcaaagtttaaagaaatgaagtattgtttgatttcagagaaagaaaaatacatgttctacttactgttcttaagtagaacagaaaactctaataagtacagcagataacctaagatacaaatgagttccatattatgtctcattaagaaataataagaggcaggagagaggggcaaaggttaaaaaggagaaagaaatagcttcttgtaacgtttgcttctgtggacacagaagccttcaagccttttcacaatgttaagcataaaaggaattgtcatctcccatctcttgtcctgctgctgaatagaatgaagtgaaagtctggattttgcctgggttgggattctcaactccctggcttcatcttcaatgacatgtttctctccatttctacgcgtctgccgtcccagtacatctatggctttggggaaactgagcacacgactttcagaagaaacatgaactggaacacatggggaatgtttgctcatgatgagccacctgcg

SEQ ID NO: 340707 - DNA, 409 bp, Homo sapiens
tgccgcctctgattctctctctgcaaagatcagcttcctccacctgaaagtgatctatcacacagcaaccatgctgcaggtcaagatctatgaccccactaataaaaggtatgaggttccagtaccactgaacacccctccccaaccagttggtgaccctgaaaaccgtctgtatgatgtcaggattcagaacaatccttttggaatccagattcaacgcaaaaactccagcactgtgatttgggattctcaactccctggcttcatcttcaatgacatgtttctctccatttctacgcgtctgccgtcccagtacatctatggctttggggaaactgagcacacgactttcagaagaaacatgaactggaacacatggggaatgtttgctcatgatgagccacctgcg

SEQ ID NO: 340708 - DNA, 455 bp, Homo sapiens
acactgaaatttaaccagggccgtgaatggttttgtttgtttttgttttactaaatctggcagccctagcctcagtgccccatcccaggttatatcactgactggtgtttcatttccttctttcttttgtttgatttcactgataagacaccattattattgctctatgtcatccctgttcatccaggctttcctgtacttatgtcattttcttggctcatcattccttctcatttctcacactgtcttctaggattattttcatactgccttaagtataatacatccactagagtgtcccttgggaaaacactcatgtggtcaacttccccagctcgcgtttgtgaggaggcaggtctttatctcacccttgttcttggatgatagtttcactggataaacaattctgggttgacaaggatttgctcttgacacattgattggcttaagatttt

SEQ ID NO: 340709 - DNA, 204 bp, Homo sapiens
atgctactttttgtctgcaatgattctacctattgttagttcactgcatcctcagagtcagtgcacaggcaggagagactgagattatttagattctcatagtacagcatataatgaggaagacaggctaggatgccatgggtgccacattagtgccttctttaaggttctgatatacaagcagccctgccccagttggtttgt

SEQ ID NO: 340710 - DNA, 670 bp, Homo sapiens
tcgcccaacactcctgcagttttaaacaatctaggcaatataacagccagctcttctaaagatcactgccttcataagcacattgtaaatcataaattattgtaatttatgaaatgcagtagaacagtgaaactatgtttgccttcccaaacatccatcaggaagaatattggtaattagtttgtattcaatttgtaatttgattgtttaaactggcgctttgttcaacgtttgttttttgttctgttttgttaactaccactttgcaaatattttattctagaatcacagcccatcatgttctaaaacaaattgaattgccaagaaatacacctcggttttagtctgttcaggctgctataacaaaataccacaaactgcatggtggcttataaacaacaaaattcatttctcacagttctggaggccagagagtccaagagcagagaaccagcagattcagtgtctggtgaggacccgtttcctggttcatagatggcgtcttctccctgtgtcctcacatggtggaaggagcaaggcagctatctggggtctcttttataaggcagtagtcccattttcaagggcagagtcctcatgacctaaccaacccccaaaagggcttacctcctaatattattactgggtcggtgttgggggtgggatttca

SEQ ID NO: 340711 - DNA, 919 bp, Homo sapiens
tgtgatgttgtctcatctaactctccacagcctggtcaccagccaggggcagtatccacccacattactgagggaggagccaaaagccaagggagactggtgatgctcggactagagcccaggcatttttaactcctgttccctcaccagcctgcaggaaatggaaaaggcatggatttagggatatgttcttcctaagtcttggagtgtttaatcttggagagagaaagggctttagtaagaagtgtctactgctacccgtttcaggaaccctttttatagcatctctggccactgtttgtcctcttctgggttatgtgctgtccaaggagagtgaggtccttttttcaggaagctcttgcttatattttatactgaatgactcacacctcttgggcttggagccccatcatggcaggtacaaagtagttcctcatccttatttacatgcaagccatcagacttctttttaagttgcactcttgggtttactaagtgctagacactgtattaactacattatctcacttgtcacaacagcccattgaggcaggtatcgattgtgaaggtgaggaaacaggccaggagaggagtgactagcctgaggtgcagagcctgggtgctctgggatggtgttgcttcaggacacgtgctcttggccggatgatcgttcttccagcccccatttcttattctctgaggtaggcctcgcaagcatcttcagccattggcatgtctgttatttctgccttggctgattagcttattcatgggtagatggcagtgacctctcaagtagtagtctttcctcatcttcacatccaccctgtcacaagtccagtaggtgtaaccccaaactaaatgccaaatcctcctttctgtctccactcttgtcatcctaatctaaccagaaccgtct

SEQ ID NO: 340712 - DNA, 593 bp, Homo sapiens
gcgctcggcccgggttactagaagatagagagtgctgcttattgtacctcttctgcccactcatttctgttccacctgccccatcatggcaggtacaaagtagttcctcatccttatttacatgcaagccatcagacttctttttaagttgcactcttgggtttactaagtgctagacactgtattaactacattatctcacttgtcacaacagcccattgaggcaggtatcgattgtgaaggtgaggaaacaggccaggagaggagtgactagcctgaggtgcagagcctgggtgctctgggatggtgttgcttcaggacacgtgctcttggccggatgatcgttcttccagcccccatttcttattctctgaggtaggcctcgcaagcatcttcagccattggcatgtctgttatttctgccttggctgattagcttattcatgggtagatggcagtgacctctcaagtagtagtctttcctcatcttcacatccaccctgtcacaagtccagtaggtgtaaccccaaactaaatgccaaatcctcctttctgtctccactcttgtcatcctaatctaaccagaaccgtct

SEQ ID NO: 340713 - DNA, 520 bp, Homo sapiens
tggaccatgacaataaacaacaggtactggatgcaactgagcacttcccatggcattctggtcctctcagaagtcaaacgtacttatgaaattttaagtacaaaaagaaggtatcttaaatattttttctctaaatcacacacacacacacacacactctctctctctctctctctctctctctctctctctctctccccgtctctctgtctctctctctctctctctctagatactccttctgaccctctttctagagctctctacacaatatacaagcgaaaaaatttcttctttcatatacactttctagagagacacgctgtcaccccatacacaagactcacacacacactctctcttcgtggcactcccttccctccagacatggggtgtctaatcctcactcttttctctccctctatgtgtgtccgtgtgtggggccatgtgcttccctccaaacagagcgtgtgctttcttctaacatacagaggctgagagtgtcgcgtgcatatctccg

SEQ ID NO: 340714 - DNA, 694 bp, Homo sapiens
attttccttccagaaacatgggtattaatgattccctaaagccccaaattaagaacccctgttctaggagtagcctcaacatgctagatttaattgtaagcagctggtttaagaaattatgtaagttgcaatgatgaatattcctcgtcactcacaaatgttattcatcaatttaaaaattaatatgtatcaagtactcagtgtgttccaggcatgattttagttacaaggagtacagcagccaataagatattacagttttcagggagttttatcctactagggaagacagataagtaaataatgaccgaaggctagttaacaagtgctataaagagatataaaaaggaaagagcctaaggagattgaaagtgatggttatgggagagagatgtctatattaatagggtggtcagggaaagcctctctgaggaggtgacagtttgaatgagatctgtatgaagtgtgtgagcaagacctgtgaagatcttgaggaagagcattcaaggtgtagagaacacttgcaaaggccctaagatgggactgagcccggtttgttggattttcatcagtaagcccggggtggcaggagcatgcatgctgatccaggtatagaatgagtggtagaaggtgagatcaggagccctgtaagctgttgtaagcatcgttgttttaatttggtagaaactcagtt

SEQ ID NO: 340715 - DNA, 618 bp, Homo sapiens
gcctcagctagacagggcgggctgcggcgcgcagtcttaggcgtgcgcttcggggaaggggccctcgcgtgggaggagcgcgtctgcgagggatgcgccggcgcaggcgagacccggagccgcgtggtctctgcgcagtgcgtcgtgtggggcggccgaccccggcccgggtttccctgctcgttttcgtccgggcgggcgtcttggttcccgttccaggccagccccatcctaggtcgctgcttcatccagcgcttggggcatttgtgtcgttggcgttgttttcctcttaactacaaactttaaatgtgttcatctactcgtgacggcgagtttagcagactttcattcccagaagacgtgtcacacgatctgtatatttttcatacagaaattgacggacgtcgttacttctaaatttccacaggggctggttcatcccgcggctttacctagagaaaaacgtctgaggccgggcgcggcggctcccgcctgtaatcccaacactttgggaggccgaggcgggcgaatcacgaggtcaggagttcgagaccagactggccaacatggtgaaacctcgtctctactaaaaatacaaaaaaaaaaaaaaaaaaaaaa

SEQ ID NO: 340716 - DNA, 93 bp, Homo sapiens
ccaaaaaaccctcaacactgtatctttgttcttttcccatgtcctctaccctactaaaacgaacaaataatataaaccccaaccactgagtgt

SEQ ID NO: 340717 - DNA, 99 bp, Homo sapiens
tccagcagttatttgaagataaatatgttttgagtgtgagggtatattggggtctggaccaatgctatgtgaccataattgtaggtttggatttgtgaa

SEQ ID NO: 340718 - DNA, 388 bp, Homo sapiens
cttcccgctgtgtggctccagcaagtttcctcccacctcaggtctgggtttccaggcattaagtgacaaagtggatgcgacgctccttctggactgtaatgcgcactgcgtggagatgttcgtgttccagtgtagacagggcgttgtcacatcaggcaggactacagggacaatgtttgtcagcctgtcttctgggcaacttggggtatcctccctttatatcacctcctgcccaggtgctctgcgccgccagagcatcatgtcatttgggatccctgatggcaattttgagactttggttcacagtaaagattggtcctgtgtgatcttaaagtaatgtggcttaaaaacaaatggctgtcagggaattgtaaatcaaagcaaacac

SEQ ID NO: 340719 - DNA, 992 bp, Homo sapiens
aatacctgaccatcagtttcctcttcccactgagaacactgtatcttcttctaggaagtacttaagtactaaagtactccttaagtactaaaactaaagtcagagactatcatcatagggataggaaaaaaggacataccataccttatgggtcagcatccccaactcatggggtaatatatcccacttagcttggtgaatgattttcagcagtcatcaaacaggcaggaggctgtgtgggtaggccctcctgtaactccactggtcccgtgtgccttactcatactgtatttcttaccacaggttgggatatatcttgctgtaaggcaagtccctacccagttcttctttggctttttttagccaatttcatttctacaaatgtcttagaatcagctagtcaagatacatacatgccatgcattaaatccataggtcagtctaggaaggaaagtcacaacaatattgagtcttctagtccaagaacacatctatcatttcatttatttaaactaacatctctgaataaagttttgtaactttctttatactttccttgttagatctattttatatttttatgctgttgtaaataatatttccttttctaaccatttgttgctggtggagaggaatgcatttggatttttggtgaatgtattctgtatccattgactttgataaacactcttactaattctgaccatttgccatagattatgttggagattctgtgagtacagttataccatctaaaaaaatgacagtttttcttcctttctaattcatagtcctctatttgtgtcttgcattactgtattggcaaggatctccagtgcaaatgttggtagatgtgatgtagggggacatttcttttctccttcacagtctcccacatcaagttctcaatgtttcaccatttagtggttgctctggaattctgtaggtattctagaacagattaaggaagatcccttctattccaggattgc

SEQ ID NO: 340720 - DNA, 423 bp, Homo sapiens
tccacccgcttgggcttcccaaagttccgcgattacaggcatgaaccacgcatttgctttttttaattttaattttttttatttgtcaggcaagtaagacagttaagggacacttgtttttatttctcttgggtatataaagatcgagcatcccaaatccaaaaacttgacatgctcaaatcttaaactttttgaatgcctgcttgatgctctaaggaaatcctcattggagcatttggatttctaattttcggattagggatgttcacatatttgcagatattccaaaatatttcagattcttaaaaaacctgaaatctgaaacacttgcggtcccaagcatttcagataagggatactcagtctgtacctaggagccgaattgctgagtccacatggtaactcttatgtttaattaacttt

SEQ ID NO: 340721 - DNA, 678 bp, Homo sapiens
ctcccctcctcgaactcttacagtccaccatccccactgtcccacactcttcaaattcatcatcatttagcaccaaaggcctggtatgatgaagtgacttctgtgtgtttctgacttcccttcccaactgtgccaggagctccttgagggaaaggaaacctagcttaactttgcctgcatcctggatggagcgaggggcttgcaggtcacatttgctcagaaaatagtaatggtaatggaattattagctgatagcgtgcatcagcaactggtaagcttcatagtacctttcagaagacgtaggaaataagcaaagatctcaggctgcccaccagccttgtgaacccgatcaagaagtcaagcctcatagcaaagggatccacagacgcacattactgccatgggcccaataccagaaatgttctttaagcaatcagctggtcttgagaggtgcaattaaaaacagcaggggaatgacagccacaggtgccagttaggcgaaagcaaccagcggggaagtgcaggaagctaaaatgtttttgaatgaggaagctctgcccacttgccataccagggagagagagtcatctgtggctaaggttgtaggcagacattaaatacagcgatttgcaataaacttgctcaacaaatatttgttaactggagatttttatcaag

SEQ ID NO: 340722 - DNA, 235 bp, Homo sapiens
ggtcagcagatacaggttggggccaataaatatgtatttttttaatttttaaaacttttcaagtagcctcccaagacatagtaggctcagagagactgccagaaatctgtttattcaactacctggctattcttcctcagacagaaagtagatagccaggcttggaaaccaattcagagattttctctctgcatgtatgaaaatctggtctcacgtgactgccacaccacttctt

SEQ ID NO: 340723 - DNA, 782 bp, Homo sapiens
tttggaggtatgctgactgcaacaaaggaggtgggctctcccggaaagaaaacaaccaatcaaccacaaagatttctaacactcatttggagaacctccagagcatccggagaaacctttttaattggtgcaatgacaaaacttggaacctttgaaaaacattcctttggtgtggcttggattcctaggtacacgactggagtggttgttcttgacatgccctgtataaagtgcatagtattttggaggctgcatagatgcaatgacaaaattggatattctgccatatttgcaattcattgtactgcttatatctgaaaagtcacatgagtttggtgatatggtttggctccatgtccccacccaaatctcatgctgaattgtaatccccaatgttaagggagggacctggtgggaggtgatgggatcatgggtgcagatttccccattgctgttcctgtgttagtgagttctcatgagatctagttgtttgaacgtgtgtggcacctccccctttgctctctctctctcttcctgccatgcgaagaaggtgcttgcttccccttcactcttccaccatggttgtacatttcctgaggcctccccagccatgcttcttgaacaccctgtggaactgtgagttatttaaacctcctttcctcataaattacctagtctcgggtagttctttataatagggtgagaatggactattacacttggaaaatagtgtgttatccagagagagaaactcatgttgtaaataaacgaaggaagggctg

SEQ ID NO: 340724 - DNA, 430 bp, Homo sapiens
aaattaccactaaagaacttattcatgtaacaaaacaccacccattgccccaaaacctactgaaataaaaaataaaaaataaaaaaaccttccaaagtggaaataaaatcattaggaggaattggcttggtattaaaattttcagtgactcaattagcatacatttattgatactactatgtactgtgacagaaagtccaggttatgaacgtgggtttgttagaaaagctatttcaacccgaatttcatagaggcacctcaaattctgtatttccaaaactgaactcattcattaccttacctgccatgcttgtgtgagccatcaacatctcacttagatgactgatgcaaaagcctcccaactggtctccctgcctccactctttgcccctacattctgttttaacgtagctacctgagtgatccttta

SEQ ID NO: 340725 - DNA, 246 bp, Homo sapiens
cccaggggtggaatcaatactgaggatgacagagggacagatggaaagtcctccgtgacactcactatcaatcacattgcatctggagctcgccttgtctctggattcctggttacagggacaataactgttcttctggttaaaccagttgaatcagatgtttataaatggcagtcaaaagtatggacatgtctaggaagggctgaaactcttgcagtaacccagccaatcatctgtgatgtcatc

SEQ ID NO: 340726 - DNA, 411 bp, Homo sapiens
ctcctgggttcacaccattctcctgcctcagcctcccaagtagctgggactacaggcggctgccacgatgcatggctcatcttttgtatttttagtagagatgggatttctccacattggtcaggctggtctcgaactcctgaccttaggtgatctgcctacctcagcctcccaaagtgctgggattacaggtgtgagccactgtgcccggcccaagcatcacaatatttctataggtcaatgtagacttggtctgtgctgtgtaagggcttactttcctaagcatttaagtttatacactaaattttttttttttttttttttttgagatggagtctcactttgtcacacagactggagtatagtagtgtgatctcggctcattgcaacctccacctcacaggttcaagc

SEQ ID NO: 340727 - DNA, 405 bp, Homo sapiens
ggacatgtttatcttatgataatgcatcaagctgtacacttaagatctgtgcactttagtgtacgtatgtcagatttcaaagaaatgtttgctttcaaaacatctccacaaacacactctaggaacaaactgagttgtgctcccagtgggatctaaaagattcatccccacagttttaaaaacacgactttcaaggaataagttctagtgttccatcgtacggtaggatgactacagttaacaatcgtttattgtgtatttcaagacagctagaaaagaaaatatggaatgttcccaacacagagaaaggataaatgattgaggtggcggattaccccgattaccctgatttgatcattacacattgtatgcaggtatcaaaacagcccgtgtgtcccagaaata

SEQ ID NO: 340728 - DNA, 163 bp, Homo sapiens
ggcctcccaaagtgctgggattacaggcttgagcgaccgcacctggcccaaactgagtattttttagaggattctttttacctggtgaatagatgggtatgtgctcccccacttcatccacgtacacatatgagctgtacacatagatgttaatcaggttgct

SEQ ID NO: 340729 - DNA, 329 bp, Homo sapiens
gatgtattctggttaaagattcgtctgcgggagcagaggaagggcagggacaggggtctgggagctctactccatttgacattgctgcccgggtgtggcccgcttcggggtcagggggcacccttagaacctgtgcagggcaggaactgccaccatctgttggccacacatttctcagtgaacaaatgacttttggcatcagaaagccataacttcacacctaaacttccacgaggctgagctcttcctgcccctctgtgtgtgtacgtgtgtgtgtgtgtgtattgaggggacgcggctgctggccaccttctgtcggcacaggttgg

SEQ ID NO: 340730 - DNA, 314 bp, Homo sapiens
ctcactacagcctcgacctcccaggcttaagtgatcctctcatcccagcctcccaagaagctggaactacagatgcacaccatcatgcccagctaatttttgtattttttttgtagagatggagtttcgccatgttgcccaagctggtttcaaactcctgagctcaagccatccacctgcctgggcctcccaatctcctcaacttctaaaaagattttgaagtaaacaagaccaaagagtaagaaacatatatagctaagtttacaaataaggagagagagagaaaaaaaagttctattggcaaataaacagta

SEQ ID NO: 340731 - DNA, 478 bp, Homo sapiens
aaccaaaaccacaccgatgattcagcccctgccaggtgagagcagcatctgggtcacaaacaaactgaggccgtgaagactccaccccgactccctctatttaaaaattcctctacaagaaacaggaatggctgtttccttcacctcctagaaggcaacatagtaaactgacaacagatggaaagaaaggcatatttttgtccattaactttccaagggttttggctttgttcagatatttgcatcacaaattccctttgctttctccctggttcctccagagaactctccagtgatcaaggtctccagcaaatgacagcaactctgtatcagtgggatgcacttttgcttttaaagctacgctaggttctcatcaatactccttggatctcaagcctcagcaacagactcagcactgaagacactgggtcgcagcgcccgcagcctggactgaagccctggctttgctccttatcgt

SEQ ID NO: 340732 - DNA, 591 bp, Homo sapiens
aaagggcaaggtcaaatgaggtatcattttttaaatggcatgagttttaaaattatgtaagtttaaacaaatagatcctcataaaaggccataaggaaaattctgagagctatttcacacagtcatgtaattatctgatggaaatgttttacctagagaagagctgggtgaagttgagatttccacatatacttgtcattggaatatacactggttcatgtgtgagaacgtgtggttcttcctccctaattctccagggaaaggatgctactaaaatttccgactacttttctttctttaaacttccttgagattcttttatttttttatttttttttgagagagagtctcactccatcgcccaggctggagtgcaatggcgtgatcgcagctcactgcaagctccatctcccgggttcaagcgattctcctgcctcagcctcccaagtagctggaattacaggcagccgccaccatgcccagctaattttttttttttaagtagagaggggcttgtatggggggcaagttcatctgagaatgtattcatggcataggtgggtggaagtcctggtaagattacttatactg

SEQ ID NO: 340733 - DNA, 220 bp, Homo sapiens
tgcagactctggacttgccaagccaccaccatctcagccagctccttaaaatacacctcccttctgcctctcttctcaccttcaaccccacctctctctctgcatccctccctctctctgtgcatctctctctctgcatccctcccctccctctctctctgcatccctccctctctctgcatccctccctctctctgtgcatctctctctctctgcatcc

SEQ ID NO: 340734 - DNA, 117 bp, Homo sapiens
atgataaggacaggcccgagttgtgaagaaagatgttatgtttggttaaattaaggcagaatatggcatagaaatctttttgtgatatttccattgtaaaagtgtagttttaaaacc

SEQ ID NO: 340735 - DNA, 109 bp, Homo sapiens
ccttcctcagtctaaacaaatgggggaggataacatgcccttccattaacacacccccagtaatcagggagaacagacaaataaacatgaaatgacaattactattatt

SEQ ID NO: 340736 - DNA, 564 bp, Homo sapiens
catgtaagacataactttgctcctcattctccttctgtcatgattgtgaggcctccctagccatgtagaactgtgagtgaattaaacctgtttcctttataaattacccagtcttgggtatgtctttattagcagcatgagagaagactaatacaggtaggttatgttatttgattttttagtattaaaaatcctctcattgcaaggacaaatcttactttgtttgggtgtgtaattctcttggtatcaagataatattaacctcacaaaatgagctgggaagtaaccttctttcacatttcagaagagtttgtggagaattggtattaattcctcttcagatagttgttagaatttaccagtgaagctatctggccctgggttcagattaactttgtgggtagtcttttaaaaactactaatttagtcattttacttgttataggtctactctgattatctgtttcttctcaagtcaatgtttcttctcaaatcaaaaatgtttgtctttttatttaataatttcttgcttatcttagttgttgtgctagtattcatcagtga

SEQ ID NO: 340737 - DNA, 431 bp, Homo sapiens
cccagtgggcagtgactaggaactttgcatggctggagtctaatagggcctgagtctgttcctctgctggttccaaagaggcgttgtttttttgttttgagatggagtctcactctgtcgcccaggctggagtgcagtggctcgatctcggctcactgcaacctccctttcccgagctcagttcaagcaattctcctgcctcagcctcccgagtagctggaattacaggtgtgcgccaccacgcccggctaatttttttttgtatttttagtagagaggtattttgtcaggttgtccaggctggtctccaactcctgacctcaggtgatctgcccgcctcggcctccgtgggattacaggcgtgagccaccgcgcccagccaccaaagaggttttgatttaacccgaggtggggcaggccaacgctagata

SEQ ID NO: 340738 - DNA, 399 bp, Homo sapiens
cctcctgcttttgcaaatacagtttaaaggaacccggacagggcatagtggctctcctctgtaatcccagcactttaggaggctgaggccaggagtttgagatcagcacgggcaacacagcaagacaattaagatttgacgcttacatttttctcctcaagggtggggaaaatagtccctaacctcacgaactgaagcatgcaggggccaccacccaagggcttttgcaaaggttaggttttctgttagggtcttgggaaatctttaagaatgtcaattccttgggaatagcttattttaagggatttggacatggaaaggtctgtttgggatggtttgctcttgtaaagtctttggggatatttgtcatcatggcatctttgatgggcttttctggag

SEQ ID NO: 340739 - DNA, 301 bp, Homo sapiens
agatgaaggtgacgatgaggacagaagtagagagaaaaaagtgagatagatggaataggattgaggaggaggactggcaaaatgatgagtgatggaataggattgaggaaggggactggcaaaatgatgagtgatggaataggactgaggaagaggacgggcaaaatgatgagtgtaggtgatggaaatgtgaggactcattacaatattccctataccctcatacatgtttttaaattcccctgatcgagtgtgtgtgtgtgtgtataaccattgcctaaaaaaatttctcataaaaatc

SEQ ID NO: 340740 - DNA, 238 bp, Homo sapiens
tttctatgtttgccaattctagtaccatatggaactggagtcagtcaatactcgttcttcatttctagcttccttgacttcggattttcaagggtcgttcatattgcagtatggatcagaatttcattccttttttttttttgagatggagtctcactctgtcacccaggctggagtgcagtggcgcgatctcagctcactacaacctctgccttccaggttcaagcagcctcagcct

SEQ ID NO: 340741 - DNA, 223 bp, Homo sapiens
gtcagctagcagaggaagggaagactattctaggcctaatttaggcttaaaattgatatgtatctgaggaaataaaaatctaacagacttttcctcataaacagtagggagccaggagtttaaaaggaaggtattaacaaaacaaggccaaatccaggtttcagaaaaatatctctgtgctatcatggaaaacaaagttttgttacttttttttttttttttt

SEQ ID NO: 340742 - DNA, 1160 bp, Homo sapiens
  misc_feature (2)..(2): n is a, c, g, or t
  misc_feature (5)..(5): n is a, c, g, or t
  misc_feature (1041)..(1041): n is a, c, g, or t
gncanagcaggaagtgtttgaggaagtcgcgccgcgctgcccgcgttaagattcccgcattttaatgttttcaggggggtgtcatagccccgggtttggccgccccagccccgccttccccgccccggggagcccgccccctgccccgcgtccctgccgacagagttagcacgacatcagtatgagctggtcaccttccctgacaacgcagacatgtggggcctgggaaatgaaagagcgccttgggacagggggatttggaaatgtcatccgatggcacaatcaggaaacaggtgagcagattgccatcaagcagtgccggcaggagctcagcccccggaaccgagagcggtggtgcctggagatccagatcatgagaaggctgacccaccccaatgtggtggctgcccgagatgtccctgaggggatgcagaacttggcgcccaatgacctgcccctgctggccatggagtactgccaaggaggagatctccggaagtacctgaaccagtttgagaactgctgtggtctgcgggaaggtgccatcctcaccttgctgagtgacattgcctctgcgcttagataccttcatgaaaacagaatcatccatcgggatctaaagccagaaaacatcgtcctgcagcaaggagaacagaggttaatacacaaaattattgacctaggatatgccaaggagctggatcagggcagtctttgcacatcattcgtggggaccctgcagtacctggccccagagctactggagcagcagaagtacacagtgaccgtcgactactggagcttcggcaccctggcctttgagtgcatcacgggcttccggcccttcctccccaactggcagcccgtgcagtgcgtaagaatgtggccgggtacagtggctcactcctgtaatcccagcactttgggaggccgaggcaggtggatcagttgaggccagcagttccagaccagcctggccaacatggcaaaaccctgtctctactaaaaaccctagccaggtgtggtggcgggcgcctgtantcccagctactcggaaggctgaggtgggagaattgcttaaacccaggaggcagaggtcgcatcactgcaatccagcctgggcgacagagtgagactctgtctcaaaacaaaaaaagttt

SEQ ID NO: 340743 - DNA, 1038 bp, Homo sapiens
aaaatatgaaggcaaaggaaatacatgtgacttaatgaacctcacacaaactgaaggttgaagtcaggctccggggctttttcctggacttatcctctgttttcccctgtgtacttgggcaaggatcttcacctgtgtcttagtatcgatttttatgaatcagtactgatggagtatatgtgtgtttaatggtgaatattaaccatagaagggctgagtgctcctccccatcttgggactcataatctgtgaaataaaacagtctgggcctccctgcccgggtagcatcaggatagacagatgaagagaagagaaagtaatgtgtcttgggcatcttctgtatgccaggcaccatgccagaggctttaagtacttcatcttacttgactcctcagatggccctgttagaagcctattttatgcaaaaggaaactgtagctgggggtaagtaacttgccaaggggtcacacagctagaaagcggtggaccctagatgcaggcgcagccattcagaccccacagtccacattcctttgagccagtccattgagggtcctcagggaatgtggcgggtcccctggtctcgctcccccgcagatcttgcatctcagcatgcgcctaccacatcagttgacattagcacagcttttccattaggagaacgaagtgaaactcctggtagaacggatgatggctctgcagaccgacattgtggacttacagaggagccccatgggccggaagcaggggggaacgctggacgacctgtgagtactggctggggggcccctctgtgcccagcacacacagacagccctggagcttcggtgtgtgtgtcaagggcaccctcagtggctgtgcgggaccattctctagagcatgcttccctgtggggtcacttccagcaaatcatcactgagcttcagtttccaaatctgttcagtgacaagaaaaacagtcttaagtcacgaagttgtaaggatgaattcagataatgcatttgagacgcaggccataatctgtaaaggctgtaaaatg

SEQ ID NO: 340744 - DNA, 503 bp, Homo sapiens
  misc_feature (2)..(2): n is a, c, g, or t
  misc_feature (5)..(5): n is a, c, g, or t
gncanagcaggaagtgtttgaggaagtcgcgccgcgctgcccgcgttaagattcccgcattttaatgttttcaggggggtgtcatagccccgggtttggccgccccagccccgccttccccgccccggggagcccgccccctgccccgcgtccctgccgacagagttagcacgacatcagtatgagctggtcaccttccctgacaacgcagacatgtggggcctgggaaatgaaagagcgccttgggacagggggatttggaaatgtcatccgatggcacaatcaggtaggccctctgtgcagcttggggaggggcggggagccaggccccctcctcactgcctccactttctctgatcctgctgggccaagggctcacctttggctttggtcatcttgggacagtgaatagggggactgggaagagggcttcaggacttctgagctgactccaggttagtggtctccatgctttattgactatgtcacctaaataaatagta

SEQ ID NO: 340745 - DNA, 3923 bp, Homo sapiens
  misc_feature (2)..(2): n is a, c, g, or t
  misc_feature (5)..(5): n is a, c, g, or t
gncanagcaggaagtgtttgaggaagtcgcgccgcgctgcccgcgttaagattcccgcattttaatgttttcaggggggtgtcatagccccgggtttggccgccccagccccgccttccccgccccggggagcccgccccctgccccgcgtccctgccgacagagttagcacgacatcagtatgagctggtcaccttccctgacaacgcagacatgtggggcctgggaaatgaaagagcgccttgggacagggggatttggaaatgtcatccgatggcacaatcaggaaacaggtgagcagattgccatcaagcagtgccggcaggagctcagcccccggaaccgagagcggtggtgcctggagatccagatcatgagaaggctgacccaccccaatgtggtggctgcccgagatgtccctgaggggatgcagaacttggcgcccaatgacctgcccctgctggccatggagtactgccaaggaggagatctccggaagtacctgaaccagtttgagaactgctgtggtctgcgggaaggtgccatcctcaccttgctgagtgacattgcctctgcgcttagataccttcatgaaaacagaatcatccatcgggatctaaagccagaaaacatcgtcctgcagcaaggagaacagaggttaatacacaaaattattgacctaggatatgccaaggagctggatcagggcagtctttgcacatcattcgtggggaccctgcagtacctggccccagagctactggagcagcagaagtacacagtgaccgtcgactactggagcttcggcaccctggcctttgagtgcatcacgggcttccggcccttcctccccaactggcagcccgtgcagtggcattcaaaagtgcggcagaagagtgaggtggacattgttgttagcgaagacttgaatggaacggtgaagttttcaagctctttaccctaccccaataatcttaacagtgtcctggctgagcgactggagaagtggctgcaactgatgctgatgtggcacccccgacagaggggcacggatcccacgtatgggcccaatggctgcttcaaggccctggatgacatcttaaacttaaagctggttcatatcttgaacatggtcacgggcaccatccacacctaccctgtgacagaggatgagagtctgcagagcttgaaggccagaatccaacaggacacgggcatcccagaggaggaccaggagctgctgcaggaagcgggcctggcgttgatccccgataagcctgccactcagtgtatttcagacggcaagttaaatgagggccacacattggacatggatcttgtttttctctttgacaacagtaaaatcacctatgagactcagatctccccacggccccaacctgaaagtgtcagctgtatccttcaagagcccaagaggaatctcgccttcttccagctgaggaaggtgtggggccaggtctggcacagcatccagaccctgaaggaagattgcaaccggctgcagcagggacagcgagccgccatgatgaatctcctccgaaacaacagctgcctctccaaaatgaagaattccatggcttccatgtctcagcagctcaaggccaagttggatttcttcaaaaccagcatccagattgacctggagaagtacagcgagcaaaccgagtttgggatcacatcagataaactgctgctggcctggagggaaatggagcaggctgtggagctctgtgggcgggagaacgaagtgaaactcctggtagaacggatgatggctctgcagaccgacattgtggacttacagaggagccccatgggccggaagcaggggggaacgctggacgacctagaggagcaagcaagggagctgtacaggagactaagggaaaaacctcgagaccagcgaactgagggtgacagtcaggaaatggtacggctgctgcttcaggcaattcagagcttcgagaagaaagtgcgagtgatctatacgcagctcagtaaaactgtggtttgcaagcagaaggcgctggaactgttgcccaaggtggaagaggtggtgagcttaatgaatgaggatgagaagactgttgtccggctgcaggagaagcggcagaaggagctctggaatctcctgaagattgcttgtagcaaggtccgtggtcctgtcagtggaagcccggatagcatgaatgcctctcgacttagccagcctgggcagctgatgtctcagccctccacggcctccaacagcttacctgagccagccaagaagagtgaagaactggtggctgaagcacataacctctgcaccctgctagaaaatgccatacaggacactgtgagggaacaagaccagagtttcacggccctagactggagctggttacagacggaagaagaagagcacagctgcctggagcaggcctcatgatgtggggggactcgaccccctgacatggggcagcccatagcaggccttgtgcggtggggggactcgaccccctgacatggggctgcctggagcaggccgcgtgacgtggggctgcctggccgcggctctcacatggtggttcctgctgcactgatggcccaggggtctctggtatccagatggagctctcgcttcctcagcagctgtgactttcacccaggacccaggacgcagccctccgtgggcactgccggcgccttgtctgcacactggaggtcctccattacagaggcccagcgcacatcgctggccccacaaacgttcaggggtacagccatggcagctccttcctctgccgtgagaaaagtgcttggagtacggtttgccacacacgtgactggacagtgtccaattcaaatctttcagggcagagtccgagcagcgcttggtgacagcctgtcctctcctgctctccaaaggccctgctccctgtcctctctcactttacagcttgtgtttcttctggattcagcttctcctaaacagacagtttaattatagttgcggcctggccccatcctcacttcctctttttatttcactgctgctaaaattgtgtttttacctactactttggtggttgtcctcttttcggcaaagttggagcgagtgccaagctctccatctgtggtcctttctgccaagagcgactcatagtaaccaggatgggagagcagctgccttattctgaatcccaaaaattacttgggggtgattgtcacagaggagggacagaaagggtatctgctgaccaccagcctgcctacccatgcccatgtctccattcctgctcaagcgtgtgtgctgggccggggagtccctgtctctcacagcatctagcagtattattaaatggattcattttaaaaatagctcctatattttgtaacatgtctcaaacactcatactgggttccacaatccactgttagaatacctatggttagggcttctgaactaaaataatggaaaattttaacaatttgtatagtgcctggatcattactagtgccataaccctgcttcttcaacatttcacagaacttctcttttatataaaggcaagagcacaaaatgagttcagatgatcacaaacaggtgagttttgttggagaagaaagttggagtaggagactttcacaagtggtttccatggagatagaatgaagcattctgtggtcaagtaagtttagggagctattcatgtttcacttgctttgtggagattcacactatgcactgggaaagtatctgaaaagtcttataataaagaaacaggcttaactttgtgtaagaacactgtttatcaatgtcatttggctatagaaacattttctcctgctgattgtgtgtgtgaaacatgtattaacattccaatgaactagcatttaataaagcacaattttggaaa

SEQ ID NO: 340746 - DNA, 4137 bp, Homo sapiens
  misc_feature (2)..(2): n is a, c, g, or t
  misc_feature (5)..(5): n is a, c, g, or t
gncanagcaggaagtgtttgaggaagtcgcgccgcgctgcccgcgttaagattcccgcattttaatgttttcaggggggtgtcatagccccgggtttggccgccccagccccgccttccccgccccggggagcccgccccctgccccgcgtccctgccgacagagttagcacgacatcagtatgagctggtcaccttccctgacaacgcagacatgtggggcctgggaaatgaaagagcgccttgggacagggggatttggaaatgtcatccgatggcacaatcaggaaacaggtgagcagattgccatcaagcagtgccggcaggagctcagcccccggaaccgagagcggtggtgcctggagatccagatcatgagaaggctgacccaccccaatgtggtggctgcccgagatgtccctgaggggatgcagaacttggcgcccaatgacctgcccctgctggccatggagtactgccaaggaggagatctccggaagtacctgaaccagtttgagaactgctgtggtctgcgggaaggtgccatcctcaccttgctgagtgacattgcctctgcgcttagataccttcatgaaaacagaatcatccatcgggatctaaagccagaaaacatcgtcctgcagcaaggagaacagaggttaatacacaaaattattgacctaggatatgccaaggagctggatcagggcagtctttgcacatcattcgtggggaccctgcagtacctggccccagagctactggagcagcagaagtacacagtgaccgtcgactactggagcttcggcaccctggcctttgagtgcatcacgggcttccggcccttcctccccaactggcagcccgtgcagtggcattcaaaagtgcggcagaagagtgaggtggacattgttgttagcgaagacttgaatggaacggtgaagttttcaagctctttaccctaccccaataatcttaacagtgtcctggctgagcgactggagaagtggctgcaactgatgctgatgtggcacccccgacagaggggcacggatcccacgtatgggcccaatggctgcttcaaggccctggatgacatcttaaacttaaagctggttcatatcttgaacatggtcacgggcaccatccacacctaccctgtgacagaggatgagagtctgcagagcttgaaggccagaatccaacaggacacgggcatcccagaggaggaccaggagctgctgcaggaagcgggcctggcgttgatccccgataagcctgccactcagtgtatttcagacggcaagttaaatgagggccacacattggacatggatcttgtttttctctttgacaacagtaaaatcacctatgagactcagatctccccacggccccaacctgaaagtgtcagctgtatccttcaagagcccaagaggaatctcgccttcttccagctgaggaaggtgtggggccaggtctggcacagcatccagaccctgaaggaagattgcaaccggctgcagcagggacagcgagccgccatgatgaatctcctccgaaacaacagctgcctctccaaaatgaagaattccatggcttccatgtctcagcagctcaaggccaagttggatttcttcaaaaccagcatccagattgacctggagaagtacagcgagcaaaccgagtttgggatcacatcagataaactgctgctggcctggagggaaatggagcaggctgtggagctctgtgggcgggagaacgaagtgaaactcctggtagaacggatgatggctctgcagaccgacattgtggacttacagaggagccccatgggccggaagcaggggggaacgctggacgacctagaggagcaagcaagggagctgtacaggagactaagggaaaaacctcgagaccagcgaactgagggtgacagtcaggaaatggtacggctgctgcttcaggcaattcagagcttcgagaagaaagtgcgagtgatctatacgcagctcagtaaaactgtggtttgcaagcagaaggcgctggaactgttgcccaaggtggaagaggtggtgagcttaatgaatgaggatgagaagactgttgtccggctgcaggagaagcggcagaaggagctctggaatctcctgaagattgcttgtagcaaggtccgtggtcctgtcagtggaagcccggatagcatgaatgcctctcgacttagccagcctgggcagctgatgtctcagccctccacggcctccaacagcttacctgagccagccaagaagagtgaagaactggtggctgaagcacataacctctgcaccctgctagaaaatgccatacaggacactgtgagggaacaagaccagagtttcacggccctagactggagctggttacagacggaagaagaagagcacagctgcctggagcaggcctcatgatgtggggggactcgaccccctgacatggggcagcccatagcaggccttgtgcggtggggggactcgaccccctgacatggggctgcctggagcaggccgcgtgacgtggggctgcctggccgcggctctcacatggtggttcctgctgcactgatggcccaggggtctctggtatccagatggagctctcgcttcctcagcagctgtgactttcacccaggacccaggacgcagccctccgtgggcactgccggcgccttgtctgcacactggaggtcctccattacagaggcccagcgcacatcgctggccccacaaacgttcaggggtacagccatggcagctccttcctctgccgtgagaaaagtgcttggagtacggtttgccacacacgtgactggacagtgtccaattcaaatctttcagggcagagtccgagcagcgcttggtgacagcctgtcctctcctgctctccaaaggccctgctccctgtcctctctcactttacagcttgtgtttcttctggattcagcttctcctaaacagacagtttaattatagttgcggcctggccccatcctcacttcctctttttatttcactgctgctaaaattgtgtttttacctactactttggtggttgtcctcttttcggcaaagttggagcgagtgccaagctctccatctgtggtcctttctgccaagagcgactcatagtaaccaggatgggagagcagctgccttattctgaatcccaaaaattacttgggggtgattgtcacagaggagggacagaaagggtatctgctgaccaccagcctgcctacccatgcccatgtctccattcctgctcaagcgtgtgtgctgggccggggagtccctgtctctcacagcatctagcagtattattaaatggattcattttaaaaatagctcctatattttgtaacatgtctcaaacactcatactgggttccacaatccactgttagaatacctatggttagggcttctgaactaaaataatggaaaattttaacaatttgtatagtgcctggatcattactagtgccataaccctgcttcttcaacatttcacagaacttctcttttatataaaggcaagagcacaaaatgagttcagatgatcacaaacaggtgagttttgttggagaagaaagttggagtaggagactttcacaagtggtttccatggagatagaatgaagcattctgtggtcaagtaagtttagggagctattcatgtttcacttgctttgtggagattcacactatgcactgggaaagtatctgaaaagtcttataataaagaaacaggcttaactttgtgtaagaacactgtttatcaatgtcatttggctatagaaacattttctcctgctgattgtgtgtgtgaaacatgtattaacattccaatgaactagcatttaataaagcacaattttggaaaccctggtaaatgacagtgggaaataacacccgaaaggcaaggacgggcagattggggagggaaaggatgttgggctaagggctgtgagcttatgttacaggcaactgagccactgaagaattttgacgaagaaaatgccaaccaaagcagtcattttaaaagtttatggctgttcagttacaggacaagttgtgaaaagaaagaaaaaaaatgg

SEQ ID NO: 340747 - DNA, 3828 bp, Homo sapiens
  misc_feature (2)..(2): n is a, c, g, or t
  misc_feature (5)..(5): n is a, c, g, or t
gncanagcaggaagtgtttgaggaagtcgcgccgcgctgcccgcgttaagattcccgcattttaatgttttcaggggggtgtcatagccccgggtttggccgccccagccccgccttccccgccccggggagcccgccccctgccccgcgtccctgccgacagagttagcacgacatcagtatgagctggtcaccttccctgacaacgcagacatgtggggcctgggaaatgaaagagcgccttgggacagggggatttggaaatgtcatccgatggcacaatcaggctgacccaccccaatgtggtggctgcccgagatgtccctgaggggatgcagaacttggcgcccaatgacctgcccctgctggccatggagtactgccaaggaggagatctccggaagtacctgaaccagtttgagaactgctgtggtctgcgggaaggtgccatcctcaccttgctgagtgacattgcctctgcgcttagataccttcatgaaaacagaatcatccatcgggatctaaagccagaaaacatcgtcctgcagcaaggagaacagaggttaatacacaaaattattgacctaggatatgccaaggagctggatcagggcagtctttgcacatcattcgtggggaccctgcagtacctggccccagagctactggagcagcagaagtacacagtgaccgtcgactactggagcttcggcaccctggcctttgagtgcatcacgggcttccggcccttcctccccaactggcagcccgtgcagtggcattcaaaagtgcggcagaagagtgaggtggacattgttgttagcgaagacttgaatggaacggtgaagttttcaagctctttaccctaccccaataatcttaacagtgtcctggctgagcgactggagaagtggctgcaactgatgctgatgtggcacccccgacagaggggcacggatcccacgtatgggcccaatggctgcttcaaggccctggatgacatcttaaacttaaagctggttcatatcttgaacatggtcacgggcaccatccacacctaccctgtgacagaggatgagagtctgcagagcttgaaggccagaatccaacaggacacgggcatcccagaggaggaccaggagctgctgcaggaagcgggcctggcgttgatccccgataagcctgccactcagtgtatttcagacggcaagttaaatgagggccacacattggacatggatcttgtttttctctttgacaacagtaaaatcacctatgagactcagatctccccacggccccaacctgaaagtgtcagctgtatccttcaagagcccaagaggaatctcgccttcttccagctgaggaaggtgtggggccaggtctggcacagcatccagaccctgaaggaagattgcaaccggctgcagcagggacagcgagccgccatgatgaatctcctccgaaacaacagctgcctctccaaaatgaagaattccatggcttccatgtctcagcagctcaaggccaagttggatttcttcaaaaccagcatccagattgacctggagaagtacagcgagcaaaccgagtttgggatcacatcagataaactgctgctggcctggagggaaatggagcaggctgtggagctctgtgggcgggagaacgaagtgaaactcctggtagaacggatgatggctctgcagaccgacattgtggacttacagaggagccccatgggccggaagcaggggggaacgctggacgacctagaggagcaagcaagggagctgtacaggagactaagggaaaaacctcgagaccagcgaactgagggtgacagtcaggaaatggtacggctgctgcttcaggcaattcagagcttcgagaagaaagtgcgagtgatctatacgcagctcagtaaaactgtggtttgcaagcagaaggcgctggaactgttgcccaaggtggaagaggtggtgagcttaatgaatgaggatgagaagactgttgtccggctgcaggagaagcggcagaaggagctctggaatctcctgaagattgcttgtagcaaggtccgtggtcctgtcagtggaagcccggatagcatgaatgcctctcgacttagccagcctgggcagctgatgtctcagccctccacggcctccaacagcttacctgagccagccaagaagagtgaagaactggtggctgaagcacataacctctgcaccctgctagaaaatgccatacaggacactgtgagggaacaagaccagagtttcacggccctagactggagctggttacagacggaagaagaagagcacagctgcctggagcaggcctcatgatgtggggggactcgaccccctgacatggggcagcccatagcaggccttgtgcggtggggggactcgaccccctgacatggggctgcctggagcaggccgcgtgacgtggggctgcctggccgcggctctcacatggtggttcctgctgcactgatggcccaggggtctctggtatccagatggagctctcgcttcctcagcagctgtgactttcacccaggacccaggacgcagccctccgtgggcactgccggcgccttgtctgcacactggaggtcctccattacagaggcccagcgcacatcgctggccccacaaacgttcaggggtacagccatggcagctccttcctctgccgtgagaaaagtgcttggagtacggtttgccacacacgtgactggacagtgtccaattcaaatctttcagggcagagtccgagcagcgcttggtgacagcctgtcctctcctgctctccaaaggccctgctccctgtcctctctcactttacagcttgtgtttcttctggattcagcttctcctaaacagacagtttaattatagttgcggcctggccccatcctcacttcctctttttatttcactgctgctaaaattgtgtttttacctactactttggtggttgtcctcttttcggcaaagttggagcgagtgccaagctctccatctgtggtcctttctgccaagagcgactcatagtaaccaggatgggagagcagctgccttattctgaatcccaaaaattacttgggggtgattgtcacagaggagggacagaaagggtatctgctgaccaccagcctgcctacccatgcccatgtctccattcctgctcaagcgtgtgtgctgggccggggagtccctgtctctcacagcatctagcagtattattaaatggattcattttaaaaatagctcctatattttgtaacatgtctcaaacactcatactgggttccacaatccactgttagaatacctatggttagggcttctgaactaaaataatggaaaattttaacaatttgtatagtgcctggatcattactagtgccataaccctgcttcttcaacatttcacagaacttctcttttatataaaggcaagagcacaaaatgagttcagatgatcacaaacaggtgagttttgttggagaagaaagttggagtaggagactttcacaagtggtttccatggagatagaatgaagcattctgtggtcaagtaagtttagggagctattcatgtttcacttgctttgtggagattcacactatgcactgggaaagtatctgaaaagtcttataataaagaaacaggcttaactttgtgtaagaacactgtttatcaatgtcatttggctatagaaacattttctcctgctgattgtgtgtgtgaaacatgtattaacattccaatgaactagcatttaataaagcacaattttggaaa

SEQ ID NO: 340748 - DNA, 2544 bp, Homo sapiens
cagtgttccctgattctctcactaggattcttaggacaggagctccaaatgtcagaactttgattctgtattttctctaattaaccctttattctcctctagttcttttatttgtatttgtattatttttttaagagacagggtcttgccctgttgccaatgctggagtgcagtggcacaatcatagctcactgcagcctcgacctcccaggcttatgcagtcctcccatctcagcctcccaagtaaccgggactacaggcgcatgccaccatgctcagctaatttaaaaaaaaaatgtttttggctgggcacagtggatcacatctgtaatcccagcaccttgggatgccaaggcaagaagattgcttgtgagcccagaagttcgagaccagcctgggcaacatggtgaaactctacctctaccaaaaaaatgtaaaaattagccatatttgacctcaagtctagacagaacttctttgtatattttagagaggagcaagcaagggagctgtacaggagactaagggaaaaacctcgagaccagcgaactgagggtgacagtcaggaaatggtacggctgctgcttcaggcaattcagagcttcgagaagaaagtgcgagtgatctatacgcagctcagtaaaactgtggtttgcaagcagaaggcgctggaactgttgcccaaggtggaagaggtggtgagcttaatgaatgaggatgagaagactgttgtccggctgcaggagaagcggcagaaggagctctggaatctcctgaagattgcttgtagcaaggtccgtggtcctgtcagtggaagcccggatagcatgaatgcctctcgacttagccagcctgggcagctgatgtctcagccctccacggcctccaacagcttacctgagccagccaagaagagtgaagaactggtggctgaagcacataacctctgcaccctgctagaaaatgccatacaggacactgtgagggaacaagaccagagtttcacggccctagactggagctggttacagacggaagaagaagagcacagctgcctggagcaggcctcatgatgtggggggactcgaccccctgacatggggcagcccatagcaggccttgtgcggtggggggactcgaccccctgacatggggctgcctggagcaggccgcgtgacgtggggctgcctggccgcggctctcacatggtggttcctgctgcactgatggcccaggggtctctggtatccagatggagctctcgcttcctcagcagctgtgactttcacccaggacccaggacgcagccctccgtgggcactgccggcgccttgtctgcacactggaggtcctccattacagaggcccagcgcacatcgctggccccacaaacgttcaggggtacagccatggcagctccttcctctgccgtgagaaaagtgcttggagtacggtttgccacacacgtgactggacagtgtccaattcaaatctttcagggcagagtccgagcagcgcttggtgacagcctgtcctctcctgctctccaaaggccctgctccctgtcctctctcactttacagcttgtgtttcttctggattcagcttctcctaaacagacagtttaattatagttgcggcctggccccatcctcacttcctctttttatttcactgctgctaaaattgtgtttttacctactactttggtggttgtcctcttttcggcaaagttggagcgagtgccaagctctccatctgtggtcctttctgccaagagcgactcatagtaaccaggatgggagagcagctgccttattctgaatcccaaaaattacttgggggtgattgtcacagaggagggacagaaagggtatctgctgaccaccagcctgcctacccatgcccatgtctccattcctgctcaagcgtgtgtgctgggccggggagtccctgtctctcacagcatctagcagtattattaaatggattcattttaaaaatagctcctatattttgtaacatgtctcaaacactcatactgggttccacaatccactgttagaatacctatggttagggcttctgaactaaaataatggaaaattttaacaatttgtatagtgcctggatcattactagtgccataaccctgcttcttcaacatttcacagaacttctcttttatataaaggcaagagcacaaaatgagttcagatgatcacaaacaggtgagttttgttggagaagaaagttggagtaggagactttcacaagtggtttccatggagatagaatgaagcattctgtggtcaagtaagtttagggagctattcatgtttcacttgctttgtggagattcacactatgcactgggaaagtatctgaaaagtcttataataaagaaacaggcttaactttgtgtaagaacactgtttatcaatgtcatttggctatagaaacattttctcctgctgattgtgtgtgtgaaacatgtattaacattccaatgaactagcatttaataaagcacaattttggaaa

SEQ ID NO: 340749 - DNA, 2252 bp, Homo sapiens
atcactactctctgctggcttccttgaggaactatgctaccctccctctctccagaccagcgaactgagggtgacagtcaggaaatggtacggctgctgcttcaggcaattcagagcttcgagaagaaagtgcgagtgatctatacgcagctcaggtatgagccccgaccttcctgctctggaggaaggactgggagatgcaggtatgaggtcaccttcctccctcctctctgattcgctggacctcatgaagagagtttctgcagctgctgactggatgcacagctgccacaggttctgctttctccagcccaaatgccattagtttgccatgtttattctttgcagtaaaactgtggtttgcaagcagaaggcgctggaactgttgcccaaggtggaagaggtggtgagcttaatgaatgaggatgagaagactgttgtccggctgcaggagaagcggcagaaggagctctggaatctcctgaagattgcttgtagcaaggtccgtggtcctgtcagtggaagcccggatagcatgaatgcctctcgacttagccagcctgggcagctgatgtctcagccctccacggcctccaacagcttacctgagccagccaagaagagtgaagaactggtggctgaagcacataacctctgcaccctgctagaaaatgccatacaggacactgtgagggaacaagaccagagtttcacggccctagactggagctggttacagacggaagaagaagagcacagctgcctggagcaggcctcatgatgtggggggactcgaccccctgacatggggcagcccatagcaggccttgtgcggtggggggactcgaccccctgacatggggctgcctggagcaggccgcgtgacgtggggctgcctggccgcggctctcacatggtggttcctgctgcactgatggcccaggggtctctggtatccagatggagctctcgcttcctcagcagctgtgactttcacccaggacccaggacgcagccctccgtgggcactgccggcgccttgtctgcacactggaggtcctccattacagaggcccagcgcacatcgctggccccacaaacgttcaggggtacagccatggcagctccttcctctgccgtgagaaaagtgcttggagtacggtttgccacacacgtgactggacagtgtccaattcaaatctttcagggcagagtccgagcagcgcttggtgacagcctgtcctctcctgctctccaaaggccctgctccctgtcctctctcactttacagcttgtgtttcttctggattcagcttctcctaaacagacagtttaattatagttgcggcctggccccatcctcacttcctctttttatttcactgctgctaaaattgtgtttttacctactactttggtggttgtcctcttttcggcaaagttggagcgagtgccaagctctccatctgtggtcctttctgccaagagcgactcatagtaaccaggatgggagagcagctgccttattctgaatcccaaaaattacttgggggtgattgtcacagaggagggacagaaagggtatctgctgaccaccagcctgcctacccatgcccatgtctccattcctgctcaagcgtgtgtgctgggccggggagtccctgtctctcacagcatctagcagtattattaaatggattcattttaaaaatagctcctatattttgtaacatgtctcaaacactcatactgggttccacaatccactgttagaatacctatggttagggcttctgaactaaaataatggaaaattttaacaatttgtatagtgcctggatcattactagtgccataaccctgcttcttcaacatttcacagaacttctcttttatataaaggcaagagcacaaaatgagttcagatgatcacaaacaggtgagttttgttggagaagaaagttggagtaggagactttcacaagtggtttccatggagatagaatgaagcattctgtggtcaagtaagtttagggagctattcatgtttcacttgctttgtggagattcacactatgcactgggaaagtatctgaaaagtcttataataaagaaacaggcttaactttgtgtaagaacactgtttatcaatgtcatttggctatagaaacattttctcctgctgattgtgtgtgtgaaacatgtattaacattccaatgaactagcatttaataaagcacaattttggaaa

SEQ ID NO: 340750 - DNA, 1775 bp, Homo sapiens
aattttgtatttttagtagaaatggggtttcaccattttggccaggctggtctcgaactcctgacctcatgatctgcccaccttggcctcccaaagtgttgggattataggcatgagccactgtgcctggctgggttttagtatatttctcaattgtcctgatttcctcctgaagaggaaaaataacctgaaatgtgttggtggctgttgtttttttaacatgtctgttgactttcaggccctagactggagctggttacagacggaagaagaagagcacagctgcctggagcaggcctcatgatgtggggggactcgaccccctgacatggggcagcccatagcaggccttgtgcggtggggggactcgaccccctgacatggggctgcctggagcaggccgcgtgacgtggggctgcctggccgcggctctcacatggtggttcctgctgcactgatggcccaggggtctctggtatccagatggagctctcgcttcctcagcagctgtgactttcacccaggacccaggacgcagccctccgtgggcactgccggcgccttgtctgcacactggaggtcctccattacagaggcccagcgcacatcgctggccccacaaacgttcaggggtacagccatggcagctccttcctctgccgtgagaaaagtgcttggagtacggtttgccacacacgtgactggacagtgtccaattcaaatctttcagggcagagtccgagcagcgcttggtgacagcctgtcctctcctgctctccaaaggccctgctccctgtcctctctcactttacagcttgtgtttcttctggattcagcttctcctaaacagacagtttaattatagttgcggcctggccccatcctcacttcctctttttatttcactgctgctaaaattgtgtttttacctactactttggtggttgtcctcttttcggcaaagttggagcgagtgccaagctctccatctgtggtcctttctgccaagagcgactcatagtaaccaggatgggagagcagctgccttattctgaatcccaaaaattacttgggggtgattgtcacagaggagggacagaaagggtatctgctgaccaccagcctgcctacccatgcccatgtctccattcctgctcaagcgtgtgtgctgggccggggagtccctgtctctcacagcatctagcagtattattaaatggattcattttaaaaatagctcctatattttgtaacatgtctcaaacactcatactgggttccacaatccactgttagaatacctatggttagggcttctgaactaaaataatggaaaattttaacaatttgtatagtgcctggatcattactagtgccataaccctgcttcttcaacatttcacagaacttctcttttatataaaggcaagagcacaaaatgagttcagatgatcacaaacaggtgagttttgttggagaagaaagttggagtaggagactttcacaagtggtttccatggagatagaatgaagcattctgtggtcaagtaagtttagggagctattcatgtttcacttgctttgtggagattcacactatgcactgggaaagtatctgaaaagtcttataataaagaaacaggcttaactttgtgtaagaacactgtttatcaatgtcatttggctatagaaacattttctcctgctgattgtgtgtgtgaaacatgtattaacattccaatgaactagcatttaataaagcacaattttggaaa

SEQ ID NO: 340751 - DNA, 1165 bp, Homo sapiens
cctggtaccggtcggagtgttgggatagccatggcagctccttcctctgccgtgagaaaagtgcttggagtacggtttgccacacacgtgactggacagtgtccaattcaaatctttcagggcagagtccgagcagcgcttggtgacagcctgtcctctcctgctctccaaaggccctgctccctgtcctctctcactttacagcttgtgtttcttctggattcagcttctcctaaacagacagtttaattatagttgcggcctggccccatcctcacttcctctttttatttcactgctgctaaaattgtgtttttacctactactttggtggttgtcctcttttcggcaaagttggagcgagtgccaagctctccatctgtggtcctttctgccaagagcgactcatagtaaccaggatgggagagcagctgccttattctgaatcccaaaaattacttgggggtgattgtcacagaggagggacagaaagggtatctgctgaccaccagcctgcctacccatgcccatgtctccattcctgctcaagcgtgtgtgctgggccggggagtccctgtctctcacagcatctagcagtattattaaatggattcattttaaaaatagctcctatattttgtaacatgtctcaaacactcatactgggttccacaatccactgttagaatacctatggttagggcttctgaactaaaataatggaaaattttaacaatttgtatagtgcctggatcattactagtgccataaccctgcttcttcaacatttcacagaacttctcttttatataaaggcaagagcacaaaatgagttcagatgatcacaaacaggtgagttttgttggagaagaaagttggagtaggagactttcacaagtggtttccatggagatagaatgaagcattctgtggtcaagtaagtttagggagctattcatgtttcacttgctttgtggagattcacactatgcactgggaaagtatctgaaaagtcttataataaagaaacaggcttaactttgtgtaagaacactgtttatcaatgtcatttggctatagaaacattttctcctgctgattgtgtgtgtgaaacatgtattaacattccaatgaactagcatttaataaagcacaattttggaaa

SEQ ID NO: 340752 - DNA, 2490 bp, Homo sapiens
  misc_feature (2)..(2): n is a, c, g, or t
  misc_feature (5)..(5): n is a, c, g, or t
gncanagcaggaagtgtttgaggaagtcgcgccgcgctgcccgcgttaagattcccgcattttaatgttttcaggggggtgtcatagccccgggtttggccgccccagccccgccttccccgccccggggagcccgccccctgccccgcgtccctgccgacagagttagcacgacatcagtatgagctggtcaccttccctgacaacgcagacatgtggggcctgggaaatgaaagagcgccttgggacagggggatttggaaatgtcatccgatggcacaatcaggaaacaggtgagcagattgccatcaagcagtgccggcaggagctcagcccccggaaccgagagcggtggtgcctggagatccagatcatgagaaggctgacccaccccaatgtggtggctgcccgagatgtccctgaggggatgcagaacttggcgcccaatgacctgcccctgctggccatggagtactgccaaggaggagatctccggaagtacctgaaccagtttgagaactgctgtggtctgcgggaaggtgccatcctcaccttgctgagtgacattgcctctgcgcttagataccttcatgaaaacagaatcatccatcgggatctaaagccagaaaacatcgtcctgcagcaaggagaacagaggttaatacacaaaattattgacctaggatatgccaaggagctggatcagggcagtctttgcacatcattcgtggggaccctgcagtacctggccccagagctactggagcagcagaagtacacagtgaccgtcgactactggagcttcggcaccctggcctttgagtgcatcacgggcttccggcccttcctccccaactggcagcccgtgcagtggcattcaaaagtgcggcagaagagtgaggtggacattgttgttagcgaagacttgaatggaacggtgaagttttcaagctctttaccctaccccaataatcttaacagtgtcctggctgagcgactggagaagtggctgcaactgatgctgatgtggcacccccgacagaggggcacggatcccacgtatgggcccaatggctgcttcaaggccctggatgacatcttaaacttaaagctggttcatatcttgaacatggtcacgggcaccatccacacctaccctgtgacagaggatgagagtctgcagagcttgaaggccagaatccaacaggacacgggcatcccagaggaggaccaggagctgctgcaggaagcgggcctggcgttgatccccgataagcctgccactcagtgtatttcagacggcaagttaaatgagggccacacattggacatggatcttgtttttctctttgacaacagtaaaatcacctatgagactcagatctccccacggccccaacctgaaagtgtcagctgtatccttcaagagcccaagaggaatctcgccttcttccagctgaggaaggtgtggggccaggtctggcacagcatccagaccctgaaggaagattgcaaccggctgcagcagggacagcgagccgccatgatgaatctcctccgaaacaacagctgcctctccaaaatgaagaattccatggcttccatgtctcagcagctcaaggccaagttggatttcttcaaaaccagcatccagattgacctggagaagtacagcgagcaaaccgagtttgggatcacatcagataaactgctgctggcctggagggaaatggagcaggctgtggagctctgtgggcgggagaacgaagtgaaactcctggtagaacggatgatggctctgcagaccgacattgtggacttacagaggagccccatgggccggaagcaggggggaacgctggacgacctagaggagcaagcaagggagctgtacaggagactaagggaaaaacctcgagaccagcgaactgagggtgacagtcaggaaatggtacggctgctgcttcaggcaattcagagcttcgagaagaaagtgcgagtgatctatacgcagctcagtaaaactgtggtttgcaagcagaaggcgctggaactgttgcccaaggtggaagaggtggtgagcttaatgaatgaggatgagaagactgttgtccggctgcaggagaagcggcagaaggagctctggaatctcctgaagattgcttgtagcaaggtccgtggtcctgtcagtggaagcccggatagcatgaatgcctctcgacttagccagcctgggcagctgatgtctcagccctccacggcctccaacagcttacctgagccagccaagaagagtgaagaactggtggctgaagcacataacctctgcaccctgctagaaaatgccatacaggacactgtgagggaacaagaccagagtttcacggtaacagcttgtgtgagactcctgcgattccatgtcctttctttctatggcaaaatagaagagaaaatggaaatgcaatctggcattatcctcaacctcaatgt

SEQ ID NO: 340753 - DNA, 2534 bp, Homo sapiens
  misc_feature (2)..(2): n is a, c, g, or t
  misc_feature (5)..(5): n is a, c, g, or t
gncanagcaggaagtgtttgaggaagtcgcgccgcgctgcccgcgttaagattcccgcattttaatgttttcaggggggtgtcatagccccgggtttggccgccccagccccgccttccccgccccggggagcccgccccctgccccgcgtccctgccgacagagttagcacgacatcagtatgagctggtcaccttccctgacaacgcagacatgtggggcctgggaaatgaaagagcgccttgggacagggggatttggaaatgtcatccgatggcacaatcaggaaacaggtgagcagattgccatcaagcagtgccggcaggagctcagcccccggaaccgagagcggtggtgcctggagatccagatcatgagaaggctgacccaccccaatgtggtggctgcccgagatgtccctgaggggatgcagaacttggcgcccaatgacctgcccctgctggccatggagtactgccaaggaggagatctccggaagtacctgaaccagtttgagaactgctgtggtctgcgggaaggtgccatcctcaccttgctgagtgacattgcctctgcgcttagataccttcatgaaaacagaatcatccatcgggatctaaagccagaaaacatcgtcctgcagcaaggagaacagaggttaatacacaaaattattgacctaggatatgccaaggagctggatcagggcagtctttgcacatcattcgtggggaccctgcagtacctggccccagagctactggagcagcagaagtacacagtgaccgtcgactactggagcttcggcaccctggcctttgagtgcatcacgggcttccggcccttcctccccaactggcagcccgtgcagtggcattcaaaagtgcggcagaagagtgaggtggacattgttgttagcgaagacttgaatggaacggtgaagttttcaagctctttaccctaccccaataatcttaacagtgtcctggctgagcgactggagaagtggctgcaactgatgctgatgtggcacccccgacagaggggcacggatcccacgtatgggcccaatggctgcttcaaggccctggatgacatcttaaacttaaagctggttcatatcttgaacatggtcacgggcaccatccacacctaccctgtgacagaggatgagagtctgcagagcttgaaggccagaatccaacaggacacgggcatcccagaggaggaccaggagctgctgcaggaagcgggcctggcgttgatccccgataagcctgccactcagtgtatttcagacggcaagttaaatgagggccacacattggacatggatcttgtttttctctttgacaacagtaaaatcacctatgagactcagatctccccacggccccaacctgaaagtgtcagctgtatccttcaagagcccaagaggaatctcgccttcttccagctgaggaaggtgtggggccaggtctggcacagcatccagaccctgaaggaagattgcaaccggctgcagcagggacagcgagccgccatgatgaatctcctccgaaacaacagctgcctctccaaaatgaagaattccatggcttccatgtctcagcagctcaaggccaagttggatttcttcaaaaccagcatccagattgacctggagaagtacagcgagcaaaccgagtttgggatcacatcagataaactgctgctggcctggagggaaatggagcaggctgtggagctctgtgggcgggagaacgaagtgaaactcctggtagaacggatgatggctctgcagaccgacattgtggacttacagaggagccccatgggccggaagcaggggggaacgctggacgacctagaggagcaagcaagggagctgtacaggagactaagggaaaaacctcgagcgtgtgtgctgggccggggagtccctgtctctcacagcatctagcagtattattaaatggattcattttaaaaatagctcctatattttgtaacatgtctcaaacactcatactgggttccacaatccactgttagaatacctatggttagggcttctgaactaaaataatggaaaattttaacaatttgtatagtgcctggatcattactagtgccataaccctgcttcttcaacatttcacagaacttctcttttatataaaggcaagagcacaaaatgagttcagatgatcacaaacaggtgagttttgttggagaagaaagttggagtaggagactttcacaagtggtttccatggagatagaatgaagcattctgtggtcaagtaagtttagggagctattcatgtttcacttgctttgtggagattcacactatgcactgggaaagtatctgaaaagtcttataataaagaaacaggcttaactttgtgtaagaacactgtttatcaatgtcatttggctatagaaacattttctcctgctgattgtgtgtgtgaaacatgtattaacattccaatgaactagcatttaataaagcacaattttggaaa

SEQ ID NO: 340754 - DNA, 2440 bp, Homo sapiens
  misc_feature (2)..(2): n is a, c, g, or t
  misc_feature (5)..(5): n is a, c, g, or t
gncanagcaggaagtgtttgaggaagtcgcgccgcgctgcccgcgttaagattcccgcattttaatgttttcaggggggtgtcatagccccgggtttggccgccccagccccgccttccccgccccggggagcccgccccctgccccgcgtccctgccgacagagttagcacgacatcagtatgagctggtcaccttccctgacaacgcagacatgtggggcctgggaaatgaaagagcgccttgggacagggggatttggaaatgtcatccgatggcacaatcaggaaacaggtgagcagattgccatcaagcagtgccggcaggagctcagcccccggaaccgagagcggtggtgcctggagatccagatcatgagaaggctgacccaccccaatgtggtggctgcccgagatgtccctgaggggatgcagaacttggcgcccaatgacctgcccctgctggccatggagtactgccaaggaggagatctccggaagtacctgaaccagtttgagaactgctgtggtctgcgggaaggtgccatcctcaccttgctgagtgacattgcctctgcgcttagataccttcatgaaaacagaatcatccatcgggatctaaagccagaaaacatcgtcctgcagcaaggagaacagaggttaatacacaaaattattgacctaggatatgccaaggagctggatcagggcagtctttgcacatcattcgtggggaccctgcagtacctggccccagagctactggagcagcagaagtacacagtgaccgtcgactactggagcttcggcaccctggcctttgagtgcatcacgggcttccggcccttcctccccaactggcagcccgtgcagtggcattcaaaagtgcggcagaagagtgaggtggacattgttgttagcgaagacttgaatggaacggtgaagttttcaagctctttaccctaccccaataatcttaacagtgtcctggctgagcgactggagaagtggctgcaactgatgctgatgtggcacccccgacagaggggcacggatcccacgtatgggcccaatggctgcttcaaggccctggatgacatcttaaacttaaagctggttcatatcttgaacatggtcacgggcaccatccacacctaccctgtgacagaggatgagagtctgcagagcttgaaggccagaatccaacaggacacgggcatcccagaggaggaccaggagctgctgcaggaagcgggcctggcgttgatccccgataagcctgccactcagtgtatttcagacggcaagttaaatgagggccacacattggacatggatcttgtttttctctttgacaacagtaaaatcacctatgagactcagatctccccacggccccaacctgaaagtgtcagctgtatccttcaagagcccaagaggaatctcgccttcttccagctgaggaaggtgtggggccaggtctggcacagcatccagaccctgaaggaagattgcaaccggctgcagcagggacagcgagccgccatgatgaatctcctccgaaacaacagctgcctctccaaaatgaagaattccatggcttccatgtctcagcagctcaaggccaagttggatttcttcaaaaccagcatccagattgacctggagaagtacagcgagcaaaccgagtttgggatcacatcagataaactgctgctggcctggagggaaatggagcaggctgtggagctctgtgggcgggagaacgaagtgaaactcctggtagaacggatgatggctctgcagaccgacattgtggacttacagaggagccccatgggccggaagcaggggggaacgctggacgacctagaggagcaagcaagggagctgtacaggagactaagggaaaaacctcgagaccagcgaactgagggtgacagtcaggaaatggtacggctgctgcttcaggcaattcagagcttcgagaagaaagtgcgagtgatctatacgcagctcagtaaaactgtggtttgcaagcagaaggcgctggaactgttgcccaaggtggaagaggtggtgagcttaatgaatgaggatgagaagactgttgtccggctgcaggagaagcggcagaaggagctctggaatctcctgaagattgcttgtagcaaggtccgtggtcctgtcagtggaagcccggatagcatgaatgcctctcgacttagccagcctgggcagctgatgtctcagccctccacggcctccaacagcttacctgagccagccaagaagagtgaagaactggtggctgaagcacataacctctgcaccctgctagaaaatgccatacaggacactgtgagggaacaagaccagagtttcacggccctagactggagctggttacagaccccatgcgccggggatcctacaagagtc

SEQ ID NO: 340755 - DNA, 2664 bp, Homo sapiens
  misc_feature (2)..(2): n is a, c, g, or t
  misc_feature (5)..(5): n is a, c, g, or t
gncanagcaggaagtgtttgaggaagtcgcgccgcgctgcccgcgttaagattcccgcattttaatgttttcaggggggtgtcatagccccgggtttggccgccccagccccgccttccccgccccggggagcccgccccctgccccgcgtccctgccgacagagttagcacgacatcagtatgagctggtcaccttccctgacaacgcagacatgtggggcctgggaaatgaaagagcgccttgggacagggggatttggaaatgtcatccgatggcacaatcaggaaacaggtgagcagattgccatcaagcagtgccggcaggagctcagcccccggaaccgagagcggtggtgcctggagatccagatcatgagaaggctgacccaccccaatgtggtggctgcccgagatgtccctgaggggatgcagaacttggcgcccaatgacctgcccctgctggccatggagtactgccaaggaggagatctccggaagtacctgaaccagtttgagaactgctgtggtctgcgggaaggtgccatcctcaccttgctgagtgacattgcctctgcgcttagataccttcatgaaaacagaatcatccatcgggatctaaagccagaaaacatcgtcctgcagcaaggagaacagaggttaatacacaaaattattgacctaggatatgccaaggagctggatcagggcagtctttgcacatcattcgtggggaccctgcagtacctggccccagagctactggagcagcagaagtacacagtgaccgtcgactactggagcttcggcaccctggcctttgagtgcatcacgggcttccggcccttcctccccaactggcagcccgtgcagtggcattcaaaagtgcggcagaagagtgaggtggacattgttgttagcgaagacttgaatggaacggtgaagttttcaagctctttaccctaccccaataatcttaacagtgtcctggctgagcgactggagaagtggctgcaactgatgctgatgtggcacccccgacagaggggcacggatcccacgtatgggcccaatggctgcttcaaggccctggatgacatcttaaacttaaagctggttcatatcttgaacatggtcacgggcaccatccacacctaccctgtgacagaggatgagagtctgcagagcttgaaggccagaatccaacaggacacgggcatcccagaggaggaccaggagctgctgcaggaagcgggcctggcgttgatccccgataagcctgccactcagtgtatttcagacggcaagttaaatgagggccacacattggacatggatcttgtttttctctttgacaacagtaaaatcacctatgagactcagatctccccacggccccaacctgaaagtgtcagctgtatccttcaagagcccaagaggaatctcgccttcttccagctgaggaaggtgtggggccaggtctggcacagcatccagaccctgaaggaagattgcaaccggctgcagcagggacagcgagccgccatgatgaatctcctccgaaacaacagctgcctctccaaaatgaagaattccatggcttccatgtctcagcagctcaaggccaagttggatttcttcaaaaccagcatccagattgacctggagaagtacagcgagcaaaccgagtttgggatcacatcagataaactgctgctggcctggagggaaatggagcaggctgtggagctctgtgggcgggagaacgaagtgaaactcctggtagaacggatgatggctctgcagaccgacattgtggacttacagaggagccccatgggccggaagcaggggggaacgctggacgacctagaggagcaagcaagggagctgtacaggagactaagggaaaaacctcgagaccagcgaactgagggtgacagtcaggaaatggtacggctgctgcttcaggcaattcagagcttcgagaagaaagtgcgagtgatctatacgcagctcagtaaaactgtggtttgcaagcagaaggcgctggaactgttgcccaaggtggaagaggtggtgagcttaatgaatgaggatgagaagactgttgtccggctgcaggagaagcggcagaaggagctctggaatctcctgaagattgcttgtagcaaggtccgtggtcctgtcagtggaagcccggatagcatgaatgcctctcgacttagccagcctgggcagctgatgtctcagccctccacggcctccaacagcttacctgagccagccaagaagaggtaggtcctccttagcagtgccaagtgtgaccatcaagggcacgtcaggagatcggggatggaggcgtttgtcactggtaaatgtctgtctgatggtattaccacctctctggatgtttgttgcatctgctgggtcctgtggggacaaaagtgatacatgtttggctctcatagtcccttgaaacttactaactagtttctttgtccaaggcttggatgactaactgcttaatgagaacattggaaatgctggtcaggcacatgctgttaccctttatccataggaagccacattcccttcagggaggccctgaagccctctgcccccactcaccctaccagtaccttgagttaccgagtcaccaccct

SEQ ID NO: 340756 - DNA, 1600 bp, Homo sapiens
  misc_feature (2)..(2): n is a, c, g, or t
  misc_feature (5)..(5): n is a, c, g, or t
gncanagcaggaagtgtttgaggaagtcgcgccgcgctgcccgcgttaagattcccgcattttaatgttttcaggggggtgtcatagccccgggtttggccgccccagccccgccttccccgccccggggagcccgccccctgccccgcgtccctgccgacagagttagcacgacatcagtatgagctggtcaccttccctgacaacgcagacatgtggggcctgggaaatgaaagagcgccttgggacagggggatttggaaatgtcatccgatggcacaatcaggaaacaggtgagcagattgccatcaagcagtgccggcaggagctcagcccccggaaccgagagcggtggtgcctggagatccagatcatgagaaggctgacccaccccaatgtggtggctgcccgagatgtccctgaggggatgcagaacttggcgcccaatgacctgcccctgctggccatggagtactgccaaggaggagatctccggaagtacctgaaccagtttgagaactgctgtggtctgcgggaaggtgccatcctcaccttgctgagtgacattgcctctgcgcttagataccttcatgaaaacagaatcatccatcgggatctaaagccagaaaacatcgtcctgcagcaaggagaacagaggttaatacacaaaattattgacctaggatatgccaaggagctggatcagggcagtctttgcacatcattcgtggggaccctgcagtacctggccccagagctactggagcagcagaagtacacagtgaccgtcgactactggagcttcggcaccctggcctttgagtgcatcacgggcttccggcccttcctccccaactggcagcccgtgcagtggcattcaaaagtgcggcagaagagtgaggtggacattgttgttagcgaagacttgaatggaacggtgaagttttcaagctctttaccctaccccaataatcttaacagtgtcctggctgagcgactggagaagtggctgcaactgatgctgatgtggcacccccgacagaggggcacggatcccacgtatgggcccaatggctgcttcaaggccctggatgacatcttaaacttaaagctggttcatatcttgaacatggtcacgggcaccatccacacctaccctgtgacagaggatgagagtctgcagagcttgaaggccagaatccaacaggacacgggcatcccagaggaggaccaggagctgctgcaggaagcgggcctggcgttgatccccgataagcctgccactcagtgtatttcagacggcaaggtgagccctggcttcgtacacaccatcctgtttaccttggctgtgcctcctgggaaactcaacacactttcagatttcaattctgctttgtcatgtagtctgttaatcacacagtgcggatacctggctggtttttaagttggagtatggtgtcctctgtgtggcctgataggaaacacaaatctccttgctggacttgttacttccaaaccctccaagaccggtctcttgcctttattgcaaaaaatgatgctataacactcgaatctctcaagttgcctgcttggccctctt

SEQ ID NO: 340757 - DNA, 869 bp, Homo sapiens
atcacatctgggatttggggaagtccctctccaggcagctggaggatctgagtccctggccaacctcagcactgagaagggccgctcagcaaggctggagttgagccgccgctgtgcagcacagaacagggtggggcaggagctggggcagggcctggctgggagggagccaggcagtgcaggagccatcccctgccatactttcggtccagggcagaagcacaggaggccaatgccgggcctctccccaggcatggtcagcagggaaggtgcagcaggaggaccaggaacgggaggcttgggtgcttaacatggcttcttgatgtgtgggccttgaggtttcgctggaggggaggatgtggagccaggatggttccacggcctgagggacacgtgaggggatgaaggactgcaggccgaagtgagtgtcaggtgtggggcctggggggctacatgggtgggttggggaccatgcagggcagagatcagcagaggggtgacctgaagattggccggcggtcgtgggctgtgagctgaggaggctcaggtagctggaatgggaacccctgcttgacccttcgggctgggaggggcagtggctgcagccccttgggagtcagggtgtccttgtttcttctcagccaggtcatagaggatgcaagccacaggaattcccatagcctttgtgtgtgtgtctgtcttctacctggaaaacagtaagaatactttcctgttcttttcttgtaaaagttcattaaggggctggatgcagtggatcatgaatcccagaactttgggaggctgaggcagatcacctgaggtcaggagttcgagaccagcctggccaatatggtgaaacaccgtctcta

SEQ ID NO: 340758 - DNA, 488 bp, Homo sapiens
tctgtgtctgccttgggcttctccttatctcatttatggggcatcactactctctgctggcttccttgaggaactatgctaccctccctctctccagaccagcgaactgagggtgacagtcaggaaatggtacggctgctgcttcaggcaattcagagcttcgagaagaaagtgcgagtgatctatacgcagctcaggtatgagccccgaccttcctgctctggaggaaggactgggagatgcaggtatgaggtcaccttcctccctcctctctgattcgctggacctcatgaagagagtttctgcagctgctgactggatgcacagctgccacaggttctgctttctccagcccaaatgccattagtttgccatgtttattctttgcagtaaaactgtggtttgcaagcagaaggcgctggaactgttgcccaaggtggaagaggtggtgagcttaatgaatgaggatgagaagactgttgtccggc

SEQ ID NO: 340759 - DNA, 521 bp, Homo sapiens
ctcttgagtgctaagtgtcgtagggatatgtatgactgtatatttcattgacatcccagtcaacaattgactgcatagatgacagtggtctcatgagattataatactgtatttttactgtaccttttctgggtttagatatgtttagatacaccaatacttaccattgtgttaccctggcctacagtattcagtaccggagcatgctgtacaggtttgtagcctaggagcaatagggtgtacgatacagcctaggtctgtagtaggctaaaccatctaggtttgtgttatgttcacacaaggactaaaatcacctaatgacgaatttcttagaatgtgtccccgtcatagcaacgtgtgactgcacctaacaagattcatatttgcaggcattcaaaagtgcggcagaagagtgaggtggacattgttgttagcgaagacttgaatggaacggtgaagttttcaagctctttaccctaccccaataatcttaacaggtaaggcacagcggcattacacga

SEQ ID NO: 340760 - DNA, 2821 bp, Homo sapiens
aaaatatgaaggcaaaggaaatacatgtgacttaatgaacctcacacaaactgaaggttgaagtcaggctccggggctttttcctggacttatcctctgttttcccctgtgtacttgggcaaggatcttcacctgtgtcttagtatcgatttttatgaatcagtactgatggagtatatgtgtgtttaatggtgaatattaaccatagaagggctgagtgctcctccccatcttgggactcataatctgtgaaataaaacagtctgggcctccctgcccgggtagcatcaggatagacagatgaagagaagagaaagtaatgtgtcttgggcatcttctgtatgccaggcaccatgccagaggctttaagtacttcatcttacttgactcctcagatggccctgttagaagcctattttatgcaaaaggaaactgtagctgggggtaagtaacttgccaaggggtcacacagctagaaagcggtggaccctagatgcaggcgcagccattcagaccccacagtccacattcctttgagccagtccattgagggtcctcagggaatgtggcgggtcccctggtctcgctcccccgcagatcttgcatctcagcatgcgcctaccacatcagttgacattagcacagcttttccattaggagaacgaagtgaaactcctggtagaacggatgatggctctgcagaccgacattgtggacttacagaggagccccatgggccggaagcaggggggaacgctggacgacctagaggagcaagcaagggagctgtacaggagactaagggaaaaacctcgagaccagcgaactgagggtgacagtcaggaaatggtacggctgctgcttcaggcaattcagagcttcgagaagaaagtgcgagtgatctatacgcagctcagtaaaactgtggtttgcaagcagaaggcgctggaactgttgcccaaggtggaagaggtggtgagcttaatgaatgaggatgagaagactgttgtccggctgcaggagaagcggcagaaggagctctggaatctcctgaagattgcttgtagcaaggtccgtggtcctgtcagtggaagcccggatagcatgaatgcctctcgacttagccagcctgggcagctgatgtctcagccctccacggcctccaacagcttacctgagccagccaagaagagtgaagaactggtggctgaagcacataacctctgcaccctgctagaaaatgccatacaggacactgtgagggaacaagaccagagtttcacggccctagactggagctggttacagacggaagaagaagagcacagctgcctggagcaggcctcatgatgtggggggactcgaccccctgacatggggcagcccatagcaggccttgtgcggtggggggactcgaccccctgacatggggctgcctggagcaggccgcgtgacgtggggctgcctggccgcggctctcacatggtggttcctgctgcactgatggcccaggggtctctggtatccagatggagctctcgcttcctcagcagctgtgactttcacccaggacccaggacgcagccctccgtgggcactgccggcgccttgtctgcacactggaggtcctccattacagaggcccagcgcacatcgctggccccacaaacgttcaggggtacagccatggcagctccttcctctgccgtgagaaaagtgcttggagtacggtttgccacacacgtgactggacagtgtccaattcaaatctttcagggcagagtccgagcagcgcttggtgacagcctgtcctctcctgctctccaaaggccctgctccctgtcctctctcactttacagcttgtgtttcttctggattcagcttctcctaaacagacagtttaattatagttgcggcctggccccatcctcacttcctctttttatttcactgctgctaaaattgtgtttttacctactactttggtggttgtcctcttttcggcaaagttggagcgagtgccaagctctccatctgtggtcctttctgccaagagcgactcatagtaaccaggatgggagagcagctgccttattctgaatcccaaaaattacttgggggtgattgtcacagaggagggacagaaagggtatctgctgaccaccagcctgcctacccatgcccatgtctccattcctgctcaagcgtgtgtgctgggccggggagtccctgtctctcacagcatctagcagtattattaaatggattcattttaaaaatagctcctatattttgtaacatgtctcaaacactcatactgggttccacaatccactgttagaatacctatggttagggcttctgaactaaaataatggaaaattttaacaatttgtatagtgcctggatcattactagtgccataaccctgcttcttcaacatttcacagaacttctcttttatataaaggcaagagcacaaaatgagttcagatgatcacaaacaggtgagttttgttggagaagaaagttggagtaggagactttcacaagtggtttccatggagatagaatgaagcattctgtggtcaagtaagtttagggagctattcatgtttcacttgctttgtggagattcacactatgcactgggaaagtatctgaaaagtcttataataaagaaacaggcttaactttgtgtaagaacactgtttatcaatgtcatttggctatagaaacattttctcctgctgattgtgtgtgtgaaacatgtattaacattccaatgaactagcatttaataaagcacaattttggaaa

SEQ ID NO: 340761 - DNA, 3979 bp, Homo sapiens
  misc_feature (2)..(2): n is a, c, g, or t
  misc_feature (5)..(5): n is a, c, g, or t
gncanagcaggaagtgtttgaggaagtcgcgccgcgctgcccgcgttaagattcccgcattttaatgttttcaggggggtgtcatagccccgggtttggccgccccagccccgccttccccgccccggggagcccgccccctgccccgcgtccctgccgacagagttagcacgacatcagtatgagctggtcaccttccctgacaacgcagacatgtggggcctgggaaatgaaagagcgccttgggacagggggatttggaaatgtcatccgatggcacaatcaggaaacaggtgagcagattgccatcaagcagtgccggcaggagctcagcccccggaaccgagagcggtggtgcctggagatccagatcatgagaaggctgacccaccccaatgtggtggctgcccgagatgtccctgaggggatgcagaacttggcgcccaatgacctgcccctgctggccatggagtactgccaaggaggagatctccggaagtacctgaaccagtttgagaactgctgtggtctgcgggaaggtgccatcctcaccttgctgagtgacattggtaaatcccagtcccggaattcaggccgtgtccttcagggagagtgtggtgcccctcctctgcgcttagataccttcatgaaaacagaatcatccatcgggatctaaagccagaaaacatcgtcctgcagcaaggagaacagaggttaatacacaaaattattgacctaggatatgccaaggagctggatcagggcagtctttgcacatcattcgtggggaccctgcagtacctggccccagagctactggagcagcagaagtacacagtgaccgtcgactactggagcttcggcaccctggcctttgagtgcatcacgggcttccggcccttcctccccaactggcagcccgtgcagtggcattcaaaagtgcggcagaagagtgaggtggacattgttgttagcgaagacttgaatggaacggtgaagttttcaagctctttaccctaccccaataatcttaacagtgtcctggctgagcgactggagaagtggctgcaactgatgctgatgtggcacccccgacagaggggcacggatcccacgtatgggcccaatggctgcttcaaggccctggatgacatcttaaacttaaagctggttcatatcttgaacatggtcacgggcaccatccacacctaccctgtgacagaggatgagagtctgcagagcttgaaggccagaatccaacaggacacgggcatcccagaggaggaccaggagctgctgcaggaagcgggcctggcgttgatccccgataagcctgccactcagtgtatttcagacggcaagttaaatgagggccacacattggacatggatcttgtttttctctttgacaacagtaaaatcacctatgagactcagatctccccacggccccaacctgaaagtgtcagctgtatccttcaagagcccaagaggaatctcgccttcttccagctgaggaaggtgtggggccaggtctggcacagcatccagaccctgaaggaagattgcaaccggctgcagcagggacagcgagccgccatgatgaatctcctccgaaacaacagctgcctctccaaaatgaagaattccatggcttccatgtctcagcagctcaaggccaagttggatttcttcaaaaccagcatccagattgacctggagaagtacagcgagcaaaccgagtttgggatcacatcagataaactgctgctggcctggagggaaatggagcaggctgtggagctctgtgggcgggagaacgaagtgaaactcctggtagaacggatgatggctctgcagaccgacattgtggacttacagaggagccccatgggccggaagcaggggggaacgctggacgacctagaggagcaagcaagggagctgtacaggagactaagggaaaaacctcgagaccagcgaactgagggtgacagtcaggaaatggtacggctgctgcttcaggcaattcagagcttcgagaagaaagtgcgagtgatctatacgcagctcagtaaaactgtggtttgcaagcagaaggcgctggaactgttgcccaaggtggaagaggtggtgagcttaatgaatgaggatgagaagactgttgtccggctgcaggagaagcggcagaaggagctctggaatctcctgaagattgcttgtagcaaggtccgtggtcctgtcagtggaagcccggatagcatgaatgcctctcgacttagccagcctgggcagctgatgtctcagccctccacggcctccaacagcttacctgagccagccaagaagagtgaagaactggtggctgaagcacataacctctgcaccctgctagaaaatgccatacaggacactgtgagggaacaagaccagagtttcacggccctagactggagctggttacagacggaagaagaagagcacagctgcctggagcaggcctcatgatgtggggggactcgaccccctgacatggggcagcccatagcaggccttgtgcggtggggggactcgaccccctgacatggggctgcctggagcaggccgcgtgacgtggggctgcctggccgcggctctcacatggtggttcctgctgcactgatggcccaggggtctctggtatccagatggagctctcgcttcctcagcagctgtgactttcacccaggacccaggacgcagccctccgtgggcactgccggcgccttgtctgcacactggaggtcctccattacagaggcccagcgcacatcgctggccccacaaacgttcaggggtacagccatggcagctccttcctctgccgtgagaaaagtgcttggagtacggtttgccacacacgtgactggacagtgtccaattcaaatctttcagggcagagtccgagcagcgcttggtgacagcctgtcctctcctgctctccaaaggccctgctccctgtcctctctcactttacagcttgtgtttcttctggattcagcttctcctaaacagacagtttaattatagttgcggcctggccccatcctcacttcctctttttatttcactgctgctaaaattgtgtttttacctactactttggtggttgtcctcttttcggcaaagttggagcgagtgccaagctctccatctgtggtcctttctgccaagagcgactcatagtaaccaggatgggagagcagctgccttattctgaatcccaaaaattacttgggggtgattgtcacagaggagggacagaaagggtatctgctgaccaccagcctgcctacccatgcccatgtctccattcctgctcaagcgtgtgtgctgggccggggagtccctgtctctcacagcatctagcagtattattaaatggattcattttaaaaatagctcctatattttgtaacatgtctcaaacactcatactgggttccacaatccactgttagaatacctatggttagggcttctgaactaaaataatggaaaattttaacaatttgtatagtgcctggatcattactagtgccataaccctgcttcttcaacatttcacagaacttctcttttatataaaggcaagagcacaaaatgagttcagatgatcacaaacaggtgagttttgttggagaagaaagttggagtaggagactttcacaagtggtttccatggagatagaatgaagcattctgtggtcaagtaagtttagggagctattcatgtttcacttgctttgtggagattcacactatgcactgggaaagtatctgaaaagtcttataataaagaaacaggcttaactttgtgtaagaacactgtttatcaatgtcatttggctatagaaacattttctcctgctgattgtgtgtgtgaaacatgtattaacattccaatgaactagcatttaataaagcacaattttggaaa

SEQ ID NO: 340762 - DNA, 3400 bp, Homo sapiens
atatttcattgacatcccagtcaacaattgactgcatagatgacagtggtctcatgagattataatactgtatttttactgtaccttttctgggtttagatatgtttagatacaccaatacttaccattgtgttaccctggcctacagtattcagtaccggagcatgctgtacaggtttgtagcctaggagcaatagggtgtacgatacagcctaggtctgtagtaggctaaaccatctaggtttgtgttatgttcacacaaggactaaaatcacctaatgacgaatttcttagaatgtgtccccgtcatagcaacgtgtgactgcacctaacaagattcatatttgcaggcattcaaaagtgcggcagaagagtgaggtggacattgttgttagcgaagacttgaatggaacggtgaagttttcaagctctttaccctaccccaataatcttaacagtgtcctggctgagcgactggagaagtggctgcaactgatgctgatgtggcacccccgacagaggggcacggatcccacgtatgggcccaatggctgcttcaaggccctggatgacatcttaaacttaaagctggttcatatcttgaacatggtcacgggcaccatccacacctaccctgtgacagaggatgagagtctgcagagcttgaaggccagaatccaacaggacacgggcatcccagaggaggaccaggagctgctgcaggaagcgggcctggcgttgatccccgataagcctgccactcagtgtatttcagacggcaagttaaatgagggccacacattggacatggatcttgtttttctctttgacaacagtaaaatcacctatgagactcagatctccccacggccccaacctgaaagtgtcagctgtatccttcaagagcccaagaggaatctcgccttcttccagctgaggaaggtgtggggccaggtctggcacagcatccagaccctgaaggaagattgcaaccggctgcagcagggacagcgagccgccatgatgaatctcctccgaaacaacagctgcctctccaaaatgaagaattccatggcttccatgtctcagcagctcaaggccaagttggatttcttcaaaaccagcatccagattgacctggagaagtacagcgagcaaaccgagtttgggatcacatcagataaactgctgctggcctggagggaaatggagcaggctgtggagctctgtgggcgggagaacgaagtgaaactcctggtagaacggatgatggctctgcagaccgacattgtggacttacagaggagccccatgggccggaagcaggggggaacgctggacgacctagaggagcaagcaagggagctgtacaggagactaagggaaaaacctcgagaccagcgaactgagggtgacagtcaggaaatggtacggctgctgcttcaggcaattcagagcttcgagaagaaagtgcgagtgatctatacgcagctcagtaaaactgtggtttgcaagcagaaggcgctggaactgttgcccaaggtggaagaggtggtgagcttaatgaatgaggatgagaagactgttgtccggctgcaggagaagcggcagaaggagctctggaatctcctgaagattgcttgtagcaaggtccgtggtcctgtcagtggaagcccggatagcatgaatgcctctcgacttagccagcctgggcagctgatgtctcagccctccacggcctccaacagcttacctgagccagccaagaagagtgaagaactggtggctgaagcacataacctctgcaccctgctagaaaatgccatacaggacactgtgagggaacaagaccagagtttcacggccctagactggagctggttacagacggaagaagaagagcacagctgcctggagcaggcctcatgatgtggggggactcgaccccctgacatggggcagcccatagcaggccttgtgcggtggggggactcgaccccctgacatggggctgcctggagcaggccgcgtgacgtggggctgcctggccgcggctctcacatggtggttcctgctgcactgatggcccaggggtctctggtatccagatggagctctcgcttcctcagcagctgtgactttcacccaggacccaggacgcagccctccgtgggcactgccggcgccttgtctgcacactggaggtcctccattacagaggcccagcgcacatcgctggccccacaaacgttcaggggtacagccatggcagctccttcctctgccgtgagaaaagtgcttggagtacggtttgccacacacgtgactggacagtgtccaattcaaatctttcagggcagagtccgagcagcgcttggtgacagcctgtcctctcctgctctccaaaggccctgctccctgtcctctctcactttacagcttgtgtttcttctggattcagcttctcctaaacagacagtttaattatagttgcggcctggccccatcctcacttcctctttttatttcactgctgctaaaattgtgtttttacctactactttggtggttgtcctcttttcggcaaagttggagcgagtgccaagctctccatctgtggtcctttctgccaagagcgactcatagtaaccaggatgggagagcagctgccttattctgaatcccaaaaattacttgggggtgattgtcacagaggagggacagaaagggtatctgctgaccaccagcctgcctacccatgcccatgtctccattcctgctcaagcgtgtgtgctgggccggggagtccctgtctctcacagcatctagcagtattattaaatggattcattttaaaaatagctcctatattttgtaacatgtctcaaacactcatactgggttccacaatccactgttagaatacctatggttagggcttctgaactaaaataatggaaaattttaacaatttgtatagtgcctggatcattactagtgccataaccctgcttcttcaacatttcacagaacttctcttttatataaaggcaagagcacaaaatgagttcagatgatcacaaacaggtgagttttgttggagaagaaagttggagtaggagactttcacaagtggtttccatggagatagaatgaagcattctgtggtcaagtaagtttagggagctattcatgtttcacttgctttgtggagattcacactatgcactgggaaagtatctgaaaagtcttataataaagaaacaggcttaactttgtgtaagaacactgtttatcaatgtcatttggctatagaaacattttctcctgctgattgtgtgtgtgaaacatgtattaacattccaatgaactagcatttaataaagcacaattttggaaa

SEQ ID NO: 340763 - DNA, 1829 bp, Homo sapiens
aggtcatagaggatgcaagccacaggaattcccatagcctttgtgtgtgtgtctgtcttctacctggaaaacaagcaaggtccgtggtcctgtcagtggaagcccggatagcatgaatgcctctcgacttagccagcctgggcagctgatgtctcagccctccacggcctccaacagcttacctgagccagccaagaagagtgaagaactggtggctgaagcacataacctctgcaccctgctagaaaatgccatacaggacactgtgagggaacaagaccagagtttcacggccctagactggagctggttacagacggaagaagaagagcacagctgcctggagcaggcctcatgatgtggggggactcgaccccctgacatggggcagcccatagcaggccttgtgcggtggggggactcgaccccctgacatggggctgcctggagcaggccgcgtgacgtggggctgcctggccgcggctctcacatggtggttcctgctgcactgatggcccaggggtctctggtatccagatggagctctcgcttcctcagcagctgtgactttcacccaggacccaggacgcagccctccgtgggcactgccggcgccttgtctgcacactggaggtcctccattacagaggcccagcgcacatcgctggccccacaaacgttcaggggtacagccatggcagctccttcctctgccgtgagaaaagtgcttggagtacggtttgccacacacgtgactggacagtgtccaattcaaatctttcagggcagagtccgagcagcgcttggtgacagcctgtcctctcctgctctccaaaggccctgctccctgtcctctctcactttacagcttgtgtttcttctggattcagcttctcctaaacagacagtttaattatagttgcggcctggccccatcctcacttcctctttttatttcactgctgctaaaattgtgtttttacctactactttggtggttgtcctcttttcggcaaagttggagcgagtgccaagctctccatctgtggtcctttctgccaagagcgactcatagtaaccaggatgggagagcagctgccttattctgaatcccaaaaattacttgggggtgattgtcacagaggagggacagaaagggtatctgctgaccaccagcctgcctacccatgcccatgtctccattcctgctcaagcgtgtgtgctgggccggggagtccctgtctctcacagcatctagcagtattattaaatggattcattttaaaaatagctcctatattttgtaacatgtctcaaacactcatactgggttccacaatccactgttagaatacctatggttagggcttctgaactaaaataatggaaaattttaacaatttgtatagtgcctggatcattactagtgccataaccctgcttcttcaacatttcacagaacttctcttttatataaaggcaagagcacaaaatgagttcagatgatcacaaacaggtgagttttgttggagaagaaagttggagtaggagactttcacaagtggtttccatggagatagaatgaagcattctgtggtcaagtaagtttagggagctattcatgtttcacttgctttgtggagattcacactatgcactgggaaagtatctgaaaagtcttataataaagaaacaggcttaactttgtgtaagaacactgtttatcaatgtcatttggctatagaaacattttctcctgctgattgtgtgtgtgaaacatgtattaacattccaatgaactagcatttaataaagcacaattttggaaa

SEQ ID NO: 340764 - DNA, 1530 bp, Homo sapiens
  misc_feature (2)..(2): n is a, c, g, or t
  misc_feature (5)..(5): n is a, c, g, or t
gncanagcaggaagtgtttgaggaagtcgcgccgcgctgcccgcgttaagattcccgcattttaatgttttcaggggggtgtcatagccccgggtttggccgccccagccccgccttccccgccccggggagcccgccccctgccccgcgtccctgccgacagagttagcacgacatcagtatgagctggtcaccttccctgacaacgcagacatgtggggcctgggaaatgaaagagcgccttgggacagggggatttggaaatgtcatccgatggcacaatcaggacgcagccctccgtgggcactgccggcgccttgtctgcacactggaggtcctccattacagaggcccagcgcacatcgctggccccacaaacgttcaggggtacagccatggcagctccttcctctgccgtgagaaaagtgcttggagtacggtttgccacacacgtgactggacagtgtccaattcaaatctttcagggcagagtccgagcagcgcttggtgacagcctgtcctctcctgctctccaaaggccctgctccctgtcctctctcactttacagcttgtgtttcttctggattcagcttctcctaaacagacagtttaattatagttgcggcctggccccatcctcacttcctctttttatttcactgctgctaaaattgtgtttttacctactactttggtggttgtcctcttttcggcaaagttggagcgagtgccaagctctccatctgtggtcctttctgccaagagcgactcatagtaaccaggatgggagagcagctgccttattctgaatcccaaaaattacttgggggtgattgtcacagaggagggacagaaagggtatctgctgaccaccagcctgcctacccatgcccatgtctccattcctgctcaagcgtgtgtgctgggccggggagtccctgtctctcacagcatctagcagtattattaaatggattcattttaaaaatagctcctatattttgtaacatgtctcaaacactcatactgggttccacaatccactgttagaatacctatggttagggcttctgaactaaaataatggaaaattttaacaatttgtatagtgcctggatcattactagtgccataaccctgcttcttcaacatttcacagaacttctcttttatataaaggcaagagcacaaaatgagttcagatgatcacaaacaggtgagttttgttggagaagaaagttggagtaggagactttcacaagtggtttccatggagatagaatgaagcattctgtggtcaagtaagtttagggagctattcatgtttcacttgctttgtggagattcacactatgcactgggaaagtatctgaaaagtcttataataaagaaacaggcttaactttgtgtaagaacactgtttatcaatgtcatttggctatagaaacattttctcctgctgattgtgtgtgtgaaacatgtattaacattccaatgaactagcatttaataaagcacaattttggaaa

SEQ ID NO: 340765 - DNA, 2439 bp, Homo sapiens
  misc_feature (2)..(2): n is a, c, g, or t
  misc_feature (5)..(5): n is a, c, g, or t
gncanagcaggaagtgtttgaggaagtcgcgccgcgctgcccgcgttaagattcccgcattttaatgttttcaggggggtgtcatagccccgggtttggccgccccagccccgccttccccgccccggggagcccgccccctgccccgcgtccctgccgacagagttagcacgacatcagtatgagctggtcaccttccctgacaacgcagacatgtggggcctgggaaatgaaagagcgccttgggacagggggatttggaaatgtcatccgatggcacaatcaggaaacaggtgagcagattgccatcaagcagtgccggcaggagctcagcccccggaaccgagagcggtggtgcctggagatccagatcatgagaaggctgacccaccccaatgtggtggctgcccgagatgtccctgaggggatgcagaacttggcgcccaatgacctgcccctgctggccatggagtactgccaaggaggagatctccggaagtacctgaaccagtttgagaactgctgtggtctgcgggaaggtgccatcctcaccttgctgagtgacattgcctctgcgcttagataccttcatgaaaacagaatcatccatcgggatctaaagccagaaaacatcgtcctgcagcaaggagaacagaggttaatacacaaaattattgacctaggatatgccaaggagctggatcagggcagtctttgcacatcattcgtggggaccctgcagtacctggccccagagctactggagcagcagaagtacacagtgaccgtcgactactggagcttcggcaccctggcctttgagtgcatcacgggcttccggcccttcctccccaactggcagcccgtgcagtggcattcaaaagtgcggcagaagagtgaggtggacattgttgttagcgaagacttgaatggaacggtgaagttttcaagctctttaccctaccccaataatcttaacagtgtcctggctgagcgactggagaagtggctgcaactgatgctgatgtggcacccccgacagaggggcacggatcccacgtatgggcccaatggctgcttcaaggccctggatgacatcttaaacttaaagctggttcatatcttgaacatggtcacgggcaccatccacacctaccctgtgacagaggatgagagtctgcagagcttgaaggccagaatccaacaggacacgggcatcccagaggaggaccaggagctgctgcaggaagcgggcctggcgttgatccccgataagcctgccactcagtgtatttcagacggcaagttaaatgagggccacacattggacatggatcttgtttttctctttgacaacagtaaaatcacctatgagactcagatctccccacggccccaacctgaaagtgtcagctgtatccttcaagagcccaagaggaatctcgccttcttccagctgaggaaggtgtggggccaggtctggcacagcatccagaccctgaaggaagattgcaaccggctgcagcagggacagcgagccgccatgatgaatctcctccgaaacaacagctgcctctccaaaatgaagaattccatggcttccatgtctcagcagctcaaggccaagttggatttcttcaaaaccagcatccagattgacctggagaagtacagcgagcaaaccgagtttgggatcacatcagataaactgctgctggcctggagggaaatggagcaggctgtggagctctgtgggcgggagaacgaagtgaaactcctggtagaacggatgatggctctgcagaccgacattgtggacttacagaggagccccatgggccggaagcaggggggaacgctggacgacctagaggagcaagcaagggagctgtacaggagactaagggaaaaacctcgagaccagcgaactgagggtgacagtcaggaaatggtacggctgctgcttcaggcaattcagagcttcgagaagaaagtgcgagtgatctatacgcagctcagtaaaactgtggtttgcaagcagaaggcgctggaactgttgcccaaggtggaagaggtggtgagcttaatgaatgaggatgagaagactgttgtccggctgcaggagaagcggcagaaggagctctggaatctcctgaagattgcttgtagcaaggtccgtggtcctgtcagtggaagcccggatagcatgaatgcctctcgacttagccagcctgggcagctgatgtctcagccctccacggcctccaacagcttacctgagccagccaagaagagtgaagaactggtggctgaagcacataacctctgcaccctgctagaaaatgccatacaggacactgtgagggggaaccaaggacccggaagtttcaacgggccccttaaaatgggagacctggtttaccagaaccggaaagaaaa

SEQ ID NO: 340766 - DNA, 2457 bp, Homo sapiens
  misc_feature (2)..(2): n is a, c, g, or t
  misc_feature (5)..(5): n is a, c, g, or t
gncanagcaggaagtgtttgaggaagtcgcgccgcgctgcccgcgttaagattcccgcattttaatgttttcaggggggtgtcatagccccgggtttggccgccccagccccgccttccccgccccggggagcccgccccctgccccgcgtccctgccgacagagttagcacgacatcagtatgagctggtcaccttccctgacaacgcagacatgtggggcctgggaaatgaaagagcgccttgggacagggggatttggaaatgtcatccgatggcacaatcaggaaacaggtgagcagattgccatcaagcagtgccggcaggagctcagcccccggaaccgagagcggtggtgcctggagatccagatcatgagaaggctgacccaccccaatgtggtggctgcccgagatgtccctgaggggatgcagaacttggcgcccaatgacctgcccctgctggccatggagtactgccaaggaggagatctccggaagtacctgaaccagtttgagaactgctgtggtctgcgggaaggtgccatcctcaccttgctgagtgacattgcctctgcgcttagataccttcatgaaaacagaatcatccatcgggatctaaagccagaaaacatcgtcctgcagcaaggagaacagaggttaatacacaaaattattgacctaggatatgccaaggagctggatcagggcagtctttgcacatcattcgtggggaccctgcagtacctggccccagagctactggagcagcagaagtacacagtgaccgtcgactactggagcttcggcaccctggcctttgagtgcatcacgggcttccggcccttcctccccaactggcagcccgtgcagtggcattcaaaagtgcggcagaagagtgaggtggacattgttgttagcgaagacttgaatggaacggtgaagttttcaagctctttaccctaccccaataatcttaacagtgtcctggctgagcgactggagaagtggctgcaactgatgctgatgtggcacccccgacagaggggcacggatcccacgtatgggcccaatggctgcttcaaggccctggatgacatcttaaacttaaagctggttcatatcttgaacatggtcacgggcaccatccacacctaccctgtgacagaggatgagagtctgcagagcttgaaggccagaatccaacaggacacgggcatcccagaggaggaccaggagctgctgcaggaagcgggcctggcgttgatccccgataagcctgccactcagtgtatttcagacggcaagttaaatgagggccacacattggacatggatcttgtttttctctttgacaacagtaaaatcacctatgagactcagatctccccacggccccaacctgaaagtgtcagctgtatccttcaagagcccaagaggaatctcgccttcttccagctgaggaaggtgtggggccaggtctggcacagcatccagaccctgaaggaagattgcaaccggctgcagcagggacagcgagccgccatgatgaatctcctccgaaacaacagctgcctctccaaaatgaagaattccatggcttccatgtctcagcagctcaaggccaagttggatttcttcaaaaccagcatccagattgacctggagaagtacagcgagcaaaccgagtttgggatcacatcagataaactgctgctggcctggagggaaatggagcaggctgtggagctctgtgggcgggagaacgaagtgaaactcctggtagaacggatgatggctctgcagaccgacattgtggacttacagaggagccccatgggccggaagcaggggggaacgctggacgacctagaggagcaagcaagggagctgtacaggagactaagggaaaaacctcgagaccagcgaactgagggtgacagtcaggaaatggtacggctgctgcttcaggcaattcagagcttcgagaagaaagtgcgagtgatctatacgcagctcagtaaaactgtggtttgcaagcagaaggcgctggaactgttgcccaaggtggaagaggtggtgagcttaatgaatgaggatgagaagactgttgtccggctgcaggagaagcggcagaaggagctctggaatctcctgaagattgcttgtgtgagtgagtgctgtggtcccgggcccttggcctagcagcctcctgtgcctttccacctctgtgcactgccgccatcccacacgggacaccacagagccaccagcagcccactcagctgctgctcgggcttcacgtcgctgttctttgacttggtgtaagcggggaggtcagaggaagggcctgtgctaattgttttcattcatctgtgtattactttcgtgtggctactgtaaagattagcacaaactgaggggctaaaacaacagaaatttgggctaggcatggtgac

SEQ ID NO: 340767 - DNA, 2140 bp, Homo sapiens
  misc_feature (2)..(2): n is a, c, g, or t
  misc_feature (5)..(5): n is a, c, g, or t
gncanagcaggaagtgtttgaggaagtcgcgccgcgctgcccgcgttaagattcccgcattttaatgttttcaggggggtgtcatagccccgggtttggccgccccagccccgccttccccgccccggggagcccgccccctgccccgcgtccctgccgacagagttagcacgacatcagtatgagctggtcaccttccctgacaacgcagacatgtggggcctgggaaatgaaagagcgccttgggacagggggatttggaaatgtcatccgatggcacaatcaggaaacaggtgagcagattgccatcaagcagtgccggcaggagctcagcccccggaaccgagagcggtggtgcctggagatccagatcatgagaaggctgacccaccccaatgtggtggctgcccgagatgtccctgaggggatgcagaacttggcgcccaatgacctgcccctgctggccatggagtactgccaaggaggagatctccggaagtacctgaaccagtttgagaactgctgtggtctgcgggaaggtgccatcctcaccttgctgagtgacattgcctctgcgcttagataccttcatgaaaacagaatcatccatcgggatctaaagccagaaaacatcgtcctgcagcaaggagaacagaggttaatacacaaaattattgacctaggatatgccaaggagctggatcagggcagtctttgcacatcattcgtggggaccctgcagtacctggccccagagctactggagcagcagaagtacacagtgaccgtcgactactggagcttcggcaccctggcctttgagtgcatcacgggcttccggcccttcctccccaactggcagcccgtgcagtggcattcaaaagtgcggcagaagagtgaggtggacattgttgttagcgaagacttgaatggaacggtgaagttttcaagctctttaccctaccccaataatcttaacagtgtcctggctgagcgactggagaagtggctgcaactgatgctgatgtggcacccccgacagaggggcacggatcccacgtatgggcccaatggctgcttcaaggccctggatgacatcttaaacttaaagctggttcatatcttgaacatggtcacgggcaccatccacacctaccctgtgacagaggatgagagtctgcagagcttgaaggccagaatccaacaggacacgggcatcccagaggaggaccaggagctgctgcaggaagcgggcctggcgttgatccccgataagcctgccactcagtgtatttcagacggcaagttaaatgagggccacacattggacatggatcttgtttttctctttgacaacagtaaaatcacctatgagactcagatctccccacggccccaacctgaaagtgtcagctgtatccttcaagagcccaagaggaatctcgccttcttccagctgaggaaggtgtggggccaggtctggcacagcatccagaccctgaaggaagattgcaaccggctgcagcagggacagcgagccgccatgatgaatctcctccgaaacaacagctgcctctccaaaatgaagaattccatggcttccatgtctcagcagctcaaggccaagttggatttcttcaaaaccagcatccagattgacctggagaagtacagcgagcaaaccgagtttgggatcacatcagataaactgctgctggcctggagggaaatggagcaggctgtggagctctgtgggcgggagaacgaagtgaaactcctggtagaacggatgatggctctgcagaccgacattgtggacttacagaggagccccatgggccggaagcaggggggaacgctggacgacctgtgagtactggctggggggcccctctgtgcccagcacacacagacagccctggagcttcggtgtgtgtgtcaagggcaccctcagtggctgtgcgggaccattctctagagcatgcttccctgtggggtcacttccagcaaatcatcactgagcttcagtttccaaatctgttcagtgacaagaaaaacagtcttaagtcacgaagttgtaaggatgaattcagataatgcatttgagacgcaggccataatctgtaaaggctgtaaaatg

SEQ ID NO: 340768 - DNA, 398 bp, Homo sapiens
aagcaagggagctgtacaggagactaagggaaaaacctcgaggtaagtggggttctgtgtctgccttgggcttctccttatctcatttatggggcatcactactctctgctggcttccttgaggaactatgctaccctccctctctccagaccagcgaactgagggtgacagtcaggaaatggtacggctgctgcttcaggcaattcagagcttcgagaagaaagtgcgagtgatctatacgcagctcaggtatgagccccgaccttcctgctctggaggaaggactgggagatgcaggtatgaggtcaccttcctccctcctctctgattcgctggacctcatgaagagagtttctgcagctgctgactggatgcacagctgccacaggttctgctt

SEQ ID NO: 340769 - DNA, 539 bp, Homo sapiens
ctgggtattcaagaagaaaaggagaaagagtaggagagagtaaggggaggaggaaagggaagaagagaaggatgtttaattgcctaaaaggaccgttccctccccaattataacagcattttgccatgtacaattccatcataggctctgggtgctttagaagtctatttagattaagaaacaattacgcttagtttggagttttgttcaatatgtttcaaattctgagaccactaggactattccacatgaatggcttatatcaaggacctatttgtagacaaaaaagtaaaaggatttgtgaatatatcaaaatgtctatgagtataaaagcttagaccaagtggagtcatatgaagacctaagaaaaggattttaaaagtctcaaatggggcggggtgtggtggctcatgcctgtagtcccagctacttgtgaggctgaggcaggagagtggcgtgaacctgggaggtggaggttgcagtgagccaatatcatgccaccacactccagcctgagcgacagagagagactccatctc

SEQ ID NO: 340770 - DNA, 389 bp, Homo sapiens
agtgttcctttagaggctttgctaattcattgcaaccacatacttggcactaactttaaaaaaaataaaaatagagatggaggttttgctatgttgctcagagtggtctcaactcctggcttcaactgatcctctgccttgcccccacaaagtgctgggattacaggtgtgagcaccgtgcctggttgacacgacttttaaggagtatttccttgatagagataaagggaatgaaatctttagtcaaattttcataagacttagcctaaaactatttggaagatcttagagtcttatcaacttagggaggacttgggcttggggccattttctttttgaaatctccactcttctatactgataagaattttgctgagtgagaatcacaa

SEQ ID NO: 340771 - DNA, 370 bp, Homo sapiens
ctgttacctctaggaggtaggaatgtggctaattttaattttcttctttaaacttctgtgtattttctaagttaatattaaatcaacaaacattattgcttttgatgatgtggaaaacaataaagctacggtcattttggaaaggagagaaaacatgtggtaacaacaataatagtagctaacatttactgagcagttactatgtaccttggttttaagtacacttatattttgatctcataacagtacttatgaggtatgtaatactgtccccatattagagatgagaaaacactgaagcttagagagtttaagggacttcccaaggacacacagctagaaagtgacaaaactaggatgtaaactgagg

SEQ ID NO: 340772 - DNA, 478 bp, Homo sapiens
cgctgtattgcccaggctggagtgcagtggcgcaatctcggcgcactgcaagctccgcttcccgggttcacgccgttctcctgcctcagcctcccgagtagctgggactacaggcacgcgccaccacacccagctaattttttgtattttttagtagagacagggtttcaccgtgttagccaggatggtcttgatctcctgaccttgtgatccgcccacctcggcctcccaaagtgctgggattgcaggcgtgagccactgcgcccggcctatatgctgaattttcatgacagagaatgaaagaaaaagtgcagttgatcgaaagaaatggtggtataaacaggaataacaggcatgttgtttcctctctgatttattatttttgtaaaataagctacttttcagcaccacatacatatgttctgagacctgaatatttgtgaccaaagagtaaagaagtaataaactttatctcgca

SEQ ID NO: 340773 - DNA, 952 bp, Homo sapiens
cgtcgtaatccaggtaatctcctcaggtcacagcctctttgacatcttatttatttatttttttttgagatggagtctcactctgtcgcccaggcgggagtgcagtggcgcgatctcggctcactgcaacctctgcctcctgggttcaagcaattctcctgcctcagcctcccaagtagctgggaatacaggtgtgcgccaccacgcccggctaatttttgtgtttttagtagagacggggtttcactatgttggccaggctggtctggaactcctgacctcgtgattcgcccgcctcagcctcccaaagtgctgggattacaggcgtgagccactgcgcccggccaacttgtgctaatttcttaaacttgcgtgatcacctggtgtacttgttgaaaaatacagctccctggcgtggcaggatcagaatctgccgaggtggaccgtgggaatctgtcatttttaaacaagtgtcccaggtggttcttatgctgaggcaagtgtgggaaatgtgtgaacccacgctcatccagtcttccttgtgaccggcagtccactgtgcgcaacgctgcagccatacagagggactactcgaagttagaactagcaccttggtcttgttggaataagcagatctgagtagagccagctgcagtcttatggttgtttagcagaagttattcttcttagcagagaatattatacggtcattttccagaactgtaaaaactctatcatttgttttaaaccagatgatgtgcttcatttctgtctttgacgtcttcagtttcttctcccctggctttacctcctttgctatcagtttgtgctttggttttgctgccaaccttataggcttaggtttggcggcaaaggcactagactctggtgccttcttttccttcgttgtcttaagcccttcttttcctctgccctcatgccctcaccactt

SEQ ID NO: 340774 - DNA, 819 bp, Homo sapiens
cgtcgtaatccaggtaatctcctcaggtcacagcctctttgacatcttatttatttatttttttttgagatggagtctcactctgtcgcccaggcgggagtgcagtggcgcgatctcggctcactgcaacctctgcctcctgggttcaagcaattctcctgcctcagcctcccaagtagctgggaatacaggcgtgagccactgcgcccggccaacttgtgctaatttcttaaacttgcgtgatcacctggtgtacttgttgaaaaatacagctccctggcgtggcaggatcagaatctgccgaggtggaccgtgggaatctgtcatttttaaacaagtgtcccaggtggttcttatgctgaggcaagtgtgggaaatgtgtgaacccacgctcatccagtcttccttgtgaccggcagtccactgtgcgcaacgctgcagccatacagagggactactcgaagttagaactagcaccttggtcttgttggaataagcagatctgagtagagccagctgcagtcttatggttgtttagcagaagttattcttcttagcagagaatattatacggtcattttccagaactgtaaaaactctatcatttgttttaaaccagatgatgtgcttcatttctgtctttgacgtcttcagtttcttctcccctggctttacctcctttgctatcagtttgtgctttggttttgctgccaaccttataggcttaggtttggcggcaaaggcactagactctggtgccttcttttccttcgttgtcttaagcccttcttttcctctgccctcatgccctcaccactt

SEQ ID NO: 340775 - DNA, 569 bp, Homo sapiens
tgctgggattacaggcgtgatccctgttttgtcgcgtccggcccgacaaaacagctcttaatccacctaagaaaaaaaggaaataccacatccagtatgtaccacacacatcatccctcacccagatcaggaaacctcacgatgagttatgcccccagtaagtccatccagcctcattctctccttctttctgtgcctttagctagtacattgcctttggaaagatgtccataatccattaatacttttgctagtagagacacaagtcaattgaagtaggtagctgaaactgctggacaactgggtttattctgcaggcttatttcacaaagagcaaacctcagaaaactgaggccattgctggcctggctagttggatttccagatattgaccattcctggactccttgttacaggttttcatacacctgctgagacacatgactgcgcttgttggataatcctgatgtcattgaggaaattaaatgagatgaggatgtaaattgtttagtgtgcagtgggcagtcagtggtgttattatctcatttccacattgcaggtatttatgc

SEQ ID NO: 340776 - DNA, 205 bp, Homo sapiens
gttggctgggtgggtgctgtgaggaggcagcatgggttaatgaaagagcaggacctccctcagagtcggggaggcctgagttccatcagcccctggaaggggtgggattggaccgtgtgaggcaccatctttcagaagagcctctgacctgcctcctcacctctctctaggctgtactgtccaagatgtagccactaaccgcatg

SEQ ID NO: 340777 - DNA, 401 bp, Homo sapiens
caggccaggctctggaaatgcaagataaacacatctctaaggccaactttccaagtcaggaataaaaacaagtaatactttttcaatgtttaccacataccaggtaatcttgtaatatgttatacagaactatttactctgtgcagtaaagatgactattagtcccattttaaaacagaaaagggccaagcgcggtggcacatgcctgtaatagcagcactttggcaggctgaggcgggcagatcacgaggtcaggagttcgagaccagcctgaccaacatagtgaaaccctgtctctactaaaaatacaaaaattagctgggtgtggtgatgcgcgcctgtaatcccagctattcaggaggctgaggaaggagaatcgcttgaatctaggaagcagagtt

SEQ ID NO: 340778 - DNA, 209 bp, Homo sapiens
gtacagagaggttaaataacttgtctgagggtacatagttactgagtggcagggatttgaatccagaatattcttatgtaaccagttctccaaaaactagcccttgaaggtcttccacgtttcaacaaagcaactgaggcttatacatgatgtcttcatgatgtcagaaggaagaactgtgaaaggcaaagcggacccgggaggcagag

SEQ ID NO: 340779 - DNA, 605 bp, Homo sapiens
aacccaccaattccgaacacatcatctcatataatcctcagaaattcccaagaatgatggtgctattgttatctttaccatacaaaaggggaacctgaagatcacagaggtttagggacttgcccaaaatcccacagagcttggattaaaaatcagaccacctgtctcttgagcctgtgttctcagccatgtctgtatgtaatgatgttttactaatttggacaaatgacagtccccaccctaccattatacagcaggagtggagttcatgagttcaattagtttgttgatggcaagtaaagatgctacattatctggttgtatctagatgttttatctcccagaccactgagcagccacagttcccaaaggagtagcaattggtctgggagagagggttaagaagagagaggaaaaattaatttctctttctcctacattgtttctctgagtcccaggacatgattggttaagtgccaacaggagtcatgatgactcacaatgcagctgagaaccctgttaccatttgcaatgacaagaactaaacactagccactaccaccagggttactcctggttcagggctgaatacagtgagtaagtgg

SEQ ID NO: 340780 - DNA, 2709 bp, Homo sapiens
  misc_feature (2)..(3): n is a, c, g, or t
  misc_feature (9)..(11): n is a, c, g, or t
  misc_feature (632)..(632): n is a, c, g, or t
  misc_feature (2210)..(2210): n is a, c, g, or t
  misc_feature (2247)..(2247): n is a, c, g, or t
anntcgccnnngtcgttcccgcggcgccgcgcctcgctggctcctcagcttccagccaaaatggcggagaacagcgagagtctgggcaccgtccccgagcacgagcggatcttgcaggagatcgagagcaccgacaccgcctgtgtggggcccaccctccggtctgtgtatgatgaccaaccaaatgcgcacaagaagtttatggaaaagttagatgcttgtatccgtaatcatgacaaggaaattgaaaagatgtgtaattttcatcatcagggttttgtagatgctattacagaactccttaaagtaaggactgatgcagaaaaactgaaggtgcaagttactgataccaaccgaaggtttcaagatgctggaaaagaggtgatagtccacacagaagatatcattcgatgtagaattcagcagagaaatattacaactgtagtagaaaaattgcagttatgccttcctgtgctagaaatgtacagtaagctgaaagaacagatgagtgccaaaaggtgagttggtttttttcctattgttttaaataagaatttttttctattattgaaaggacagatacatttactataaatcatagtgaatcatgagttttgctttcttcattacantaacctttgtacttaaaatttgcgcatcaggataatccactaaagcaaatcttagccttttattaataaatcattgtcctttataaatgatatcaaggattggtaatgttgatcaagtacaaatagccgaacaggaatgaaaatattgattagcttaccaacatactaatattgcatgtaactaagggctaagtgcatattgtggaaggaaaagagtgtaggcagttatattttgacagtctgggtgaatgtagtagttcacattctgttttataactcaaatgcatatatgacagttgaaaaagaaagtaatttaaagtagtttattgattgccataggagcattggatatagtgatgtttaaaatattttaaagacgaacagttttggccaggtgtcatggctcatgcttgtaatcccggcactttgggagtctgaggcaagaggatcacttgaacccaggagtttgagaccagcgtgggcaatatagggagacctcatttcacctccccacccccttccccccaaaaaacaaaagaaaaaaaacaaatgattcaaaagtaacatagaaaaaccagaataaattagacaatttggactagggaaaaaatgatttcttcttggttagtaactacttaattatcagaacacatcttatacagacctatagtaaaagatgtgtgtatgtcctgcttcattgtgctacatgttgaatttcattaggctttaccagttaatacaatttagtagaatgattttttccctgtaataaacaagccaaaaactattctgaaagtcttattttctttcacgtatgtattaataatatattctctttttaaatcaatgttatatatcctcacattttaaagattcaaataattttcctacgcgtttgctgccaaaaaaaaaaaaaacagatatcacctttcctatttcccattcaccattccttctttataggagcaaaaacttttacctcttttaatggattattttggtatttatatttatgtctttaaataactaacttttaattattaccatattattttccagtttggggcattatcggtttttcagtaatataatctaatatttatactcacattttctcaactatccccaaaatgtcttacgtctttttccctccctgaaaacattgatttgtatgtgttcttttgtcccttttaatctagaacagtcctcctgttctttgtttttttcatggaagagtgcaggtcagttctcttgtagaccagggcattttggatttatctagttgtttcttcatgtttagattcaagttaaaaggttttggcaagagtatagcataagtgatacctcacattgcatgacatcaggaggcttataaagtcatgttgtccttaggttatgctaaatttgatcatttggttaaggggaagtctaccagatgtcttttgaaaaggtatatttttctctttgcaattaataagtaatatgtgggtcctgtttcctaacaggttttcacccagtagttttatcattcttgccttaatccgttattatattggatttacaagatgttgatttaanaaattctattatttcttaaacatttattaactggctnttttatatataaagaagagctttttattccccaccaccaccttttttctttttttccgattatggctgtgaacttacgcatttttaaaataaatatattataatttattattgtcattattcattttgatgcacaaattgtttcaaatttaacaagagaaacttctcaagccaattcctgtgtctttgtctttgagtatttttggtttattgtatcgtaagatgttccaagctctcattgtgccttttttttttttttttgcctcagatctggaagcagccattctccagggtaccctagctccttttagtattaatggtatttagaaactaagatgtatgggttgggagcagtggctcacacctgtaatctcagcactttgggaggctaaggcaggtggatcgcttaagctcaagagtttgagaccagcctggcccgtatggtaaaaccccatctctactg

SEQ ID NO: 340781 - DNA, 1802 bp, Homo sapiens
  misc_feature (1697)..(1697): n is a, c, g, or t
  misc_feature (1747)..(1747): n is a, c, g, or t
  misc_feature (1750)..(1750): n is a, c, g, or t
  misc_feature (1802)..(1802): n is a, c, g, or t
gtgtttgtcgaggaggtttatgtagttttaatatgtgccgtagggcaccgagttctgagcaggtgcgtgtgatgtttgtttattctgagtagagggtcatatggcggttcgttgtggtcatagccgtgtaagcgagtacggcaaaatgttacagttaggattgttcagtggcaggaaactagagtcaaggaatccactcgtctattaggggatggaaatggatgctgataagggatcaggcaaatgtatgctttggatgaaggtcccaatgtgttccaaaagttgcatgcaagtggtatgacgctgggtttagctaaataccgttgggatcaccattgtaaaaatggtgatcgttctatccaccaagaacccgacaatttgagtgaaagtagtctgtcgtactaggccatcaacctgttgtcatgcatacttcgactggggttgcaattagccagtcttgtcttgttgtcttgtctgttgttgttcgataataggttttcaaagtgtttcctcgtcacccaattgatcagaagttgaatgtgcaaacactcgattataagcaggggagaaaatcaacagagatcctgaacagttaagatctgcttcttcattctcatcctcttcttcaagtgaatgttttcaatacagttgtcattcctttgcctctggaattctatcacgatgttatatacatattgtttcccaaatttcattttattttgtttcaagcagagaaacactgaaggttttctgatgctgtgcctgtttcattgctgtttcacctattttgtcagaatgtttgtcgaaaatcttcccaaactccgtgaggatattaaagaaatctccatgtctgatctcaaagactttttggaaagtattcgaaaacattctgacaaaataggtgaaacagcaatgaaacaggcacagcatcagaaaaccttcagtgtttctctgcagaaacaaaataaaatgaaatttgggaaaaatatgtatataaatcgtgatagaattccagaggaaaggaatgaaactgtattgaaacattcacttgaagaagaggatgagaatgaagaagagatcttaactgttcaggatcttgttgatttttcccctgtttatcgatgtttgcacatttattctgttttgggtgacgaggaaacatttgaaaactattatcgaaaacaaagaaagaaacaagcaagactggtattgcaaccccagtcgaatatgcatgaaacagttgatggctatagaagatatttcactcaaattgtagggttctttgtggtagaagatcacattttacatgtgacccaaggattagtaaccagggcatacactgatgaactttggaacatggccctctcaaagataattgctgtccttagagctcattcatcctattgcactgatcctgatcttgttctggagctgaagaatcttattgtaatatttgcagatactttacagggttatggttttccagtgaaccgactttttgaccttttatttgaaataagagaccaatacaatgaaacactgcttaagaaatgggctggagttttcagggacatttttgaagaagataattacagccccatccctgttgtcaatgaagaagaatataaaattgtcatcagcaaatttccctttcaagatccagaccttgaaaagcaagtctttccccccaaaaaaanggaaaaatttcccccaatgggtcctcaaggttccaagtggcccctccaanaantttttacccaattttcaaaagggtttttaaaaaaagggaaaatttttaaaan

SEQ ID NO: 340782 - DNA, 1068 bp, Homo sapiens
gtctttcccaaagaaattccccatgtctcagtcagtgcctcatatttacattcaagttaaagaatttatttatgccagccttaaattttcagagtcactacaccggagctcaacagaaatagacgatatgcttagaaaatcaacaaatctgctgctgaccagaactttgagtagctgtttactgaaccttattagaaaacctcatataggtttgacagagctggtacaaatcatcataaacacaacacacctggagcaagcttgtaaatatcttgaggactttataactaacattacaaatatttcccaagaaactgttcatactacaagactttatggactttctactttcaaggatgctcgacatgcagcagaaggagaaatatataccaaactgaatcaaaaaattgatgaatttgttcagcttgctgattatgactggacaatgtctgagccagatggaagagctagtggttatttaatggaccttataaattttttgagaagcatctttcaagtgtttactcatttgcctgggaaagttgctcagacagcttgcatgtcagcctgccagcatctgtcaacatccttaatgcagatgctactggacagtgagttaaaacaaataagcatggggagctgttcagcagtttaacttagatgtcatacagtgtgaattgtttgccagctctgagcctgtgccaggattcagggggatacctggcagcttgcattcattgacctcagacattccttgaactgtttatgggttcgggagtggcctacttaactagctgatattgggcagcagcttctaagtacctcggtgatccaacacaggactttcccctttggagagatgaggttctagcaaagacaaatattgctcggtcaggagaatgatggacaacgagttgttagcgggggacaacgcggcacttggatgttttccacatgtgcaccctggtgcccggaccaacacgtcatgtggttgcacattgtggtccgttgggaaccaaccgagaaccggccccaacactcctcggtcgccacccttgtcaacacccg

SEQ ID NO: 340783 - DNA, 181 bp, Homo sapiens
agaggaaaggaatgaaactgtattgaaacattcacttgaagaagaggatgagaatgaagaagaggtgataggtgtctttctttcttttctattattagataattttttttcttttggattgtaatgtacatctgtgtgatttagtcttcctgtatgcaaaataaatttatgttgtaaaagt

SEQ ID NO: 340784 - DNA, 1604 bp, Homo sapiens
  misc_feature (2)..(3): n is a, c, g, or t
  misc_feature (9)..(11): n is a, c, g, or t
  misc_feature (1499)..(1499): n is a, c, g, or t
  misc_feature (1549)..(1549): n is a, c, g, or t
  misc_feature (1552)..(1552): n is a, c, g, or t
  misc_feature (1604)..(1604): n is a, c, g, or t
anntcgccnnngtcgttcccgcggcgccgcgcctcgctggctcctcagcttccagccaaaatggcggagaacagcgagagtctgggcaccgtccccgagcacgagcggatcttgcaggagatcgagagcaccgacaccgcctgtgtggggcccaccctccggtctgtgtatgatgaccaaccaaatgcgcacaagaagtttatggaaaagttagatgcttgtatccgtaatcatgacaaggaaattgaaaagatgtgtaattttcatcatcagggttttgtagatgctattacagaactccttaaagtaaggactgatgcagaaaaactgaaggtgcaagttactgataccaaccgaaggtttcaagatgctggaaaagaggtgatagtccacacagaagatatcattcgatgtagaattcagcagagaaatattacaactgtagtagaaaaattgcagttatgccttcctgtgctagaaatgtacagtaagctgaaagaacagatgagtgccaaaaggtactattctgccctaaaaactatggaacaattagagaatgtgtactttccctgggttagtcaataccggttttgtcagctcatgatagaaaatcttcccaaactccgtgaggatattaaagaaatctccatgtctgatctcaaagactttttggaaagtattcgaaaacattctgacaaaataggtgaaacagcaatgaaacaggcacagcatcagaaaaccttcagtgtttctctgcagaaacaaaataaaatgaaatttgggaaaaatatgtatataaatcgtgatagaattccagaggaaaggaatgaaactgtattgaaacattcacttgaagaagaggatgagaatgaagaagagatcttaactgttcaggatcttgttgatttttcccctgtttatcgatgtttgcacatttattctgttttgggtgacgaggaaacatttgaaaactattatcgaaaacaaagaaagaaacaagcaagactggtattgcaaccccagtcgaatatgcatgaaacagttgatggctatagaagatatttcactcaaattgtagggttctttgtggtagaagatcacattttacatgtgacccaaggattagtaaccagggcatacactgatgaactttggaacatggccctctcaaagataattgctgtccttagagctcattcatcctattgcactgatcctgatcttgttctggagctgaagaatcttattgtaatatttgcagatactttacagggttatggttttccagtgaaccgactttttgaccttttatttgaaataagagaccaatacaatgaaacactgcttaagaaatgggctggagttttcagggacatttttgaagaagataattacagccccatccctgttgtcaatgaagaagaatataaaattgtcatcagcaaatttccctttcaagatccagaccttgaaaagcaagtctttccccccaaaaaaanggaaaaatttcccccaatgggtcctcaaggttccaagtggcccctccaanaantttttacccaattttcaaaagggtttttaaaaaaagggaaaatttttaaaan

SEQ ID NO: 340785 - DNA, 2655 bp, Homo sapiens
  misc_feature (2)..(3): n is a, c, g, or t
  misc_feature (9)..(11): n is a, c, g, or t
  misc_feature (632)..(632): n is a, c, g, or t
  misc_feature (2156)..(2156): n is a, c, g, or t
  misc_feature (2193)..(2193): n is a, c, g, or t
anntcgccnnngtcgttcccgcggcgccgcgcctcgctggctcctcagcttccagccaaaatggcggagaacagcgagagtctgggcaccgtccccgagcacgagcggatcttgcaggagatcgagagcaccgacaccgcctgtgtggggcccaccctccggtctgtgtatgatgaccaaccaaatgcgcacaagaagtttatggaaaagttagatgcttgtatccgtaatcatgacaaggaaattgaaaagatgtgtaattttcatcatcagggttttgtagatgctattacagaactccttaaagtaaggactgatgcagaaaaactgaaggtgcaagttactgataccaaccgaaggtttcaagatgctggaaaagaggtgatagtccacacagaagatatcattcgatgtagaattcagcagagaaatattacaactgtagtagaaaaattgcagttatgccttcctgtgctagaaatgtacagtaagctgaaagaacagatgagtgccaaaaggtgagttggtttttttcctattgttttaaataagaatttttttctattattgaaaggacagatacatttactataaatcatagtgaatcatgagttttgctttcttcattacantaacctttgtacttaaaatttgcgcatcaggataatccactaaagcaaatcttagccttttattaataaatcattgtcctttataaatgatatcaaggattggtaatgttgatcaagtacaaatagccgaacaggaatgaaaatattgattagcttaccaacatactaatattgcatgtaactaagggctaagtgcatattgtggaaggaaaagagtgtaggcagttatattttgacagtctgggtgaatgtagtagttcacattctgttttataactcaaatgcatatatgacagttgaaaaagaaagtaatttaaagtagtttattgattgccataggagcattggatatagtgatgtttaaaatattttaaagacgaacagttttggccaggtgtcatggctcatgcttgtaatcccggcactttgggagtctgaggcaagaggatcacttgaacccaggagtttgagaccagcgtgggcaatatagggagacctcatttcacctccccacccccttccccccaaaaaacaaaagaaaaaaaacaaatgattcaaaagtaacatagaaaaaccagaataaattagacaatttggactagggaaaaaatgatttcttcttggttagtaactacttaattatcagaacacatcttatacagacctatagtaaaagatgtgtgtatgtcctgcttcattgtgctacatgttgaatttcattaggctttaccagttaatacaatttagtagaatgattttttccctgtaataaacaagccaaaaactattctgaaagtcttattttctttcacgtatgtattaataatatattctctttttaaatcaatgttatatatcctcacattttaaagattcaaataattttcctacgcgtttgctgccaaaaaaaaaaaaaacagatatcacctttcctatttcccattcaccattccttctttataggagcaaaaacttttacctcttttaatggattattttggtatttatatttatgtctttaaataactaacttttaattattaccatattattttccagtttggggcattatcggtttttcagtaatataatctaatatttatactcacattttctcaactatccccaaaatgtcttacgtctttttccctccctgaaaacattgatttgtatgtgttcttttgtcccttttaatctagaacagtcctcctgttctttgtttttttcatggaagagtgcaggtcagttctcttgtagaccagggcattttggatttatctagttgtttcttcatgtttagattcaagttagaggcttataaagtcatgttgtccttaggttatgctaaatttgatcatttggttaaggggaagtctaccagatgtcttttgaaaaggtatatttttctctttgcaattaataagtaatatgtgggtcctgtttcctaacaggttttcacccagtagttttatcattcttgccttaatccgttattatattggatttacaagatgttgatttaanaaattctattatttcttaaacatttattaactggctnttttatatataaagaagagctttttattccccaccaccaccttttttctttttttccgattatggctgtgaacttacgcatttttaaaataaatatattataatttattattgtcattattcattttgatgcacaaattgtttcaaatttaacaagagaaacttctcaagccaattcctgtgtctttgtctttgagtatttttggtttattgtatcgtaagatgttccaagctctcattgtgccttttttttttttttttgcctcagatctggaagcagccattctccagggtaccctagctccttttagtattaatggtatttagaaactaagatgtatgggttgggagcagtggctcacacctgtaatctcagcactttgggaggctaaggcaggtggatcgcttaagctcaagagtttgagaccagcctggcccgtatggtaaaaccccatctctactg

SEQ ID NO: 340786 - DNA, 243 bp, Homo sapiens
gttctggaaaatcctgttcgtttcagtttctaatagtttactgttgttgctaacaacgtttaagtcaaataagggcagggacctttatccattgtttaccaatttgtgctcactacctaatacagttcctggcacactgtggatgcttaatagttggtattatcagtgaaagaggaaagcactgtataatctagctatagaagagaattcccaatatgttacaaaggcagaacaccgtcgaag

SEQ ID NO: 340787 - DNA, 866 bp, Homo sapiens
ccaggaagtttgtcctcttctctttttcgccatctcgaggtgtctaatcctaaaactatcagcgccatgaattttatttaaaactacgcccagtgaaccgggctctccggatttttcttctgaaaaacactgatgtctttggagaaaagatcatttttgcaagttaaagcagatggtttccttccccttcgctttcccccctctcccactctctttaatagtttagaaaaacattttggccctgtaacttctgattggtatgaatagaagcagttctgtgttgcagtaaggggaaatcacatttttacggggtagaaagttgacactaaatgaagattgtgattttagtattttaaaattaattccgtctaattggatttggttttgcaggcagcatctcatatatgtcgagtacttaacaatttaaagctctgacttgtaaatttatttttcagctctcttttttcgtaattagaatactgtttggacttgctcaacaagaccttatcttaacaaaaagtaacttatagaaaagggagacattcatttaacttcaagcccatattattcttaaaagctgactcttgaaatagtatttatggagtcatagtggagtcatgggactttttaagggccggaagggactatttagatcatccagtcccacctgtcattttatgggggaggaactgagggctagataagataacagttagtgggtccactgacctttaggacagtagtctatccgtaagagacaacatggagaaagaaatacaacgtttttatagtgaattatcatcttacaaagaatattcttcccatatcgcacttttaaaaagtgggtaccttagtcaaataggaga

SEQ ID NO: 340788 - DNA, 506 bp, Homo sapiens
ctcctatggctctgggagcaaaggcacaacaggcagggaagaccccatcgtctccctccctgggatggctgaggagcaaactgcacaacagcgggaggggcctgaagcctgtgttcatcgtgggaaggtggaagatgggaagtgcagagccagtctctccagccaatcccagagctcgctgaacttttcccagcactgggtctactgctggcagccttgctgccaggagcaaccccaagggcctcattaatctaagggtagaaaaacaatcccaggatcccaaggagagagggcaggtggagaggtgcatagagcctgggggaagagtcagtctgcagcaagcatttattgagtgcctactagatgctgagccatgccctgggatataaaaatgagtgaggtagactcaagcgctctccaggctaatgggggagtaaaatccatacataacatttgtgagaagcatggaaaagggagctaagacaagggaccccagcttggcgtgt

SEQ ID NO: 340789 - DNA, 192 bp, Homo sapiens
tcaggaggtaaagggcaatcagaaaaagacaaggagaccattggaaaggagataattggaagaatgacttgtgtggcctgctgggttcaatttcagtcacagagaatgccatcagactaaaacaaatcatgattgaaagcactagtagcaagcttatctcttaatgtttgtgtaagcatctcctccttgcca

SEQ ID NO: 340790 - DNA, 1802 bp, Homo sapiens
agagcacttggcacctgcgacggcgctctccccccacctcacccgcaaggcggcacgagccggaatcttccagtctcaggctgtttgttcccccgcggggcaatgcgactgcgcgtcgcttcctgattggccgagagttgcgggctgcgtgcgcaggcgcctacctctgttacttagggcgggagcccggcgagggcgccggtgctttgttctgtctgaggccaggaagtttgaccgcgctgccatgccgaaccgtaaggccagccggaatgcttactatttcttcgtgcaggagaagatccccgaactacggcgacgaggcctgcctgtggctcgcgttgctgatgccatcccttactgctcctcagactgggcgcttctgagggaggaagaaaaggagaaatacgcagaaatggctcgagaatggagggccgctcagggaaaggaccctgggccctcagagaagcagaaacctgttttcacaccactgaggaggccaggcatgcttgtaccaaagcagaatgtttcacctccagatatgtcagctttgtctttaaaaggtgatcaagctctccttggaggcattttttattttttgaacatttttagccatggcgagctacctcctcattgtgaacagcgcttcctcccttgtgaaattggctgtgttaagtattctctccaagaaggtattatggcagatttccacagttttataaatcctggtgaaattccacgaggatttcgatttcattgtcaggctgcaagtgattctagtcacaagattcctatttcaaattttgaacgtgggcataaccaagcaactgtgttacaaaacctttatagatttattcatcccaacccagggaactggccacctatctactgcaagtctgatgatagaaccagagtcaactggtgtttgaagcatatggcaaaggcatcagaaatcaggcaagatctacaacttctcactgtagaggaccttgtagtggggatctaccaacaaaaatttctcaaggagccctctaagacttggattcgaagcctcctagatgtggccatgtgggattattctagcaacacaaggtgcaagtggcatgaagaaaatgatattctcttctgtgctttagctgtttgcaagaagattgcgtactgcatcagtaattctctggccactctctttggaatccagctcacagaggctcatgtaccactacaagattatgaggccagcaatagtgtgacacccaaaatggttgtattggatgcagggcgttaccagaagctaagggttgggagttcaggattctctcatttcaactcttctaatgaggaacaaagatcaaacacacccattggtgactacccatctagggcaaaaatttctggccaaaacagcagcgttcggggaagaggaattacccgcttactagagagcatttccaattcttccagcaatatccacaaattctccaactgtgacacttcactctcaccttacatgtcccaaaaagatggatacaaatctttctcttccttatcttaatgatggtactcttttcaatttctgaaaacagtaacaggcccaacttccttcttactacagtcatattaaacagatcacatcaatgacaaatgtcactactataaaaactacttaatttgtaaggaaattgtttcatagatttaaaaaaattgtggttggagagcatcttggcatttgtgctttttttcttgagggattgttctgcttcctggctgtatgatgggtatatcattaaagtttggagtcctatatg

SEQ ID NO: 340791 - DNA, 1444 bp, Homo sapiens
agagcacttggcacctgcgacggcgctctccccccacctcacccgcaaggcggcacgagccggaatcttccagtctcaggctgtttgttcccccgcggggcaatgcgactgcgcgtcgcttcctgattggccgagagttgcgggctgcgtgcgcaggcgcctacctctgttacttagggcgggagcccggcgagggcgccggtgctttgttctgtctgaggccaggaagtttgaccgcgctgccatgccgaaccgtaaggccagccggaatgcttactatttcttcgtgcaggagaagatccccgaactacggcgacgaggcctgcctgtggctcgcgttgctgatgccatcccttactgctcctcagactgggcgcttctgagggaggaagaaaaggagaaatacgcagaaatggctcgagaatggagggccgctcagggaaaggaccctgggccctcagagaagcagaaacctgttttcacaccactgaggaggccaggcatgcttgtaccaaagcagaatgtttcacctccagatatgtcagctttgtctttaaaaggtgatcaagctctccttggaggcattttttattttttgaacatttttagccatggcgagctacctcctcattgtgaacagcgcttcctcccttgtgaaattggctgtgttaagtattctctccaagaaggtattatggcagatttccacagttttataaatcctggtgaaattccacgaggatttcgatttcattgtcaggctgcaagtgattctagtcacaagattcctatttcaaattttgaacgtgggcataaccaagcaactgtgttacaaaacctttatagatttattcatcccaacccagggaactggccacctatctactgcaagtctgatgatagaaccagagtcaactggtgtttgaagcatatggcaaaggcatcagaaatcaggcaagatctacaacttctcactgtagaggaccttgtagtggggatctaccaacaaaaatttctcaaggagccctctaagacttggattcgaagcctcctagatgtggccatgtgggattattctagcaacacaagagagtcttgctctgtcaccccagccggaatacagtgacacaatcatagctcactgcagcctggaactcctagagtcaagcagtcctcatgcctcagtctcctgagtagctggtactacaggcatgtgccaccatgcgtacctagttatttttcatttgtcgtggagacagagtcttgctgtgttgcccaggctggtgtcgaacttctggcctcaagtgatcttcctgcctcagccttccaaattgctgggattacaggtgcaagtggcatgaagaaaatgatattctcttctgtgctttagctgtttgcaagaagattgcatactgcagccggtattctctgccacacaaataag

SEQ ID NO: 340792 - DNA, 1912 bp, Homo sapiens
agagcacttggcacctgcgacggcgctctccccccacctcacccgcaaggcggcacgagccggaatcttccagtctcaggctgtttgttcccccgcggggcaatgcgactgcgcgtcgcttcctgattggccgagagttgcgggctgcgtgcgcaggcgcctacctctgttacttagggcgggagcccggcgagggcgccggtgctttgttctgtctgaggccaggaagtttgaccgcgctgccatgccgaaccgtaaggccagccggaatgcttactatttcttcgtgcaggagaagatccccgaactacggcgacgaggcctgcctgtggctcgcgttgctgatgccatcccttactgctcctcagactgggcgcttctgagggaggaagaaaaggagaaatacgcagaaatggctcgagaatggagggccgctcagggaaaggaccctgggccctcagagaagcagaaacctgttttcacaccactgaggaggccaggcatgcttgtaccaaagcagaatgtttcacctccagatatgtcagctttgtctttaaaaggtgatcaagctctccttggaggcattttttattttttgaacatttttagccatggcgagctacctcctcattgtgaacagcgcttcctcccttgtgaaattggctgtgttaagtattctctccaagaaggtattatggcagatttccacagttttataaatcctggtgaaattccacgaggatttcgatttcattgtcaggctgcaagtgattctagtcacaagattcctatttcaaattttgaacgtgggcataaccaagcaactgtgttacaaaacctttatagatttattcatcccaacccagggaactggccacctatctactgcaagtctgatgatagaaccagagtcaactggtgtttgaagcatatggcaaaggcatcagaaatcaggcaagatctacaacttctcactgtagaggaccttgtagtggggatctaccaacaaaaatttctcaaggagccctctaagacttggattcgaagcctcctagatgtggccatgtgggattattctagcaacacaaggtgcaagtggcatgaagaaaatgatattctcttctgtgctttagctgtttgcaagaagattgcgtactgcatcagtaattctctggccactctctttggaatccagctcacagaggctcatgtaccactacaagattatgaggccagcaatagtgtgacacccaaaatggttgtattggatgcagggcgttaccagaagctaagggttgggagttcaggattctctcatttcaactcttctaatgaggaacaaagatcaaacacacccattggtgactacccatctagggcaaaaatttctggccaaaacagcagcgttcggggaagaggaattacccgcttactagagagcatttccaattcttccagcaatatccacaaattctccaactgtgacacttcactctcaccttacatgtcccaaaaagatggatacaaatctttctcttccttatcttaatgatggtactcttttcaatttctgaaaacagtaacaggcccaacttccttcttactacagtcatattaaacagatcacatcaatgacaaatgtcactactataaaaactacttaatttgtaaggaaattgtttcatagatttaaaaaaattgtggttggagagcatcttggcatttgtgctttttttcttgagggattgttctgcttcctggctgtatgatgggtatatcattaaagtttggagtcctatatgaacaaaactgacatttttagagttgtacttttgggaatgttatagattgatcattctttctcctgataataaaggtattgaatatctgttatgaaaggttctaaaatagt

SEQ ID NO: 340793 - DNA, 2169 bp, Homo sapiens
agagcacttggcacctgcgacggcgctctccccccacctcacccgcaaggcggcacgagccggaatcttccagtctcaggctgtttgttcccccgcggggcaatgcgactgcgcgtcgcttcctgattggccgagagttgcgggctgcgtgcgcaggcgcctacctctgttacttagggcgggagcccggcgagggcgccggtgctttgttctgtctgaggccaggaagtttgaccgcgctgccatgccgaaccgtaaggccagccggaatgcttactatttcttcgtgcaggagaagatccccgaactacggcgacgaggcctgcctgtggctcgcgttgctgatgccatcccttactgctcctcagactgggcgcttctgagggaggaagaaaaggagaaatacgcagaaatggctcgagaatggagggccgctcagggaaaggaccctgggccctcagagaagcagaaacctgttttcacaccactgaggaggccaggcatgcttgtaccaaagcagaatgtttcacctccagatatgtcagctttgtctttaaaaggtgatcaagctctccttggaggcattttttattttttgaacatttttagccatggcgagctacctcctcattgtgaacagcgcttcctcccttgtgaaattggctgtgttaagtattctctccaagaaggtattatggcagatttccacagttttataaatcctggtgaaattccacgaggatttcgatttcattgtcaggctgcaagtgattctagtcacaagattcctatttcaaattttgaacgtgggcataaccaagcaactgtgttacaaaacctttatagatttattcatcccaacccagggaactggccacctatctactgcaagtctgatgatagaaccagagtcaactggtgtttgaagcatatggcaaaggcatcagaaatcaggcaagatctacaacttctcactgtagaggaccttgtagtggggatctaccaacaaaaatttctcaaggagccctctaagacttggattcgaagcctcctagatgtggccatgtgggattattctagcaacacaagagagtcttgctctgtcaccccagccggaatacagtgacacaatcatagctcactgcagcctggaactcctagagtcaagcagtcctcatgcctcagtctcctgagtagctggtactacaggcatgtgccaccatgcgtacctagttatttttcatttgtcgtggagacagagtcttgctgtgttgcccaggctggtgtcgaacttctggcctcaagtgatcttcctgcctcagccttccaaattgctgggattacaggtgcaagtggcatgaagaaaatgatattctcttctgtgctttagctgtttgcaagaagattgcgtactgcatcagtaattctctggccactctctttggaatccagctcacagaggctcatgtaccactacaagattatgaggccagcaatagtgtgacacccaaaatggttgtattggatgcagggcgttaccagaagctaagggttgggagttcaggattctctcatttcaactcttctaatgaggaacaaagatcaaacacacccattggtgactacccatctagggcaaaaatttctggccaaaacagcagcgttcggggaagaggaattacccgcttactagagagcatttccaattcttccagcaatatccacaaattctccaactgtgacacttcactctcaccttacatgtcccaaaaagatggatacaaatctttctcttccttatcttaatgatggtactcttttcaatttctgaaaacagtaacaggcccaacttccttcttactacagtcatattaaacagatcacatcaatgacaaatgtcactactataaaaactacttaatttgtaaggaaattgtttcatagatttaaaaaaattgtggttggagagcatcttggcatttgtgctttttttcttgagggattgttctgcttcctggctgtatgatgggtatatcattaaagtttggagtcctatatgaacaaaactgacatttttagagttgtacttttgggaatgttatagattgatcattctttctcctgataataaaggtattgaatatctgttatgaaaggttctaaaatagt

SEQ ID NO: 340794 - DNA, 1819 bp, Homo sapiens
agagcacttggcacctgcgacggcgctctccccccacctcacccgcaaggcggcacgagccggaatcttccagtctcaggctgtttgttcccccgcggggcaatgcgactgcgcgtcgcttcctgattggccgagagttgcgggctgcgtgcgcaggcgcctacctctgttacttagggcgggagcccggcgagggcgccggtgctttgttctgtctgaggccaggaagtttgaccgcgctgccatgccgaaccgtaaggccagccggaatgcttactatttcttcgtgcaggagaagatccccgaactacggcgacgaggcctgcctgtggctcgcgttgctgatgccatcccttactgctcctcagactgggcgaaacctgttttcacaccactgaggaggccaggcatgcttgtaccaaagcagaatgtttcacctccagatatgtcagctttgtctttaaaaggtgatcaagctctccttggaggcattttttattttttgaacatttttagccatggcgagctacctcctcattgtgaacagcgcttcctcccttgtgaaattggctgtgttaagtattctctccaagaaggtattatggcagatttccacagttttataaatcctggtgaaattccacgaggatttcgatttcattgtcaggctgcaagtgattctagtcacaagattcctatttcaaattttgaacgtgggcataaccaagcaactgtgttacaaaacctttatagatttattcatcccaacccagggaactggccacctatctactgcaagtctgatgatagaaccagagtcaactggtgtttgaagcatatggcaaaggcatcagaaatcaggcaagatctacaacttctcactgtagaggaccttgtagtggggatctaccaacaaaaatttctcaaggagccctctaagacttggattcgaagcctcctagatgtggccatgtgggattattctagcaacacaaggtgcaagtggcatgaagaaaatgatattctcttctgtgctttagctgtttgcaagaagattgcgtactgcatcagtaattctctggccactctctttggaatccagctcacagaggctcatgtaccactacaagattatgaggccagcaatagtgtgacacccaaaatggttgtattggatgcagggcgttaccagaagctaagggttgggagttcaggattctctcatttcaactcttctaatgaggaacaaagatcaaacacacccattggtgactacccatctagggcaaaaatttctggccaaaacagcagcgttcggggaagaggaattacccgcttactagagagcatttccaattcttccagcaatatccacaaattctccaactgtgacacttcactctcaccttacatgtcccaaaaagatggatacaaatctttctcttccttatcttaatgatggtactcttttcaatttctgaaaacagtaacaggcccaacttccttcttactacagtcatattaaacagatcacatcaatgacaaatgtcactactataaaaactacttaatttgtaaggaaattgtttcatagatttaaaaaaattgtggttggagagcatcttggcatttgtgctttttttcttgagggattgttctgcttcctggctgtatgatgggtatatcattaaagtttggagtcctatatgaacaaaactgacatttttagagttgtacttttgggaatgttatagattgatcattctttctcctgataataaaggtattgaatatctgttatgaaaggttctaaaatagt

SEQ ID NO: 340795 - DNA, 553 bp, Homo sapiens
ctgcagcaagttatccagaagttctagctgagatcaatgatgaaggtggttacactaaataacaaattttcagtgtaaatgaaacagccttctattggaagaagatactgtgtaggacattcattgctagagagaagtcaatgcctgggttcaaagcttctaaggacaggatgcctctcttcttatgggctagtgcagatgatgactttaagtcgaagccagtgcttaccattcagaaaatcctaaggcccttaagaattatgtttactatctattctgcttgtaccctgtaaatggaacaacaaagcctggatgacagcccatctttttacagcatggtttactgatttttttttttagttttatttttcttattttaaaaattgtgtatatttaaggcatatgtcacagttttgttttttttttttttaacatatgagtgagaacaactgtccctcacctattttgggagaagagggtagatgaagaagaagtgggttaaagggtacaaacatacagcgagctaaaaggaatgaattcagtgtttgatagc

SEQ ID NO: 340796 - DNA, 414 bp, Homo sapiens
aactgtactcagccatccggagacacttcagccccatccccttcctaaaaaaacaagtatcagttgaactttcatacatggaatggatgtttcaaacacccttttatcacctcccactggagattacatttgcaagcagcaaaagacccctgtgtaatgaaatgaaccccctaactggcttttggtgtagcttgagatttccaatttccatgcattggctataacaggcctggctacctgctgagggttgcccaaggtgtatgaacctgtaagggtgatccccggtggaactaaggttagggaagtcctagatgggggatttcctaggaagctgtgagccgagagagagaacgggagctggaacgggagagaacctgaggaccctgaggccaagcctgcttctcactgctgtcc

SEQ ID NO: 340797 - DNA, 347 bp, Homo sapiens
aggtccgatgattctctgcagcggaaagcgcactgggaggggacagaggaagggccaagggcaggtggccatgcagccgacttggcttggtgcagggaggccagagacctctgctcttccctgagcttaggggaggcctccagtccggcacgaatgactgcagtgttttcacaggggcaattctgtacagtcgcagccggatgtcgctgaatgtcctattttagggggtccacgccagctctgatagcatcgcttctcagttactcttttggaagttggccttttccttgcgagaacacctgattcctggcaaagggttccgtttttaggacaggtcgtgagagtgc

SEQ ID NO: 340798 - DNA, 559 bp, Homo sapiens
gtgggtggatcacttgagcccaggagttcaagactagcccgggcaacatgacagaaccccatcgctacaaaaaatacaaaaatttagctgggcatggtggcagacgcctgtgttcccagctactcaggaggctgagatgggaggaacacctgagcccaggaggtagaggctatagtgagaagtgatcgtgccactgcactctagtctaggtgacacaacaagatcctgtctcaaaaaaaaaatttgaaaggcgggggggaacactgatagaaaaaaagattttgtcaaaaaacatgaaattctgctttgtggttttaaagtattttcactataatcgccatttatttttattataggccttagataaggggaaaagtcttttaagagttattcctggccaagcatggtggctcatgcctgtaatcccagcactttgggaggccaaggcgtgtggatcacctgaggtcaggagttcgagaccatcctggccaacatggtgaaaccccgtctctactaaaaatacaaaagttagccaggcgtggtggcacatgtctgtaat

SEQ ID NO: 340799 - DNA, 539 bp, Homo sapiens
ctcgcgaacgtgttatccctcgcgaacgtgttatccctcgcgaacgtgttatccctcgcgaacgtgttatccctcgcgaacgtgttatccctcgcgaacgtgtatatccccattgctaagcaatgcatgactaaatttttataacttcctaagaggttatcccctcttcgccactcccactcctttcagccctacatcatttctcatcttagccaccacagtatccttctaactcatctccctgtccagatttgaaaacattcctgaacacaccccacactactgccagtgatcatctaaaagcatccctttctgaaaacacttataatgaaatccaaatcccatggcataccatataaagttctattcctggcctacatttccaacctaatttagagaactatttgtagttccccaaactcatcatactacttccaatgtccatgcttttgcttggaaagcctttccctgtttttcacctagtcaaaaggtgactttacttctttaaagactcaactcatataccaggtactctgagc

SEQ ID NO: 340800 - DNA, 529 bp, Homo sapiens
tgaactatgtggaattgacttttttcacttttttttttccatagaactctttcaacctatgggaggtagggacttctgccctccaagttttcatcgtgattccaaatgcactactgaagtggcattgctttctttgctattaaacatgggttttctgcttcttctagagagttcttttcctaatggaggtcagcaaactgcaaggcctagcaatgattgatcccagtcccatacagcattttacaaagccaaagtaacagcagcctgagccatggcacagtaaaagtggttttacatttccaatgcctgtcctaaagtagttttagaggtcagcattgatcaataaatcattctgatcacatgtatcctctctgggggcccattagctagtggtgatgacttagtcatctcaccatcagcttcattagtccagaagtcgctgggaccacaagttcaaatccctgttgagctgatgtagctcttggtcttcctgaagtagataaattgagcttcacatagtttgtcgtgc

SEQ ID NO: 340801 - DNA, 178 bp, Homo sapiens
attagggtgctgctaggttttcctgcagaaggagtaagtacagcatttcctcctgtggggctgggagaataccatttgtgttagactcactattatgtatgtgtactttttggtcgtgataatttctaacatttcttaaacacttactgtgtggaggtagtatgctaagtctttattt

SEQ ID NO: 340802 - DNA, 485 bp, Homo sapiens
cgccaaaatccagaagttcaagaccagcttggacaacaaagtgagaccctgtgtctacaaaaaatttttttaattaaccaggtgtggtggagcacacctgtgtagtcccagctacttgggaggctgagaagggagcgtcacttgagcccaggagtttgaggctgcagggagctatcttggtgccactacactctagcctgggtgatagagcaagaccctgtctctgaaaaacaacaaaaataaaaataaatttaaaagaatagtgcagtgagcacccacataacctagagattcaccaattgttaacatcttgccatgttcgtttacatgctctctctttctccatgtatctattttttttatgcacacacttttttttgttgccaactttggaaagtaagttgcagacaaaataaatacttcatctctaaatacttcggtatgtatgttggaaaaaaatttaagttttatttttcctttgctct

SEQ ID NO: 340803 - DNA, 215 bp, Homo sapiens
caacaatagaggtcgaagtgcagtgcaattagctgtccatcaggcagacagtaactactgtaactgttcatataaagatctggtttactataaagttttattaactttaatgttatgaaatgtctgtataaaatatgtagatgcgaatatcaaggcagggaacaacaaacttcagaaacatggttatttcaagagaaggatgcttggcaaaaaga

SEQ ID NO: 340804 - DNA, 723 bp, Homo sapiens
atgaagagatcagggctagagccagatggcctgaattcaaatcctgctttctcctctctagctgtgtagtagctgtgggcaagttacttaaactctttgagcctctgatttctcacctgtccagggcgggtatgaacaggcccacctcacagtgttgcaaggattcagtgagttcgcatgaagtgattagaagtgattggggctgggtgcggtggctcacgcctgtaatcccagaactttgggaggctgaggcaggcagatcacttgaggccgggagttcgagaccagcctgaccaacatggagaaaccctgtctctactaaaaatgcaaaattagccggacgtggtagcacatgcctgtaatcccagctactcgggaggctgaggcaggagaatcgcttgaacctgggaagcggaggttgcagtgagccgagattgcgccattgcactccagcctgggcaacaagagcaaaaaaaaagaagtgattgggctgactgagtccacgccacatgaagggattagaagcgatgcatagtgaatgtgcagaaagtcctctcttaaggattagggtcaagaagaaaaagaaaggaaagggaaagtgctcaccatttgagacctgtctggaaattgctgtacttagtgtaaatttcttctcagcttcaacatctttgatcgtgattttatcaggaaaatactaataaagccactgttttgttcaacttc

SEQ ID NO: 340805 - DNA, 2212 bp, Homo sapiens
gctgctgcgccgcgctcccggcgcactcggagcccggcggggaccgggaggcagagacggggcggccgtggctccgagggcgggagctgagccgggccccgggaccgaagtttggcggcggctccgggaggcagagcgggctccccgggcgacttccaggcccctctcgcgtcctcgccccggacccgtgggcagccgggggggacggaagccgcggccgggccaactccgaggcggggacgccgcgacgggaacttgaggcccgagagggatgtgaaggcccaaaatgaccctcttaccgggagacaattctgactacgactacagcgcgctgagctgcacctcggacgcctccttccacccggccttcctcccgcagcgccaggccatcaagggcgcgttctaccgccgggcgcagcggctgcggccgcaggatgagccccgccagggctgtcagcccgaggaccgccgccgtcggatcatcatcaacgtaggcggcatcaagtactcgctgccctggaccacgctggacgagttcccgctgacgcgcctgggccagctcaaggcctgcaccaacttcgacgacatcctcaacgtgtgcgatgactacgacgtcacctgcaacgagttcttcttcgaccgcaacccgggggccttcggcactatcctgaccttcctgcgcgcgggcaagctgcggctgctgcgcgagatgtgcgcgctgtccttccaggaggagctgctgtactggggcatcgcggaggaccacctggacggctgctgcaagcgccgctacctgcagaagattgaggagttcgcggagatggtggagcgggaggaagaggacgacgcgctggacagcgagggccgcgacagcgagggcccggccgagggcgagggccgcctggggcgctgcatgcggcgactgcgcgacatggtggagaggccgcactcggggctgcctggcaaggtgttcgcctgcctgtcggtgctcttcgtgaccgtcaccgccgtcaacctctccgtcagcaccttgcccagcctgagggaggaggaggagcagggccactgttcccagatgtgccacaacgtcttcatcgtggagtcggtgtgcgtgggctggttctccctggagttcctcctgcggctcattcaggcgcccagcaagttcgccttcctgcggagcccgctgacgctgatcgacctggtggccatcctgccctactacatcacgctgctggtggacggcgccgccgcaggccgtcgcaagcccggcgcgggcaacagctacctggacaaggtggggctggtgctgcgcgtgctgcgggcgctgcgcatcctgtacgtgatgcgcctggcgcgccactccctggggctgcagacgctggggctcacggcccgccgctgcacccgcgagttcgggctcctgctgctcttcctctgcgtggccatcgccctcttcgcgcccctgctctacgtcatcgagaacgagatggccgacagccccgagttcaccagcatccctgcctgctactggtgggctgtcatcaccatgacgacggtgggctatggcgacatggtccccaggagcaccccgggccaggtagtggccctgagcagcatcctgagcggcatcctgctcatggccttcccagtcacctccatcttccacaccttctcccgctcctacctggagctcaagcaggagcaagagagggtgatgttccggagggcgcagttcctcatcaaaaccaagtcgcagctgagcgtgtcccaggacagtgacatcttgttcggaagtgcctcctcggacaccagagacaataactgagcgcggaggacacgcctgccctgcctgccatctgtggcccgaagccattgccatccactgcagacgcctggagagggacaggccgcttccgagtgcagtcctggcgcagcaccgactcccacgcacccggggaaggacaccctcactcccacaccccgggaagaacactagaacatcagcagaggggccctgcccctccgcctgcagccgtgaaaggaagctgggtcatcagcccagccccgcccaccccagcccctatgtgtgtttccctcaataaggagatgccttgttcttttcaccatgcaaataacatgcccagcaaaaacttgctttatgggtctgcctggagaaaaaaaaaaaaaatacaaacagcagaaacagcat

SEQ ID NO: 340806 - DNA, 2486 bp, Homo sapiens
gctgctgcgccgcgctcccggcgcactcggagcccggcggggaccgggaggcagagacggggcggccgtggctccgagggcgggagctgagccgggccccgggaccgaagtttggcggcggctccgggaggcagagcgggctccccgggcgacttccaggcccctctcgcgtcctcgccccggacccgtgggcagccgggggggacggaagccgcggccgggccaactccgaggcggggacgccgcgacgggaacttgaggtgggaactttgcgcgctgcagcctcgccgggcgccaccgaagcgcgaaccggaccccgagcctgcaaactcgggctcgggggcggctgcacgtggccgtggccctgaactccctgcgggggcctcgaaacccgcctgcggggaggccagggcgacagaggactcgggagtcaccgctggtgcgtggcggcgtggagcgcgcttgttacggccaagggagcaggctgcctaatgaaggagccaggcttgcacacagacaattctagaactggtggcccgagagggatgtgaaggcccaaaatgaccctcttaccgggagacaattctgactacgactacagcgcgctgagctgcacctcggacgcctccttccacccggccttcctcccgcagcgccaggccatcaagggcgcgttctaccgccgggcgcagcggctgcggccgcaggatgagccccgccagggctgtcagcccgaggaccgccgccgtcggatcatcatcaacgtaggcggcatcaagtactcgctgccctggaccacgctggacgagttcccgctgacgcgcctgggccagctcaaggcctgcaccaacttcgacgacatcctcaacgtgtgcgatgactacgacgtcacctgcaacgagttcttcttcgaccgcaacccgggggccttcggcactatcctgaccttcctgcgcgcgggcaagctgcggctgctgcgcgagatgtgcgcgctgtccttccaggaggagctgctgtactggggcatcgcggaggaccacctggacggctgctgcaagcgccgctacctgcagaagattgaggagttcgcggagatggtggagcgggaggaagaggacgacgcgctggacagcgagggccgcgacagcgagggcccggccgagggcgagggccgcctggggcgctgcatgcggcgactgcgcgacatggtggagaggccgcactcggggctgcctggcaaggtgttcgcctgcctgtcggtgctcttcgtgaccgtcaccgccgtcaacctctccgtcagcaccttgcccagcctgagggaggaggaggagcagggccactgttcccagatgtgccacaacgtcttcatcgtggagtcggtgtgcgtgggctggttctccctggagttcctcctgcggctcattcaggcgcccagcaagttcgccttcctgcggagcccgctgacgctgatcgacctggtggccatcctgccctactacatcacgctgctggtggacggcgccgccgcaggccgtcgcaagcccggcgcgggcaacagctacctggacaaggtggggctggtgctgcgcgtgctgcgggcgctgcgcatcctgtacgtgatgcgcctggcgcgccactccctggggctgcagacgctggggctcacggcccgccgctgcacccgcgagttcgggctcctgctgctcttcctctgcgtggccatcgccctcttcgcgcccctgctctacgtcatcgagaacgagatggccgacagccccgagttcaccagcatccctgcctgctactggtgggctgtcatcaccatgacgacggtgggctatggcgacatggtccccaggagcaccccgggccaggtagtggccctgagcagcatcctgagcggcatcctgctcatggccttcccagtcacctccatcttccacaccttctcccgctcctacctggagctcaagcaggagcaagagagggtgatgttccggagggcgcagttcctcatcaaaaccaagtcgcagctgagcgtgtcccaggacagtgacatcttgttcggaagtgcctcctcggacaccagagacaataactgagcgcggaggacacgcctgccctgcctgccatctgtggcccgaagccattgccatccactgcagacgcctggagagggacaggccgcttccgagtgcagtcctggcgcagcaccgactcccacgcacccggggaaggacaccctcactcccacaccccgggaagaacactagaacatcagcagaggggccctgcccctccgcctgcagccgtgaaaggaagctgggtcatcagcccagccccgcccaccccagcccctatgtgtgtttccctcaataaggagatgccttgttcttttcaccatgcaaataacatgcccagcaaaaacttgctttatgggtctgcctggagaaaaaaaaaaaaaatacaaacagcagaaacagcat

SEQ ID NO: 340807 - DNA, 2390 bp, Homo sapiens
ctgctgccgagacaggatcactttccacacaggaaactcacgtgggggcagggcgtgaaggaaataaatcactaattgggggagttttctgctggagggaaagctgggagggttgaaagaagaaattcctaaaaagaagaggtgattacagccatggggattcacaagagccctccagggcttgtgtgaggcattttccgtttacctccatcaccattcttgccaaacagaatgtcactttttctcttttctgtggtagcaaagatgaaacagcagagctgaaaagagagatcaccaaggaaagtgcctgaaagggattattcccacgcctccaaaggatcctggcaggctgtgcctgaggagatgggttccaattttagggagcaggctgcctaatgaaggagccaggcttgcacacagacaattctagaactggtggcccgagagggatgtgaaggcccaaaatgaccctcttaccgggagacaattctgactacgactacagcgcgctgagctgcacctcggacgcctccttccacccggccttcctcccgcagcgccaggccatcaagggcgcgttctaccgccgggcgcagcggctgcggccgcaggatgagccccgccagggctgtcagcccgaggaccgccgccgtcggatcatcatcaacgtaggcggcatcaagtactcgctgccctggaccacgctggacgagttcccgctgacgcgcctgggccagctcaaggcctgcaccaacttcgacgacatcctcaacgtgtgcgatgactacgacgtcacctgcaacgagttcttcttcgaccgcaacccgggggccttcggcactatcctgaccttcctgcgcgcgggcaagctgcggctgctgcgcgagatgtgcgcgctgtccttccaggaggagctgctgtactggggcatcgcggaggaccacctggacggctgctgcaagcgccgctacctgcagaagattgaggagttcgcggagatggtggagcgggaggaagaggacgacgcgctggacagcgagggccgcgacagcgagggcccggccgagggcgagggccgcctggggcgctgcatgcggcgactgcgcgacatggtggagaggccgcactcggggctgcctggcaaggtgttcgcctgcctgtcggtgctcttcgtgaccgtcaccgccgtcaacctctccgtcagcaccttgcccagcctgagggaggaggaggagcagggccactgttcccagatgtgccacaacgtcttcatcgtggagtcggtgtgcgtgggctggttctccctggagttcctcctgcggctcattcaggcgcccagcaagttcgccttcctgcggagcccgctgacgctgatcgacctggtggccatcctgccctactacatcacgctgctggtggacggcgccgccgcaggccgtcgcaagcccggcgcgggcaacagctacctggacaaggtggggctggtgctgcgcgtgctgcgggcgctgcgcatcctgtacgtgatgcgcctggcgcgccactccctggggctgcagacgctggggctcacggcccgccgctgcacccgcgagttcgggctcctgctgctcttcctctgcgtggccatcgccctcttcgcgcccctgctctacgtcatcgagaacgagatggccgacagccccgagttcaccagcatccctgcctgctactggtgggctgtcatcaccatgacgacggtgggctatggcgacatggtccccaggagcaccccgggccaggtagtggccctgagcagcatcctgagcggcatcctgctcatggccttcccagtcacctccatcttccacaccttctcccgctcctacctggagctcaagcaggagcaagagagggtgatgttccggagggcgcagttcctcatcaaaaccaagtcgcagctgagcgtgtcccaggacagtgacatcttgttcggaagtgcctcctcggacaccagagacaataactgagcgcggaggacacgcctgccctgcctgccatctgtggcccgaagccattgccatccactgcagacgcctggagagggacaggccgcttccgagtgcagtcctggcgcagcaccgactcccacgcacccggggaaggacaccctcactcccacaccccgggaagaacactagaacatcagcagaggggccctgcccctccgcctgcagccgtgaaaggaagctgggtcatcagcccagccccgcccaccccagcccctatgtgtgtttccctcaataaggagatgccttgttcttttcaccatgcaaataacatgcccagcaaaaacttgctttatgggtctgcctggagaaaaaaaaaaaaaatacaaacagcagaaacagcat

SEQ ID NO: 340808 - DNA, 2219 bp, Homo sapiens
  misc_feature (1988)..(1988): n is a, c, g, or t
  misc_feature (2105)..(2106): n is a, c, g, or t
gctgctgcgccgcgctcccggcgcactcggagcccggcggggaccgggaggcagagacggggcggccgtggctccgagggcgggagctgagccgggccccgggaccgaagtttggcggcggctccgggaggcagagcgggctccccgggcgacttccaggcccctctcgcgtcctcgccccggacccgtgggcagccgggggggacggaagccgcggccgggccaactccgaggcggggacgccgcgacgggaacttgaggtgggaactttgcgcgctgcagcctcgccgggcgccaccgaagcgcgaaccggaccccgagcctgcaaactcgggctcgggggcggctgcacgtggccgtggccctgaactccctgcgggggcctcgaaacccgcctgcggggaggccagggcgacagaggactcgggagtcaccgctggtgcgtggcggcgtggagcgcgcttgttacggccaagggagcaggctgcctaatgaaggagccaggcttgcacacagacaattctagaactggtggcccgagagggatgtgaaggcccaaaatgaccctcttaccgggagacaattctgactacgactacagcgcgctgagctgcacctcggacgcctccttccacccggccttcctcccgcagcgccaggccatcaagggcgcgttctaccgccgggcgcagcggctgcggccgcaggatgagccccgccagggctgtcagcccgaggaccgccgccgtcggatcatcatcaacgtaggcggcatcaagtactcgctgccctggaccacgctggacgagttcccgctgacgcgcctgggccagctcaaggcctgcaccaacttcgacgacatcctcaacgtgtgcgatgactacgacgtcacctgcaacgagttcttcttcgaccgcaacccgggggccttcggcactatcctgaccttcctgcgcgcgggcaagctgcggctgctgcgcgagatgtgcgcgctgtccttccaggaggagctgctgtactggggcatcgcggaggaccacctggacggctgctgcaagcgccgctacctgcagaagattgaggagttcgcggagatggtggagcgggaggaagaggacgacgcgctggacagcgagggccgcgacagcgagggcccggccgagggcgagggccgcctggggcgctgcatgcggcgactgcgcgacatggtggagaggccgcactcggggctgcctggcaaggtgttcgcctgcctgtcggtgctcttcgtgaccgtcaccgccgtcaacctctccgtcagcaccttgcccagcctgagggaggaggaggagcaggtaagagcccacgccccgcggggaaacgcgccaccacgagggaagggactctgagcattgtcacctcctccagaaagcctcctctgattgcacactggctgaatagcatccctggtccctcctgacatcaggaatgtttgtgtgcatggtctgcctccctgttaatatgtgagcatcatgggggtccacgcctgtgcctgtcctggcctccactgtgcccaccactgccctcccccttgccagtgtttagaacagtgtccagcacaaacaggcactcaaccactatttgttgaatgaacaaatgagtgaataaatgggtggtgtgatttttgacgtgcctggccctgagcgaagcacattacatatatcatcaaatttatctcaaccattcggtcctttctcaacgttcctaatcctttgcatcatagtagcccagacacattttctgggtcctgaagataatttttattgataggtacatgtgtgtctacaaatggtgagcatttctttttgttacataagagaatgaatggaaagtttatttactccagggcctgacacggggtgtgtgctacagtctaagggctcccactcatctgggagttcacgggagccggagctgggctgcatgtgccaactacgtcttatctcccnagggaatgctccagcaaccctgtgggggaagtgttttcacacccactaggtatttgaggacactgcccaaccccaggtctaagtccagtctgtctttgtaagcatggaaatatggtnnccacgtggcagcttggggacctaatatagccccacaggactatgtgattggcccacacaaggtttcccaaaaatttgacttggttgccaacaataaaagtgaagttttttcat

SEQ ID NO: 340809 - DNA, 1186 bp, Homo sapiens
gctgctgcgccgcgctcccggcgcactcggagcccggcggggaccgggaggcagagacggggcggccgtggctccgagggcgggagctgagccgggccccgggaccgaagtttggcggctcattcaggcgcccagcaagttcgccttcctgcggagcccgctgacgctgatcgacctggtggccatcctgccctactacatcacgctgctggtggacggcgccgccgcaggccgtcgcaagcccggcgcgggcaacagctacctggacaaggtggggctggtgctgcgcgtgctgcgggcgctgcgcatcctgtacgtgatgcgcctggcgcgccactccctggggctgcagacgctggggctcacggcccgccgctgcacccgcgagttcgggctcctgctgctcttcctctgcgtggccatcgccctcttcgcgcccctgctctacgtcatcgagaacgagatggccgacagccccgagttcaccagcatccctgcctgctactggtgggctgtcatcaccatgacgacggtgggctatggcgacatggtccccaggagcaccccgggccaggtagtggccctgagcagcatcctgagcggcatcctgctcatggccttcccagtcacctccatcttccacaccttctcccgctcctacctggagctcaagcaggagcaagagagggtgatgttccggagggcgcagttcctcatcaaaaccaagtcgcagctgagcgtgtcccaggacagtgacatcttgttcggaagtgcctcctcggacaccagagacaataactgagcgcggaggacacgcctgccctgcctgccatctgtggcccgaagccattgccatccactgcagacgcctggagagggacaggccgcttccgagtgcagtcctggcgcagcaccgactcccacgcacccggggaaggacaccctcactcccacaccccgggaagaacactagaacatcagcagaggggccctgcccctccgcctgcagccgtgaaaggaagctgggtcatcagcccagccccgcccaccccagcccctatgtgtgtttccctcaataaggagatgccttgttcttttcaccatgcaaataacatgcccagcaaaaacttgctttatgggtctgcctggagaaaaaaaaaaaaaatacaaacagcagaaacagcat

SEQ ID NO: 340810 - DNA, 1837 bp, Homo sapiens
gctgctgcgccgcgctcccggcgcactcggagcccggcggggaccgggaggcagagacggggcggccgtggctccgagggcgggagctgagccgggccccgggaccgaagtttggcggcggctccgggaggcagagcgggctccccgggcgacttccaggcccctctcgcgtcctcgccccggacccgtgggcagccgggggggacggaagccgcggccgggccaactccgaggcggggacgccgcgacgggaacttgaggcccgagagggatgtgaaggcccaaaatgaccctcttaccgggagacaattctgactacgactacagcgcgctgagctgcacctcggacgcctccttccacccggccttcctcccgcagcgccaggccatcaagggcgcgttctaccgccgggcgcagcggctgcggccgcaggatgagccccgccagggctgtcagcccgaggaccgccgccgtcggatcatcatcaacgtaggcggcatcaagtactcgctgccctggaccacgctggacgagttcccgctgacgcgcctgggccagctcaaggcctgcaccaacttcgacgacatcctcaacgtgtgcgatgactacgacgtcacctgcaacgagttcttcttcgaccgcaacccgggggccttcggcactatcctgaccttcctgcgcgcgggcaagctgcggctgctgcgcgagatgtgcgcgctgtccttccaggaggagctgctgtactggggcatcgcggaggaccacctggacggctgctgcaagcgccgctacctgcagaagattgaggagttcgcggagatggtggagcgggaggaagaggacgacgcgctggacagcgagggccgcgacagcgagggcccggccgagggcgagggccgcctggggcgctgcatgcggcgactgcgcgacatggtggagaggccgcactcggggctgcctggcaaggtgttcgcctgcctgtcggtgctcttcgtgaccgtcaccgccgtcaacctctccgtcagcaccttgcccagcctgagggaggaggaggagcaggtaagagcccacgccccgcggggaaacgcgccaccacgagggaagggactctgagcattgtcacctcctccagaaagcctcctctgattgcacactggctgaatagcatccctggtccctcctgacatcaggaatgtttgtgtgcatggtctgcctccctgttaatatgtgagcatcatgggggtccacgcctgtgcctgtcctggcctccactgtgcccaccactgccctcccccttgccagtgtttagaacagtgtccagcacaaacaggcactcaaccactatttgttgaatgaacaaatgagtgaataaatgggtggtgtgatttttgacgtgcctggccctgagcgaagcacattacatatatcatcaaatttatctcaaccattcggtcctttctcaacgttcctaatcctttgcatcatagtagcccagacacattttctgggtcctgaagataatttttattgataggtacatgtgtgtctacaaatggtgagcatttctttttgttacaagagcaaaaaaaaagaagtgattgggctgactgagtccacgccacatgaagggattagaagcgatgcatagtgaatgtgcagaaagtcctctcttaaggattagggtcaagaagaaaaagaaaggaaagggaaagtgctcaccatttgagacctgtctggaaattgctgtacttagtgtaaatttcttctcagcttcaacatctttgatcgtgattttatcaggaaaatactaataaagccactgttttgttcaacttc

SEQ ID NO: 340811 - DNA, 965 bp, Homo sapiens
gctgctgcgccgcgctcccggcgcactcggagcccggcggggaccgggaggcagagacggggcggccgtggctccgagggcgggagctgagccgggccccgggaccgaagtttggcggcggctccgggaggcagagcgggctccccgggcgacttccaggcccctctcgcgtcctcgccccggacccgtgggcagccgggggggacggaagccgcggccgggccaactccgaggcggggacgccgcgacgggaacttgagggagcaggctgcctaatgaaggagccaggcttgcacacagacaattctagaactggtggcccgagagggatgtgaaggcccaaaatgaccctcttaccgggagacaattctgactacgactacagcgcgctgagctgcacctcggacgcctccttccacccggccttcctcccgcagcgccaggccatcaagggcgcgttctaccgccgggcgcagcggctgcggccgcaggatgagccccgccagggctgtcagcccgaggaccgccgccgtcggatcatcatcaacgtaggcggcatcaagtactcgctgccctggaccacgctggacgagttcccgctgacgcgcctgggccagctcaaggcctgcaccaacttcgacgacatcctcaacgtgtgcgatgactacgacgtcacctgcaacgagttcttcttcgaccgcaacccgggggccttcggcactatcctgaccttcctgcgcgcgggcaagctgcggctgctgcgcgagatgtgcgcgctgtccttccaggaggagctgctgtatgggtcatcagcccagccccgcccaccccagcccctatgtgtgtttccctcaataaggagatgccttgttcttttcaccatgcaaataacatgcccagcaaaaacttgctttatgggtctgcctggagaaaaaaaaaaaaaatacaaacagcagaaacagcat

SEQ ID NO: 340812 - DNA, 2386 bp, Homo sapiens
gctgctgcgccgcgctcccggcgcactcggagcccggcggggaccgggaggcagagacggggcggccgtggctccgagggcgggagctgagccgggccccgggaccgaagtttggcggcggctccgggaggcagagcgggctccccgggcgacttccaggcccctctcgcgtcctcgccccggacccgtgggcagccgggggggacggaagccgcggccgggccaactccgaggcggggacgccgcgacgggaacttgagatgaaacagcagagctgaaaagagagatcaccaaggaaagtgcctgaaagggattattcccacgcctccaaaggatcctggcaggctgtgcctgaggagatgggttccaattttagggagcaggctgcctaatgaaggagccaggcttgcacacagacaattctagaactggtggcccgagagggatgtgaaggcccaaaatgaccctcttaccgggagacaattctgactacgactacagcgcgctgagctgcacctcggacgcctccttccacccggccttcctcccgcagcgccaggccatcaagggcgcgttctaccgccgggcgcagcggctgcggccgcaggatgagccccgccagggctgtcagcccgaggaccgccgccgtcggatcatcatcaacgtaggcggcatcaagtactcgctgccctggaccacgctggacgagttcccgctgacgcgcctgggccagctcaaggcctgcaccaacttcgacgacatcctcaacgtgtgcgatgactacgacgtcacctgcaacgagttcttcttcgaccgcaacccgggggccttcggcactatcctgaccttcctgcgcgcgggcaagctgcggctgctgcgcgagatgtgcgcgctgtccttccaggaggagctgctgtactggggcatcgcggaggaccacctggacggctgctgcaagcgccgctacctgcagaagattgaggagttcgcggagatggtggagcgggaggaagaggacgacgcgctggacagcgagggccgcgacagcgagggcccggccgagggcgagggccgcctggggcgctgcatgcggcgactgcgcgacatggtggagaggccgcactcggggctgcctggcaaggtgttcgcctgcctgtcggtgctcttcgtgaccgtcaccgccgtcaacctctccgtcagcaccttgcccagcctgagggaggaggaggagcagggccactgttcccagatgtgccacaacgtcttcatcgtggagtcggtgtgcgtgggctggttctccctggagttcctcctgcggctcattcaggcgcccagcaagttcgccttcctgcggagcccgctgacgctgatcgacctggtggccatcctgccctactacatcacgctgctggtggacggcgccgccgcaggccgtcgcaagcccggcgcgggcaacagctacctggacaaggtggggctggtgctgcgcgtgctgcgggcgctgcgcatcctgtacgtgatgcgcctggcgcgccactccctggggctgcagacgctggggctcacggcccgccgctgcacccgcgagttcgggctcctgctgctcttcctctgcgtggccatcgccctcttcgcgcccctgctctacgtcatcgagaacgagatggccgacagccccgagttcaccagcatccctgcctgctactggtgggctgtcatcaccatgacgacggtgggctatggcgacatggtccccaggagcaccccgggccaggtagtggccctgagcagcatcctgagcggcatcctgctcatggccttcccagtcacctccatcttccacaccttctcccgctcctacctggagctcaagcaggagcaagagagggtgatgttccggagggcgcagttcctcatcaaaaccaagtcgcagctgagcgtgtcccaggacagtgacatcttgttcggaagtgcctcctcggacaccagagacaataactgagcgcggaggacacgcctgccctgcctgccatctgtggcccgaagccattgccatccactgcagacgcctggagagggacaggccgcttccgagtgcagtcctggcgcagcaccgactcccacgcacccggggaaggacaccctcactcccacaccccgggaagaacactagaacatcagcagaggggccctgcccctccgcctgcagccgtgaaaggaagctgggtcatcagcccagccccgcccaccccagcccctatgtgtgtttccctcaataaggagatgccttgttcttttcaccatgcaaataacatgcccagcaaaaacttgctttatgggtctgcctggagaaaaaaaaaaaaaatacaaacagcagaaacagcat

SEQ ID NO: 340813 - DNA, 2270 bp, Homo sapiens
gctgctgcgccgcgctcccggcgcactcggagcccggcggggaccgggaggcagagacggggcggccgtggctccgagggcgggagctgagccgggccccgggaccgaagtttggcggcggctccgggaggcagagcgggctccccgggcgacttccaggcccctctcgcgtcctcgccccggacccgtgggcagccgggggggacggaagccgcggccgggccaactccgaggcggggacgccgcgacgggaacttgagggagcaggctgcctaatgaaggagccaggcttgcacacagacaattctagaactggtggcccgagagggatgtgaaggcccaaaatgaccctcttaccgggagacaattctgactacgactacagcgcgctgagctgcacctcggacgcctccttccacccggccttcctcccgcagcgccaggccatcaagggcgcgttctaccgccgggcgcagcggctgcggccgcaggatgagccccgccagggctgtcagcccgaggaccgccgccgtcggatcatcatcaacgtaggcggcatcaagtactcgctgccctggaccacgctggacgagttcccgctgacgcgcctgggccagctcaaggcctgcaccaacttcgacgacatcctcaacgtgtgcgatgactacgacgtcacctgcaacgagttcttcttcgaccgcaacccgggggccttcggcactatcctgaccttcctgcgcgcgggcaagctgcggctgctgcgcgagatgtgcgcgctgtccttccaggaggagctgctgtactggggcatcgcggaggaccacctggacggctgctgcaagcgccgctacctgcagaagattgaggagttcgcggagatggtggagcgggaggaagaggacgacgcgctggacagcgagggccgcgacagcgagggcccggccgagggcgagggccgcctggggcgctgcatgcggcgactgcgcgacatggtggagaggccgcactcggggctgcctggcaaggtgttcgcctgcctgtcggtgctcttcgtgaccgtcaccgccgtcaacctctccgtcagcaccttgcccagcctgagggaggaggaggagcagggccactgttcccagatgtgccacaacgtcttcatcgtggagtcggtgtgcgtgggctggttctccctggagttcctcctgcggctcattcaggcgcccagcaagttcgccttcctgcggagcccgctgacgctgatcgacctggtggccatcctgccctactacatcacgctgctggtggacggcgccgccgcaggccgtcgcaagcccggcgcgggcaacagctacctggacaaggtggggctggtgctgcgcgtgctgcgggcgctgcgcatcctgtacgtgatgcgcctggcgcgccactccctggggctgcagacgctggggctcacggcccgccgctgcacccgcgagttcgggctcctgctgctcttcctctgcgtggccatcgccctcttcgcgcccctgctctacgtcatcgagaacgagatggccgacagccccgagttcaccagcatccctgcctgctactggtgggctgtcatcaccatgacgacggtgggctatggcgacatggtccccaggagcaccccgggccaggtagtggccctgagcagcatcctgagcggcatcctgctcatggccttcccagtcacctccatcttccacaccttctcccgctcctacctggagctcaagcaggagcaagagagggtgatgttccggagggcgcagttcctcatcaaaaccaagtcgcagctgagcgtgtcccaggacagtgacatcttgttcggaagtgcctcctcggacaccagagacaataactgagcgcggaggacacgcctgccctgcctgccatctgtggcccgaagccattgccatccactgcagacgcctggagagggacaggccgcttccgagtgcagtcctggcgcagcaccgactcccacgcacccggggaaggacaccctcactcccacaccccgggaagaacactagaacatcagcagaggggccctgcccctccgcctgcagccgtgaaaggaagctgggtcatcagcccagccccgcccaccccagcccctatgtgtgtttccctcaataaggagatgccttgttcttttcaccatgcaaataacatgcccagcaaaaacttgctttatgggtctgcctggagaaaaaaaaaaaaaatacaaacagcagaaacagcat

SEQ ID NO: 340814 - DNA, 2137 bp, Homo sapiens
gctgctgcgccgcgctcccggcgcactcggagcccggcggggaccgggaggcagagacggggcggccgtggctccgagggcgggagctgagccgggccccgggaccgaagtttggcggcggctccgggaggcagagcgggctccccgggcgacttccaggcccctctcgcgtcctcgccccggacccgtgggcagccgggggggacggaagccgcggccgggccaactccgaggcggggacgccgcgacgggaacttgaggcccgagagggatgtgaaggcccaaaatgaccctcttaccgggagacaattctgactacgactacagcgcgctgagctgcacctcggacgcctccttccacccggccttcctcccgcagcgccaggccatcaagggcgcgttctaccgccgggcgcagcggctgcggccgcaggatgagccccgccagggctgtcagcccgaggaccgccgccgtcggatcatcatcaacgtaggcggcatcaagtactcgctgccctggaccacgctggacgagttcccgctgacgcgcctgggccagctcaaggcctgcaccaacttcgacgacatcctcaacgtgtgcgatgactacgacgtcacctgcaacgagttcttcttcgaccgcaacccgggggccttcggcactatcctgaccttcctgcgcgcgggcaagctgcggctgctgcgcgagatgtgcgcgctgtccttccaggaggagctgctgtactggggcatcgcggaggaccacctggacggctgctgcaagcgccgctacctgcagaagattgaggagttcgcggagatggtggagcgggaggaagaggacgacgcgctggacagcgagggccgcgacagcgagggcccggccgagggcgagggccgcctggggcgctgcatgcggcgactgcgcgacatggtggagaggccgcactcggggctgcccagcctgagggaggaggaggagcagggccactgttcccagatgtgccacaacgtcttcatcgtggagtcggtgtgcgtgggctggttctccctggagttcctcctgcggctcattcaggcgcccagcaagttcgccttcctgcggagcccgctgacgctgatcgacctggtggccatcctgccctactacatcacgctgctggtggacggcgccgccgcaggccgtcgcaagcccggcgcgggcaacagctacctggacaaggtggggctggtgctgcgcgtgctgcgggcgctgcgcatcctgtacgtgatgcgcctggcgcgccactccctggggctgcagacgctggggctcacggcccgccgctgcacccgcgagttcgggctcctgctgctcttcctctgcgtggccatcgccctcttcgcgcccctgctctacgtcatcgagaacgagatggccgacagccccgagttcaccagcatccctgcctgctactggtgggctgtcatcaccatgacgacggtgggctatggcgacatggtccccaggagcaccccgggccaggtagtggccctgagcagcatcctgagcggcatcctgctcatggccttcccagtcacctccatcttccacaccttctcccgctcctacctggagctcaagcaggagcaagagagggtgatgttccggagggcgcagttcctcatcaaaaccaagtcgcagctgagcgtgtcccaggacagtgacatcttgttcggaagtgcctcctcggacaccagagacaataactgagcgcggaggacacgcctgccctgcctgccatctgtggcccgaagccattgccatccactgcagacgcctggagagggacaggccgcttccgagtgcagtcctggcgcagcaccgactcccacgcacccggggaaggacaccctcactcccacaccccgggaagaacactagaacatcagcagaggggccctgcccctccgcctgcagccgtgaaaggaagctgggtcatcagcccagccccgcccaccccagcccctatgtgtgtttccctcaataaggagatgccttgttcttttcaccatgcaaataacatgcccagcaaaaacttgctttatgggtctgcctggagaaaaaaaaaaaaaatacaaacagcagaaacagcat

SEQ ID NO: 340815 - DNA, 1181 bp, Homo sapiens
gctgctgcgccgcgctcccggcgcactcggagcccggcggggaccgggaggcagagacggggcggccgtggctccgagggcgggagctgagccgggccccgggaccgaagtttggcggcggctccgggaggcagagcgggctccccgggcgacttccaggcccctctcgcgtcctcgccccggacccgtgggcagccgggggggacggaagccgcggccgggccaactccgaggcggggacgccgcgacgggaacttgaggtgggaactttgcgcgctgcagcctcgccgggcgccaccgaagcgcgaaccggaccccgagcctgcaaactcgggctcgggggcggctgcacgtggccgtggccctgaactccctgcgggggcctcgaaacccgcctgcggggaggccagggcgacagaggactcgggagtcaccgctggtgcgtggcggcgtggagcgcgcttgttacggccaagggagcaggctgcctaatgaaggagccaggcttgcacacagacaattctagaactggtggcccgagagggatgtgaaggcccaaaatgaccctcttaccgggagacaattctgactacgactacagcgcgctgagctgcacctcggacgcctccttccacccggccttcctcccgcagcgccaggccatcaagggcgcgttctaccgccgggcgcagcggctgcggccgcaggatgagccccgccagggctgtcagcccgaggaccgccgccgtcggatcatcatcaacgtaggcggcatcaagtactcgctgccctggaccacgctggacgagttcccgctgacgcgcctgggccagctcaaggcctgcaccaacttcgacgacatcctcaacgtgtgcgatgactacgacgtcacctgcaacgagttcttcttcgaccgcaacccgggggccttcggcactatcctgaccttcctgcgcgcgggcaagctgcggctgctgcgcgagatgtgcgcgctgtccttccaggaggagctgctgtatgggtcatcagcccagccccgcccaccccagcccctatgtgtgtttccctcaataaggagatgccttgttcttttcaccatgcaaataacatgcccagcaaaaacttgctttatgggtctgcctggagaaaaaaaaaaaaaatacaaacagcagaaacagcat

SEQ ID NO: 340816 - DNA, 579 bp, Homo sapiens
gcaaatttaatgatggtccttgccctatatttgtctgctgttcctgcccctacccaaatgtcattttattttatccttttaaaaacatcagttaccctgaccagaaggaaagaatttagtatgttggtataatggtgggactgtaggccgcagactgtaggaatagtgtgctgcaggtgagcaagtgaaacttcattcttagattaataatttatgatagctattagtgggagatagattgcttatatggaacagactcaagattattgtttagtctatgcagaggaagcaaaatgtataaaattgtggaggaaagaacaacagcaagtcattcaggatgtctagagcaaatactcaggatggaggttggagatgcgtttgagagagagggagagcatgataatgtgtgccaggctatagaatttggtgtttaacctgatggagaaagggagtaatagattccaagtggaataaattattttagttcccaaaatggaaatagtgatttttttttctgattgtaaagggaatacatgtttgtcataacatgcaaacaagtaataaaaaaataggcagtga

SEQ ID NO: 340817 - DNA, 1131 bp, Homo sapiens
agatgatcccttgacattgtaattataacaaaactttcagaactcaagtctaaatatgtagtattttctatctgatttgcaccattgactttattaaaattgctatacaggagatggcagtttgatacccaaagctgttcactgatatatggaattttaataaagttcagctttaattttttgaattgttcatacagcaaatatttactgagtacatttttgtctccagtcctccttgacaatattatttactttgtattgagtacttattgtgtgcagacactgtgaatataaagtagacatggtcttttccctctagagcttaccagatgagtgtgagataaatagaaaagtaaacatgccattgcagtacaggtgataagaattatgataaagtacagtgttattattgataaagtacaggttattgaattatgataaagtacaaaaggttataggaaagggatatgtatgtgttcaacaccattttaattgcttcaagagatacaaaagaaatataaagcacctgacttttgcttcagtttgagagactacatggaggtgggatattaaaaaacacaagtaaccgtaaaattatgtgttatggaatatagttataagcatgtggaaaaattggagaggctttgagattagaaaacctggtatcaaatcctggctcagaaacccagctcagaataccacttgccagttagctgattttgggcagttgattaacccaaaccgtttccctcatctgtaaaagggggttgccatccatgcttctcagattatttaaagattgaagggagcatcaaggtaaggatagcaaattcctgtgatggatctgccatcactttctacccaacctcactaaagtgacagtaaaggaattttttaaaagaaactcccattgaaaatataaagggttcgtattaataactgatagggaggggtgggtccctgtacttgattatagtaacaatttggaaactagagaagggatgggtgaaggtaactgatttaatagattcagagaagtttaatcttaagctcgcaacccagtttattgcaagaatcccccaaaaggctcaggaataggcacaggtacttgcagaacttcaggtagggcta

SEQ ID NO: 340818 - DNA, 571 bp, Homo sapiens
tctgtaaaagggggttgccatccatgcttctcagattatttaaagattgaagggagcatcaaggtaaggatagcaaattcctgtgatggatctgccatcactttctacccaacctcactaaagtgacagtaaaggaattttttaaaagaaactcccattgaaaatataaagggttcgtattaataactgatagggaggggtgggtccctgtacttgattatagtaacaatttggaaactagagaagggatgggtgaaggtaactgatttaatagattcagagaagtttaatcttaagctcgcaacccagtttattgcaagaatcccccaaaaggctcaggaataggcacaggtacttgcagaacttcaggtagggctaaaaaaaactttcagttgaaaatctgttgaagaaacaaaagccccagatcccctactccactgtgggtaactgggcaaacactccttccctaccagaagaggagagtagagatttcttcattagaaagagtaaaatagaagatttccaagaataattggggcaggtctttgtacctgaaggaaggggtaaactg

SEQ ID NO: 340819 - DNA, 217 bp, Homo sapiens
tttttttggtgacatcattcaggcccgtggctttaaatattaatatcatctacacactgatgagtttatatttccagtttggacttgtcttctaaactctagacattgtatacaacttcttactccatactagttggcatcttcaacataacaggtccaaattcaaacttccgcacactccttcccacctcaaaaccactcttcccacagccagccc

SEQ ID NO: 340820 - DNA, 531 bp, Homo sapiens
gatagaagcctccataatactcgctgtgttctcagaggacgcctccatctggcatcatggtgcagttgtgaccagggcacaatgacctcacttgcattccattgtgtgcactctaagaggaggaggcagcactgccaactgtggtgcagactcatctgctggtccctcagcccgtctcagccccacgtgcccctcctatacgggattctggtgtaccaggtatgtgtttctggtacagtgtaatcctgagtacaagctatctacttcatctggtgctcgtccaaataaacaacaatctgtttaaatggcagaacaacggctgtgccatcaagagacagcatgtctgcagatggcatttaagccatctgagggatgttcaagggtaacctgacacaaaggcttctgcctcaagtgctgactttatcacttacctgtgtaaggagcacctgtgtttctctgctgtgttgcacagctttgaacagtatgtagctatgtgctcagtttcaaccggagttttgttctcattgcttg

SEQ ID NO: 340821 - DNA, 536 bp, Homo sapiens
ttcccacaggtactttcccacagggcattcaaataaaatttaagtttagcttaatagtatgtaccaatgttaatttcttggttttgatcactgtaccatggttatgtaagatattaacatcagagaaaactatgggaagggtacatgagaactcccagcactgtctctacaacttttatgtaagagaaaaatggctgggcacggtggctcacgctttcatttcttattcactctggtgagaagcgatactgctacaaaccttggtaaacaatttgctaccttttgtagccaaattccagagtgggaagaatctggctataaaatggtccaactactgagaaacagcagtttctaccaaggcctacctactttgtagaaacgagaaggaaaccatctcaggggatgccacacacatctttcttctcatcaagcacaagtacctggcttggaggagcaaagtaaagcttctgaatcagaaggtcccaatcagccactcaccagccctctgggctaaaatggagaggacacttgccccc

SEQ ID NO: 340822 - DNA, 467 bp, Homo sapiens
gcattggaagttgtggatatggaagtttatttacaagaggtttgactaggcaagtattgaaatacaggaccgatactttacaaatttgtctgtagaagtgtagtcattgattcctttgtgctcttgtacatagtcctatctgtactgaacacatcataccatcactcatctgcttagacaacagtctcagtattgtttgagaacagtctacatattggaggtatattgatgcctgtgtatcctcagagttcaacctaggcctagagccattgaaaagttattaccaagtgaaggaacagacaaataaaaaaagcttgatgcatatttactgcttggagacaaagggaggtttacatacaggcctttgataccacaaatgacattacattatgttaagcatcagtttatcatcaccactttgctctaatcttccctcaggtatcttagctcatacaaaagaacaaatg

SEQ ID NO: 340823 - DNA, 571 bp, Homo sapiens
gcggcactttcccatggcccacatgctgcctaagaccctgaaggctgactcctgggcactgtccccagccacccgcctctctgcaactatctgccacccctccacctgccctgggacacctgcctccagatgaaggggtctgctatttcccctgcctcccccagcagaccccagcttccactccgattcaccctggaactgccggtgctggcccaggccaggcttcgggaaccgtgtgagggagagtttgagaaaagcccattctggtgcagaagtagcactcagtgacctctggtgaaccctcagagactcccaggagcctggacgtgttcccagcccagcatgactagtggcatgagtaagtgtggatacctggtggatacctggcttgggtgccaacgcctggaaaggggctggcaggtccatccctgagggctgaggccacgaccacctgctagccctgggacacagagtattaacacatcactcacaccgagcctcagtctccccctctgtaaggtgggctctagcgtcaacctcctagctatgaagactaaatgagatgcctcct

SEQ ID NO: 340824 - DNA, 192 bp, Homo sapiens
gggagagaacagtagaggcagagtaaagggatgacggggaaagttacggagctcggccgggccgagtggttagtgatggcaggtgggagtgtagcggagtggggcgtatctggggacagctgtgatgttaaagtgatgggatggcacaggtccgctgtaatagaaaggtgaggggtgcagagtaactggctc

SEQ ID NO: 340825 - DNA, 456 bp, Homo sapiens
tctgcatataagcagcatataagtccaaatgcctgcagagagtcctgtgggactcagaaaagcacagggactagagcaagcttgttcaacctgaggcctgtgggccacatgtggcccaggacagctttcaatgtggtccaacacaaattcataaactttcttaaaacattacaaggttgggcgcagtggctcacacctgtcatccctgcactttgggaggccaaggcgggcggatcacaagaggtcaggagtttgagaccagcctggccaacatggtaaaaacccgtctctactaaaaatacaaaaattagccgggcgtggtggcacacacctgtggtcccagctactcaggaggctgaagcacaagaatcgcttgaacctgggtggtggaggttacagtaagtcgagattgtgccgctgcactccagcctgggcgacacagtgagactctgtctc

SEQ ID NO: 340826 - DNA, 374 bp, Homo sapiens
tcatgagttcactctcttacttccaatcagtgaaattaccttcccgtgaagaggcgggaataaaaaaataagacgagaaagacctatgagctttaattaatattcaaaattaaaaaaattcaaccacaaagggataaacataacttaacatggactagcaatttcggttggggtgacctcggagtacaaaaaaccctccgagtgattttaatctagacaaaccagtcaaaataaccataacatcacttattgatttgaccaaaattttgatcaacggaacaagttaccctagggataacagcgcaatcctattctagagttcctatcgacaatagggtttacgacctcgatgttggatcaggacatccaaatgg

SEQ ID NO: 340827 - DNA, 89 bp, Homo sapiens
tgggccagaaacaagaccattggatttttacctcgtacttttgatgtttggcagccattgattctagttcgggggtgaaagatagagat

SEQ ID NO: 340828 - DNA, 235 bp, Homo sapiens
tgactagtcactccatggaatgaagaccttactgtcctttgtgttttcggtcattaattatggaataagaaacaaagcctcctattaaaaggagtttcagatatcaacaagtcagggagaaggtagaggagacaaggaatccctactacactttcttctaagggaggcttcaataaaaaacctgacttagtcttttttgagccagccgtcacagggaggggcatctagagggcct

SEQ ID NO: 340829 - DNA, 241 bp, Homo sapiens
ttgcatgcaggcagaaccacacagatcagatgagtatgcaaaacagccgttctctcctggagcacagtgtcactcaactctaaccaactgtgggcactagaacctttgattttccaagaaaagtctcggccaggcatggtggctcaggcctgtaaccctagcactttgggaggccaggcaggaagatcacttgggcccaggagtttaagaccagcatgggcaacacagggagacctcgttt

SEQ ID NO: 340830 - DNA, 675 bp, Homo sapiens
agccgctgctctgcagaggtcaagacaggcccggaagggaagctggagcagcaggtgaccggctgcccaggacgttctgtcacaaggagaacgcgagagatgaagttggtgaagactctgctttgcaggcaatctaaaatcctgggtctgatgttgcctgcttccagagctccattaaagcttcggtgaagtctcccccagcccacaggatcatctcggcattgacagtgtgccttgcaaggctggaatgcactgggccgctcccagactgctgcctgcaaagcaaaaatcccctctaccaggatgtggtgggcttcaaactattgctgttcacctgcaattccaattttgcatgggtgtctctctagtcccctcctagtcagcctcttgtggactatgggccaacattgtggacacctcttgagtcagtggccccgaagctgcagtggggtctggggtctggaccagagcatgttctcagggcaggccgagccatgctgtccggatgtgagaagggagctgtgtcaggcaggctgacaggccctggggcctgctcctggggccacagggttctagggacccattactgaggtctgggggcaccaacagacccggcctgggtgggtggccagcagcccagagccagatgcagctgcacctgcctgagtgtgtgat

SEQ ID NO: 340831 - DNA, 321 bp, Homo sapiens
ggtggccgcccgtaatcccatctacttaggaggctgaggcaggagaatcacttgaacccgggaggcagaggttgcagtgagccaaaatcgcgccactgcactccagcctaggcgacagaacaaagctctgtcttaaaaaaaaacaaacaaaaaacaaataaaagctaaccctattcccagcattgagcacagagcctggcccagagccgggatgtagtatctggctgttagagactgaattccttcaaaccattgaccaattaacaacggctgtcgcttgaagtagggctagcaaattaaaaataacagaatgcttttgtt

SEQ ID NO: 340832 - DNA, 1139 bp, Homo sapiens
gctaagtaatattaaccgtaaggacagtctgagtgcagtggctcatgcctgtaattccagtactttgggaggccaaagcaggcggatcacttggggtcaggagttcgagaccagccaggtcaacatagcaaaaccccatctctacttaaaatataaaaattagctgggtgtggtggtgcgtgcctgtaattccagctactgggaaggctgaggcgaggcacgagaatcacttgaacctgggaggtggaggttgcagtgagccaagagactgcaccactgcaccccagcctgggagacagagtgaaactgtctcagacaaacaaacaaaccccagtgagggttacagggattcagggaagggaagaggtcattgtggactggagaaatcttggaaaccttcctggaggaggcagcagctcttggcctcaaccctgaagaatggactggggaaatcacagcaggaacgatgacaggaaggaaggaaggagcatggcaatgtcccttcctaggggacacccttctattagaggactgtagtgaaagtggggtgggctgattgtggaggtcgaagggttgaagacttgagaaatagccagagggtatctgacatgatgggggagacaatggggagccattggaggttctatggcagggtgtgatcatgattaaaacagagcttagtccttacaggactagtaagcaggtgaaggaacagcaacaggagatggaacagacagaagacaacaacttccttcccagctccagcaggaattctcacttcagcctcagggactgcagaaatgtctcattttccccgttcacttattttccatttctttcattttgtgacattctgagtcgtcttaaatcttgggggagggaaagcctgaagggggtaatctgggagaggctcactcagtaactgtggtccaacaagggtgggcaaggagaaggaagttaagctggggagtgcgttcccagggaagaagccccccaggtggggcacacagcctaggggaagggctggtgcagcctggggtctggtggcagctcctccttctggcccctgccccaccttccagccacatttcctagctgctttctgcccacacccgctgtgcaccaccacaacaaactcc

SEQ ID NO: 340833 - DNA, 665 bp, Homo sapiens
catctccccatctcacagccacttctgcctaatctcctcaggccttgaaaccaagacaggtgggagccatggaggatggcagccagaggagggatgtaatctgactctcatgctccatgggccctgttcttcctctctcgacctgcaaacatcaggaagcccgaggactgagactctctgtccatacctggtccctaggtgatgccatccaggctgctggctgcaaataccagccatggactgacaactcctacattacctctttccccagaagcccagactggcatgcccactgccttctccatgtctcctctgaggccacagacccctcaaacccagcagggctgagctcctgctgcctcgagcagttccttctgtgcttgttcccacctcctgatcccagaggcatccccttaagtctgcccacttctctcgcctaccctgggtcccctcactcctgcccacacttcccatgatgtttcccctgcagctgccaaagggcacccagaacacctaggtcagattgaatccctctgcttataacctccatggctcccatctcccccggggtcaaagccaaagtcctgcccacagccctcaaggacctgcacggcctactccatctcctgcctaccctccccctcacccactctgctccagccaca

SEQ ID NO: 340834 - DNA, 474 bp, Homo sapiens
acctccgcctcctgggttcagcaattctcctgcctctgcctcccaggtagctgggactacaggctcctactaccatgcccggctaatttttgtatttttagcagagacagggttttgccatgttggccaggctggtctcgaactcttgacctcaggtgatccacccaccctggcccctcaaagttctgggattataggcgtgagccactgtgctcggcctgtattgccatctaaacaatagtaactgttttgatctatgaacatgggatgtctttccatttatttaggttttctttacttttagcaatgttgtaatgtttcttagttttgcacttcttttgtttttattcataagtactttttctttttgatgctattttaaatgaaattgttctactggttttttttgtttttttttttttgaaacagggtctcactatcactcaggctggagagcagtgttatgcagtggta

SEQ ID NO: 340835 - DNA, 427 bp, Homo sapiens
tacaacgaaagaggcagatcacaggtgtaggtgagaaggtgggaagctctcgtgattgctaactggaataaaagctgctgcagccactgtgggaaacagtccggcaattcctcagtaacttaaacttcaagttactgcatgacccagcagttccactcccaggtatataccccaaaataagtgaccgcaggtgttcaaactaaaacttgtacacccatgttcatagcagcattattcacagcggccaaaaggtggaaataacccaaatgcccaatgtttggtgaatggagaaaccagatgtgacctatcgatacaatgtgatgttattcagccagaaaaggaataaagcactgatgtatggtgcagcacggatggaataaagcgctcatgtatggtacagcatggatggaataaagcgctgatgtat

SEQ ID NO: 340836 - DNA, 284 bp, Homo sapiens
catacacacacagaagcatatatcagtcagcacagtgcctatgtattagccacttaacacatgtggacagctgggttgggaaggagtatgaagatatttgaacaagaggataaagagctgatacttattcagtagcattttcgggagctgagtgatgtttgagcctcagcaatacaaattggcaactatgtgggatgaaggttggggagggtaagagactaaagatagggagatcatttaagacagcagtttccaaactcctgggccatggactcgaaccccat

SEQ ID NO: 340837 - DNA, 189 bp, Homo sapiens
tgtttgttctcttttgatctagcttctattaattagcatatttattgagattaatctattttatagtatggatgaaagtttcatttcttttattgcttgtagtatttcaaaatatggatatatcaaagcttgcttattcatttatctgttaatgaatatttgattgttacatgctcttcactattagcc

SEQ ID NO: 340838 - DNA, 712 bp, Homo sapiens
ttcattttttcatcctcagacaggaatacattaaagcagttcagggcaaacatgagtagttcttactctcactgttagggaagaaggcaagaaatgtgtgtgtgtgtgcgcgcgcgtgtgtgtgtgtgtgcataaaaggatgcaataacaggacataaaagaaaaaatatttgaaacatatagaagtggaatagtctctggaatatataaaaatgcctacgtattgataagaaaaacataaacagcccaaacaaaaaacaggcaaaagatacaaacaaatatctctcatgagaaaaagtacaaattgttcataattgtaggaaaagatgttccacctcattggcagccagggaaatgcaaattgaggcccataataagatattatttcatatctactagacaagcaaattaaaaagtataacgtcaggttatggtgtggaggaggtgcattggggtactctcatgtactgcttgtgagaaagtaaactgatataaccacattgaaaaaagtttctcattgccttttaaaatgtacatgtccatgactgatgataagtacttctattctaaggtatatatctgagagcaggggtcagtttgctgacccctactccatggcccacaagctaagaattacttttacatttttaaagagctgtagaagcggccaggcgtggtggctcatgccggtaatcccagcactttgggaggc

SEQ ID NO: 340839 - DNA, 277 bp, Homo sapiens
ggtgctagaggtggaggcggggcattgactgggaagttgcacaagggaagtttctggggtgatagaaattccgtgttttgatgtgtatttatctacctggttgaatagtatactcgagatctgaacattttatgacatgttaaatacattaataaaaaagaagttaaaagtataagaacaaaataatgcagggattatgagagaaatagggttaagaagaaaccactaaaaaaatacatgcagctgggcagagtggctcatgcctgtaatcccaaaa

SEQ ID NO: 340840 - DNA, 355 bp, Homo sapiens
ttcattgattactgtttttccccaaggttttttgttcacctgtaaggtaatatgtagttgataagaggatgggggggatatttaagatctttattctgacaaacactttctgttgtcctaaagctgatgtggcagataggatagatttgagtcaaagaaagggatatggatttggtgaattattgtgccttattcattgaatattgactgccttcaggttgataaaaacattccatagatttctagaacctggaagacacaactgaggttttccaatttatctctttgtccacaggtaggtctttttctaaacttcatagagagatggtcatctattatcttcttagagagtgca

SEQ ID NO: 340841 - DNA, 444 bp, Homo sapiens
aggctatgtctttctaagagatgtgttatttgattctaattataattaactttgcttattactaagtagataataattttctcatttcatattttttctgaatatcagtttttctccccatagagaatattcagaagatggaatccttttaacgtagaactcaagatgtgccctgttctccctgcccgcctcccatttccctaaacacacacacacacacacattctcccttctctcaagatactttttttccaactgagagtcgttgactaatcacagatgagttaatccttccacagttttgaaaaagtctagcaaccctcaccttgaagagagtgaatagcgtggctaatccatctaagaacaatgcacgaaaacgaaaaacggagaatcctgcccggcagttaatttgttactcatacttgttgaacttaagatttggag

SEQ ID NO: 340842 - DNA, 462 bp, Homo sapiens
aggctatgtctttctaagagatgtgttatttgattctaattataattaactttgcttattactaagtagataataattttctcatttcatattttttctgaatatcagtttttctccccatagagaatattcagaagatggaatccttttaacgtagaactcaagatgtgccctgttctccctgcccgcctcccatttccctaaacacacacacacacacacacacacacaaacacacacattctcccttctctcaagatactttttttccaactgagagtcgttgactaatcacagatgagttaatccttccacagttttgaaaaagtctagcaaccctcaccttgaagagagtgaatagcgtggctaatccatctaagaacaatgcacgaaaacgaaaaacggagaatcctgcccggcagttaatttgttactcatacttgttgaacttaagatttggag

SEQ ID NO: 340843 - DNA, 811 bp, Homo sapiens
ttctccttttcacttctagagcataaaggagaaaacttggacagaagaaaacttgaaagtgtccttcaaagagcagctcagtggacgtgcccttctcaaaacactggatcttttcttttgagatgaccggggggaggggtacaaagttgaaaaagggaccccccacagatacatttgctaccacctgttgtgaaatgttgaacctgcaaaagaggcacagatagtgtcctactttcttaactagtaacagctgtttctgaaaataacagaaacagaagccaatcctttatgcaagctcacttgttgcatgtatttcagaaatctaatacaaatttacaacatctctaataaccgagttttacactttaaaaagatcttgaaaatacatacagaaaagaagtcctccttacaagcattgtttggagggaaaaatacagtacaaagtaaagagggagacacttatagataggtaaccaagattatgtagcccacttcttgccagccctcttttcacagttttcttagttctaatgtaaacaatatcccataattattcaattcaacctccttagaagcttctgttggtgagtcctgaactccaaaggaagcttcacagcacccaaagatcctaacctttctgtgccaaaacgcactatgtatgttttttctgaccctcctaaactataccctgtcccatctcaacaattggctaccctagccaacacttcttatccttgcctatcactctgctggtttaggtacttagcttaacttctaatatcggatccatcattgttttgtcaaacaaggt

SEQ ID NO: 340844 - DNA, 450 bp, Homo sapiens
aatacaaataatcacaccaaagtgaaaaagcacaagtatgtgaagtatgtgtcagcaataataagtagtctagggtaatgggctttgggtatacgtactgatgaaatgagccacaagaatacagtagtaggccaaactggtcagacccgaggtcttggtgaagcccccttgccactggaccttctactatcatccacccagattccctgtcactatacactacaaacgcagaatagctgtgatactccatcaggatggcctactaaaggtgagcagatgtcaaccagctgagaggggaaaaaaaaagaggcattcccaaacagaagacccagaaggaggaaaccacaacgtgagagcctgagccagtgtatgtcatggggaagagatgcaagtgcaaaggaggttgtcggttggagcaagggagaatggcaggactggagacaaatcaca

SEQ ID NO: 340845 - DNA, 783 bp, Homo sapiens
agtgatttctgccacaaaattaccaagttttgcaatatccatggatatgacatattttaactatgattcctatgcacaatttcattaaaaatatctgacattcaaaaatggcttaaacttaacagcactactttcttgtaacggcaaggagacaaattatgtagaagttaagggatatttacttactctaagttaccaagaaaaagaccataataatttttctgataccaattagcaaagtaattctctactacttctccccacatgctaaaatggaaacatcaatattcatactatagaactaataaccctcaactgaaagaatggcaggtaaattatacagtggatttataatgacactcaaggtacattttgacagcacattaaacacgtctgctaccctcggtcaagacagttaacgagatggccttaaaatcaacacatgattctttaggcttttcctcaaactacgtctaaaattttttgcttttcctcaaacctacttttaaacttttatgtaattttatcccacaatttccaatacaatttttttgggaaaaaaattccctagtgagaaagtagtagatggtttaaatttaaattgttctttcataaggtattttactagttataaaaaaaaaaaaagacagggggtggggagaattagtagagaataatttggcaaatgggtatcagaaaaattataagggtcttttcctgggtaacttagagtaggtaaatatcccttaatttcaacataattggtctcctggcggttacaag

SEQ ID NO: 340846 - DNA, 260 bp, Homo sapiens
ccccccaactgttcttaagattttctttttattttggttttcaacaatttgactatgatgtgaataggtatagtttactttgtatttctcatctttgggtttattaatcttgaaaaaatttcagtaattatttctttattcttctgaccattttcttctatttttctaaaacaccaagtatatctgtattagactttgtgatattttccacatttctgatactctgatttttgtttttcagcccttttttcttcccattg

SEQ ID NO: 340847 - DNA, 399 bp, Homo sapiens
ttttagacgaaattttcaattcagatatgctttcaaatcatgatgcatttgtcaaaggaagttctccctttataaaagcaagataaatagggcacttaaagaaaagtgagaaaggcaaaacttcgtctcaaactacatgtctgcatctgtgcctattaaaatctcacatactctttaaggcccaactcaggaaatctccaccaggaaaccttccctgaggtatatgctgagatccctcagcaattcataccattcccttgtatttgagttacttgtcttcaggctgaagtttccctaatagattaagaacagggcagctgagatatggcagaaagaaaagccgggctcttaacacttctaagctttgctactttgggagagtcatttcatccttttggg

SEQ ID NO: 340848 - DNA, 563 bp, Homo sapiens
gggtgcgtgtgacgggactggggtgtgtgtgacggaactgggatatatgtgacggaactggggtgcatgtgacggaactggggtgtgtgtgatggaactggggtgtgtgtgatggaactggggtgtgtgtgatggaactggggagggcacagaatggggttaggactttcttcatcctctcctgggtgtaaggagaatctatgtgctgtaaccaggcatcacttcagaatgacagtgctgtggtcaccagtgggcaaaagccaaggtcaccaaagcccctgacttcagccttctagtagtttctaattgatcaggtagattccagaagcacaaacagctccactgggtcctcctggtctatcctagcaatagcagccatgtgaccccaggccacacctagagcacagagggtggaagccacatagacattctttgacgggataagacctgtcaacaccatcctgcccagtgctgccaaggtttcccagccaagagtgggaggggggcatgagcagaaagaagcaactaaagccctgcgaccctcctgcacctccatggacagg

SEQ ID NO: 340849 - DNA, 390 bp, Homo sapiens
cctgggtgatacatagagtgagacctcaactcaaaaaaatatataaaagatggctgcaaatgtactgaacatgtgcaaactttttttcctcgtcaccattccctaaacagtgtaacaactacttacacagcatttacatcatattcggtattataagtaatctagagatgacttcagctatatgggaggatgtgagtaagtcatatgcaaacactacaccattttatattgggcacttgagcatctgtggattttgttatgtgcaggaggtccgactttacgtatgaaatatgttagacgcagtcacctacgagaaattcttgatggcttgttctttcatccctctcaatcactcacctaggtccactgagtccacctatgaatcacaca

SEQ ID NO: 340850 - DNA, 468 bp, Homo sapiens
tattttgctatagaatcatgacgacaccacttcttcaattaaattgcaaagcattcaggaacttaaagtaaatgactctctagatcactcatggggataaatttagagccccaaagagaaagcaaaatatctggtttgtgcacatgcatatggcccgtagagggtagggagagcatagtgtggggaggaagagagctgcacatggtgaaacgcagggcccaacagcaggccctggtcttaggtgctgccaggttcattccaactgctcacagtgtggatttcaaatataatccaaacagaagtgacaaaatccaaaaccacaggagcaagcactggctttcaagtgctgtgggaacagagacatttgtttaagtaaccactgttttaaaattgcatacatagtaacaccaaaataaacagcttgcgatgctgtttattttaagatacacaatagtaatgtaaagtgtg

SEQ ID NO: 340851 - DNA, 500 bp, Homo sapiens
tttgcttcgccctcttctagctttatgctcctttcaacttcagcatggtgcccaaattcgcctcagcaaggaacaccttctgaaaaatggattatatcctaaaccaatgccaaagaacaaacgcaaactcaggaaaatggaattgttaatgaatagtgttaaaatttagtacagttattcttttggtgctagcttaactgtcttcatctaacaataccaaattaagttttcatatagttaaggtctgtaggtttttgacttgctaaagaagaatgagaattgcatactaatcttacccagaagaaggaagtaaaccaaatattcataaatacaaataaacagaaattcactggctcactgaaaagcaggatttcctactgtacttgtttttaaaaatgtgcctctaatacatgttttcaaacccaaatttaaaatatgatttgttgttgtgataggttagaagttcttacttgtaaaatagaagaaaattgttgtagtgg

SEQ ID NO: 340852 - DNA, 531 bp, Homo sapiens
tatccagtgctagctgattattaaacttactgggggagcttgaaaaatattagtgctgaggcttcctcatttaactggtctagagtgaggtccaggcatgatttgaaagcttcccagtggtacaaggttgagaactactggctacagggaagaactaactttctctggcctctacccacctgtctgacttttacctttggccacacatttccttccctttgcatcccaaaggctgaagtgcttacggagtcaggaacacacagagctggttcgtgctctgcagctctgcccaagctattctccttatcagaactgcattccacctctgcaggccacccctgcctggcccacctgaaaaacccctcatctttaaagaaccggctgcgtctcacccctcctgcggtcttctcgcattgcccatatttgcatagtcatctaccatcatcacatcatcaaggctggcccaggcctgcggaatctggctgctccccgctcgctggctcctgttttgccccatcccccgtgctccag

SEQ ID NO: 340853 - DNA, 163 bp, Homo sapiens
atatatatatatatatatatatatatatatatatatatatatatggagttgtatagaattgtaagctcattttctgagcgagcacgaacagataggagtgataactttcctggccctacagtcctctagcatttccatccccttagacaccctgctaggacag

SEQ ID NO: 340854 - DNA, 314 bp, Homo sapiens
aagagtcattatgaaactcaggtaagttttatcatgaaagaatgctgaaaaaaaaaatcaatgccccctggccctcccattgagtaagcaactgaaagtgagcttacagcctgtgtaggacatcttttaatttgccaagtgactaaatgtgcagtcactgcagcaggcatccaccagctgtgcccacatggcccactcagctgggctgcttttcaaagagcagacagggcttatcttagtaccaaaactccatgccaaaaagatcatcactgggtttgagcatttgcacaaaatccccagcagccacgggtaga

SEQ ID NO: 340855 - DNA, 132 bp, Homo sapiens
cattggaaagacttttaattctaaggtttaactttttgaaaatacaacctctgcagaaactatagttcatcataaaggggcagtaaacagaaatgagagtggggaagcggttatggggtaggtagaaatctg

SEQ ID NO: 340856 - DNA, 239 bp, Homo sapiens
ggtgccatgttatatcggattttgcagaacttgtttgatattgggaccatagcgacttgagaaatgcggacctgtagaattggctgcacttgaagtattttctaatctctgatgatgctcgacattaattgattatatttgctgacattctcttctggattttgcaaagttggactgttacatcattgcaaaaataaattatctagggacttttgagaacttgtggttcaactctaaag

SEQ ID NO: 340857 - DNA, 438 bp, Homo sapiens
tcaggctgagtgaggggctgaggtaagacccctcctggactcaggaacaaaaaccaagccaaagaaaaggtgagactccctcccttgatgaagaaaactgccccattagaaagtaagagagagtagctcagtgtgccaagtagttctgagcagagaactatccatgagcctgaaagagggcgcacgctggagtcgctggagaaggatggaggtgatgtggttttggtagtttaacagatcagaggtttcccaacctgctggaaagaaggggggtctgcctggagatggcctcaaaactggctcaagaataagatgagtggtaaggaattctccttacaggacacctacggaaaacacatttagttgaaagcagagcatctggtaaattctaaactcattttgtgacaatttcacctctgaggtgatgcagatgtgatc

SEQ ID NO: 340858 - DNA, 488 bp, Homo sapiens
gctatagctagataaaaataaataaagaagattaaatctttattttgctgcattctttccttaggatacacagaaagaagccatgttactgtcctgctgttcattaagtcaattagccattcccgactgcgggatgacataattttccataaacagtctcttacgcaatggtgtgggttggtggtgtagaagtagatcacataatcaacttaaagcagttcctttatttaaattaaccatttgaaatcatgtgagaccttatctcttaaaaatatagatactcgagtagctatattaatatcagataaagtggacttcagagaaaagaaaattaccagcaagaaaaagagacatcacatagtgataaaagaacgaatctaccaaggtgacatagtaattttaaatgtacatgcaccaaacaacagtttcaacacacacacacacacacacagatagagctaaaagagaaaatagacaaatctatagtt

SEQ ID NO: 340859 - DNA, 398 bp, Homo sapiens
ctcatgatgtgtgtgtcattagttctcacaattctacgatgtctccttcctcccacccacagttttaaaatagtacggactatagttgtcatagttttacaatgctctgcaatagttattattcaggatgggggaaatcaagattttagattatttgaagatgaattggttttcacagctctgctgttcactggctcctggtgggacatttgtggctttgacaatgtttcctcaggggaacatggggaattgataggctttttctcagacccttctggccgtgaagcttgatattctttcctcagtgtcgtgacctccttgtgggcaagaagtttatttccttagtgttttctggcacatatggatctcagtaaatatttcctgaataagtacggtca

SEQ ID NO: 340860 - DNA, 159 bp, Homo sapiens
ttcatttcttatcactttccatggcacactcttaaagccaaggaagataaaactagaatggttataaatatgaatggagaaattcagttccttccctatcatatttacatgtctcaagtaaaacacagatgagtggcaaaaggtctactgcattctctg

SEQ ID NO: 340861 - DNA, 532 bp, Homo sapiens
ctggtagttgggggagaagacatgagttttggagttcctgagagaggtaggaatagacatgagagaatcatgaactctaagaaatagtagagactgtagaagtagatgagatcacctgagtaaaatttataaaatggggaaagaaagggggttaaggatagagcacagaggaactctgatatgtgtggacagaaaagttagggagggagcctgaggaggggcaatcagagaggcaagagaaagtactgtctgggaagccaggaatgagaaaagtttctaaaagaaagcaatagtgtctgttgcagcagagaacaggtagggtgagcctgaaatgaggctactgagtcattggtgaccatggtgacagcagtttcagtggaggggtggggacagaagctagactgctgtggcttagggagtcagtatgaggcaaagatgtagaacaaaagacttttttgagaaatatagttgcgagggaaggaaggaaagagggtggtattttgaagaggcagcagaggaggcaggttcaaag

SEQ ID NO: 340862 - DNA, 408 bp, Homo sapiens
atcaggttgagagattctgcttggtctagtcaatctgaaaaattcaggctggaaagacaccttttctcaagagttgaattgctttttgccttcaagtcttgcctgcaccttgcttacaatggcatcaatttacacctaaggacctttgaagagaaaaattccattatttcttttttttcttgagagcagattttttccctcctcctttggaagatttgcagtactttgcttccatctgagccagaaaattgtccatttccttttgccaatccttttgtctgctctgaatggctgccttcaggctatccacgccttcatcaagccccaactcctttctgctcatttctgcttctttggcctcttcctgagccctccttttctttgcattcatcttttgtgttgattctt

SEQ ID NO: 340863 - DNA, 351 bp, Homo sapiens
gcatctaatcacagactataaactctctattagctatagtgatctctggcagcttaaaaaaaacaaatctgggttcttaaattgtgaataatatttatgtgaattatcaagtgtactgcattatattttgcacccatatattgagaaaggcagcatccatgtttctaaaagcatgcaaaaccacggcactattttaagaggacagcaaggcccgtggaaggaccactgccttggttttctttttggtgcgccattttggcatgtgtttaggattatgcctgtctacagaactttccgtagcatcttttattccttccgttttctgctttaataagataagggcacatttct

SEQ ID NO: 340864 - DNA, 522 bp, Homo sapiens
actgacgatcgcactggccatacttttcgtttaggtctctgttacctcttgtctgttactacagacaaaacacctctcaagcattccaatctctactaaaaaattagccgggcgtggtggcgggcgcctgtagtgccagctactcgggagactgaggcaggagaatggcgtgaacccgggaggcggagcttgcggtgagctgagatcgcgccactacactccagcctgggcgacagagcgagactccgtctcaaaaaaacaaacaaacaaacaaacaaaagaaggcagccctctccaggttcgcacgtgctgttttctctgccagaaacacgtgtctcctttctctgttgcttatgctgtctcatgtcatcacctctgagaagccttctctgatgtccctacagatcaggcttggctctccagtcatatggttacacagcatcctagaggtccccttttagttgcacacctgcagtggttaactttgtcttccctctcccgtgactccatgattgttgaggt

SEQ ID NO: 340865 - DNA, 205 bp, Homo sapiens
caatcatttcaggggccagggtcactcgggttgagcttttctggtctagtccctcgtcgccaagttgcagggaggctcactggggctcagatcggaagacattttcaccaagttaccctacgaatgtctgagaggagtgagaaggtgtgcctgaattcttacatgggggcctggaggggctaataggaagggttggtcttatcat

SEQ ID NO: 340866 - DNA, 302 bp, Homo sapiens
tgagggagcggatgggtgagcggatgggagagcgcatgggtgagcagatgcaagagtggatgagagtggttgagggagtggatggttgagtggatgggagagcagatgggtgagtggatgggagagtggatgggtgagcggatgggagagcagatgggtgagcggatgggagagcggatgggagagtggatgagagtggttgagggagcggatgggtgagcggatgggagagcgcatgggtgagcagatgcaagagtggatgagagtggttgagggagtggatggttgagcggatgggagag

SEQ ID NO: 340867 - DNA, 832 bp, Homo sapiens
catcttcaatccccaactccctttctcttatgtgaagactcaatgagttactgacttataacctctaacactataaataatccactcaaagtcttctacctaaaaccattccttattttctgatattacccatttcttagatgtttctctaggataattataattaatgtagtaagatctgtggcacttcacagtttgccaagtgctttctaaatgtactcacttaatccttacaggctgtggaaaaggtaattccctctattttataggtaaggaaaaaggaccgaagaactcactaccatgtcgtatcaacaaagcaagttggtggcaaaccggacctccgaaataggtcttccaactccacacggcatgctcgtcccattctattatgctcttttctaagaagggaatgtctacagttctgtcccaaaccacatttgcttcaagagtaaaccatcttcaaaccatttctctaaattgcaatcaggtcccccactcctacaatcatgccatttcttgcttcctcactctccagctatgacttccttctcactacccgatttccactcttcatggatactgccatcattccttcaacccgtcctgcaaatatcccacctctacatgctaaagggagacccctcatgttccttcccccaaaccctggcactcccttctccggatatgtaggttgtcaccccataaactacacagtagcttctcgcttctcggcccttaacgagctacttactaactttaaaagccccacagaaatgaacttaacttgcaggtcctccacctccacacttggccctgggcgccattcctctga

SEQ ID NO: 340868 - DNA, 380 bp, Homo sapiens
tgcaccttccacaatgtctaatataattctgggcacagagtaagtatttaataagtattcttgtctgaatattattgaaaaataataatatattagatggctaatctggtagaggaaaatcagaaaattgattcaaaggagtactgactgaactgactattcaattgacagaaatcaggaaataatttgggaagcaaagacacccacaaattattccattgtatatagatcaaacatcataagaaacaagaaattcgcaatcattaggtaattttgcttcatgaagatatttgattgttaaattaatatgtgctattagtaaagttgaaatttcagaagtcgggagagataatatcacctctgtccttatacctcactat

SEQ ID NO: 340869 - DNA, 277 bp, Homo sapiens
tacaagggcacactcttacataaacacgatctaaggctcacattcaggaaatttaacactgacataatattattatctaacatgcaatctgtattcagatttctccaattgtcctaacagtgtctcttatagtttcacagaaattcagtcttgaccaggtgcagtggctcatacctgtaatctcagcactttgggaggctgaagtgggaggatcgcttgaggctaggagtttgagacgagcttagacaatacagcaagacctgtctctaaaataatt

SEQ ID NO: 340870 - DNA, 318 bp, Homo sapiens
gagaacaaaaaagaacttgccttttgaaagagggagataaagtaggaaaaggactacagcatgtccattggcttgtgggatggaggggtctttgatgacatcagggaaatgatggagcagaagcggcggcagggctatgaacgatgagcaggagggagccacagcacagcaagtgtagacaccgcctaggagaggcccaactgtgatgctaaagggaggaacaggtctagaagttatcgattcgcttggaataataaatgatacagtggcgaactgttccagaaagaagttaccaacagtcgccgctcactaggaaac

SEQ ID NO: 340871 - DNA, 475 bp, Homo sapiens
actgcaagggaaacacctcagagctcaatagccaaagacgcaccatcaatgttgaatgagacagagtctctactgatgggaaattctacaagactcctctggtgttttctgtgatatctgttccagccccacagtggccactttcagttctcccccactattaacactcatcctgccaagccaagaattcttaaggtagtgtagtgaacgccatgctgaaaaataggctcttacggtgccggggtccgtgaacacagctcaccactccgaggaggaaaccttcccttagcacaggcaccacctcctcagacagtcccacaaatacaggaaggtggtggctccacccagggccacagtcattgtctccaccacagtcacagaacacgcccaatccactgccgacattttgaagaaagggccgcaatcatccactgaatctgtcctaccaaggaaagcaaatcaagcttgctgccct

SEQ ID NO: 340872 - DNA, 410 bp, Homo sapiens
gaagaatgcatgttgcattttgccaagttgctctcagctttttcctgcctgtatgccatctttctgcaaactaccagcgctggccgcctcgcacagcgataatcagcctgtcagtcaataaactgaagatgttggtggtgtgctggggttggtggccagcagtgagagccctgagagttataaattcaagatgagaattgagatgttgccaaggcttcacagagtccctgatttactaggaaattgttccctagccttgactgctggccctgttatgcaagggactttgtgtgggctggggggatggttgaaggaaagacaaaaaataaaagaccagaagccagtgtttaggcacagtggataggacattccctaccccactgcatttggtcacctatggtctgctattt

SEQ ID NO: 340873 - DNA, 355 bp, Homo sapiens
acacacacacacacacacacaaaagcagctgctggtttccaagggccttgcctggaatcagtccagaagctaaattaatgttaattgatattcctttatccacagaaagacagcaagaaaggtcatgcggagcgggggacataactaaccataaatgctaaaggcctggaggtgacagtgcctgctgtttaaacgcgtgcgggagagtctggggcctttagccaggagattgtcaggcttcccagggcttccctgaaagaccccagacccaggggccagtgctgttgaggtgttggctttcccatgccaggcgctgggggaagctgtgacgagatttgagtgtcacataataagg

SEQ ID NO: 340874 - DNA, 512 bp, Homo sapiens
taggactgtagccacttcaaagcaagtgtacacagatctttggtcagaggttggtaaactatggctgcaggccaaattcagcccctgatctgtttttctgtggcctgtaacataagaatggttttactttttttttttttccaaatagagatagggtctggttctgtcgctcaagctggagtgcagtgacgcaaaggtagctcactgcggccttgaacttctgggcacaagcagtcctcctgcctcaggctctagagtagctggctgggactacaggcatatgcagccatgcccagctaattatttttattttttgtagagatggtgtctcactgtgttacccaggcaggtctcaaactcctgagctcaagcgattctcccaccttcagcctcccaaagtcctgagattacaggcatgagttactgtgcctggcctgcctttttaacggcttaaaagaaatgaagaataggcgacacagagcacaggtggtctgtaaagtctaaaatatgta

SEQ ID NO: 340875 - DNA, 370 bp, Homo sapiens
ctggtttatatcttgataatctttgtatgatagatctactttaaaactcaaccaagagggtttatctgaaatatcaaaaagcctttgtctttctaaaaacaagtaaaaaaaaaggcctttgtcacattataattttatttaaaccacacccaatagcactgaaccaaaggacaatattctggcagaatgacagtggcagtggtggcacatacatattagaccttttactttcttgcatatcatttgtctcacctagaaaacaagctccacgtcagcagggattttagattactctgttcatgctttatccctagccctggaacagtgcttaattatgttctggggactcatgaatatttgtcagatgaaa

SEQ ID NO: 340876 - DNA, 235 bp, Homo sapiens
cctgatttcaccaattttagcagtctagaaaatgtgactatacaacagtaaataaaagttaacatgatcaaagaactcaggagacaattctttccttgttcaatctgctgtctccccaacccctgtcaagataaaggagagggaggtggacaggttatggctttaccatttataatcaaaccacagacctgggataagggcccttcaattcatcctcccaactgtttaaaacatg

SEQ ID NO: 340877 - DNA, 341 bp, Homo sapiens
accccaagacattatctcttgaatcttgggaatcttagaaacaatgtagctgcaaaaatattatttgaaaactggaaactactatcctgtattattctagatttgtttattgaattatttacatttagcagtaaatttgttgcttgaattgtaagctgtaagaggcactttgccttggcttgtttcatgtaatctttccatagggttatgtaaatgtcatcacatgcaaaatatttctgttgtgaatgatggagagatttttcaactgctactgacacatgccctttaatctatcttttaaaactaattcaagttttagtcattggcttgttttcattccc

SEQ ID NO: 340878 - DNA, 231 bp, Homo sapiens
cccatcctaccatttattgagcacctgttctttactactgactgggtattttatataattatttgtaagccttaaaatagtattgcaaggtgggtaacatttccttttagagatgagggagtgtaggtagacagtagttattttttggtcaagagagcatacttgatagagcctgtctctgagcttaattgcatctgtgttgcttgttaattcttaggaactttcattcta

SEQ ID NO: 340879 - DNA, 644 bp, Homo sapiens
cacacatgctgttgtggcctgtgccacactaacctagacttgggactgtgcccttttctataatacatacatgtacacaccctcctcacatacagttattcatagtgtacagactactgaaactttagtgtacctggaaggactcacatcttaggacacatacaacttaaaattcaaagttcaataaaccagtttctaaaaatgccccgtcttagtccttttagtgttgctatcacagaatagctgaagatgggtaatttattaagaaaagaggtttatttggctcacaattctgatggctggaaagtccaagattgggctgctgcatctggtgagggccttaggtagcttccactcatggtggaaagaagggaaggaaaagtgcaaagagatcacaagacaagaaaaagaatgaaactggggaagccagattctttaactacttgctcttgcaggaactaatccattcctggaagattgagaacgcactcactccctcaggatggcattagtctgttcattagggatccatccccatcctccatctcctatggcccctccccaaacatttctgaaatggaagccctagacttctgatcttaactagatccatttttttttttttcttagacagaatctcactc

SEQ ID NO: 340880 - DNA, 2131 bp, Homo sapiens
atctccgtccggggtcagtcagtcgctccctgtcgctgccggagagtctctgcttcccccttcctacgcgctccgcggcggtagctcgggctctccggaggagggggcgacagagaaaaagagaggctgacttaataaagtttcctgaaacaacaactaccaccgaaaaggcccaaggtggggggagacccccattttcctccgcccctctcctaaagcctgagggaccgttgcaggtggagcggcgctggtgggacccgggttgcggcggcagccgttgccccggcgagggaagcctcaggtcctgcccgctccggttccggctccttcggtggtggcggcggcagctgctgccgggcggttcctcctgtcaactgcctccgcccgcgcgcctcccgcctagccacacagcgcggaggacgccgtgagccgccgccgcagtcgtctcggcccgcggagggacgtggtgagctgtggcgcttccgcgtcagcgccggcggggactctttgggagcgcgtcgggcccgagtccgggttcccccgcgtggtcagcggaggctgcgccaggtggggcccgcagccgcctcccacgccaggctgtccccgcggccgcccggcctgccttccttccttccgcccgcccgccggcccgccctaagagttgaccacgccgcaatgaagagcttcttacagtgaaagcaaagtaggtcgagtccactgaaaatgcctttaagggacaaatactgtcagactgaccaccatcatcacggatgctgtgaaccagtttatatcctggaacctggagatcctcctttgttacagcaaccactacagacatccaaatctggtattcaacaaataattgagtgctttcgatcaggaactaaacaacttaagcatattttattaaaagatgtggacactatttttgaatgtaagttatgccgcagtctcttcagaggattaccaaatttaattacccataaaaaattctactgcccaccaagtctccagatggatgacaaccttcctgatgtaaatgataaacaaagccaagccataaatgatctcctagaagccatatatccaagtgtggacaaacgagaatatattattaagctagaacccatagaaactaatcaaaatgcagtatttcaatatatttcgaggactgataatcctattgaagtcacagagtcaagcagtactcctgaacaaaccgaagttcagatacaggaaactagcactgaacagtcaaaaacagtaccggttacagatacagaggtggaaactgtagagccccctcctgttgagattgttacagatgaagttgcacctacatctgatgaacaacctcaggagtcgcaggctgacttggaaacttctgacaattctgattttggtcaccagttgatatgttgtctttgtagaaaagaattcaattctagacgaggtgttcgccgtcacattcgaaaagtacacaagaaaaagatggaagaactaaaaaagtacattgaaacacgaaagaatccaaaccaatcctctaaaggacgcagtaagaatgttctagttccattaagtaggagttgtccagtatgttgtaaatcatttgctacaaaagcgaatgtaaggaggcattttgatgaagttcatagaggactaaggagggattcaattactcctgatatagcaacaaagcctgggcaacctttgttcctggattctatttctcctaaaaaatcttttaagactcgaaaacaaaagtcttcttcaaaggctgaatacaatttaactgcatgcaaatgcctcctttgcaagaggaaatatagttcacaaataatgcttaaaagacatatgcaaattgtccacaagataactctttctggaacaaactctaaaagagaaaaaggccctaataatactgccaacagttcagaaataaaagttaaagttgaaccagcagattctgtagaatcttcacccccttccattacccattctccacagaatgaattaaagggaacaaatcattcaaatgaaaaaaagaacacaccggcagcacagaaaaataaagttaaacaagactctgaaagccctaaatcaactagtccgtcggctgcaggtggccagc

SEQ ID NO: 340881 - DNA, 2764 bp, Homo sapiens
atctccgtccggggtcagtcagtcgctccctgtcgctgccggagagtctctgcttcccccttcctacgcgctccgcggcggtagctcgggctctccggaggagggggcgacagagaaaaagagaggctgacttaataaagtttcctgaaacaacaactaccaccgaaaaggcccaaggtggggggagacccccattttcctccgcccctctcctaaagcctgagggaccgttgcaggtggagcggcgctggtgggacccgggttgcggcggcagccgttgccccggcgagggaagcctcaggtcctgcccgctccggttccggctccttcggtggtggcggcggcagctgctgccgggcggttcctcctgtcaactgcctccgcccgcgcgcctcccgcctagccacacagcgcggaggacgccgtgagccgccgccgcagtcgtctcggcccgcggagggacgtggtgagctgtggcgcttccgcgtcagcgccggcggggactctttgggagcgcgtcgggcccgagtccgggttcccccgcgtggtcagcggaggctgcgccaggtggggcccgcagccgcctcccacgccaggctgtccccgcggccgcccggcctgccttccttccttccgcccgcccgccggcccgccctaagagttgaccacgccgcaatgaagagcttcttacagtgaaagcaaagtaggtcgagtccactgaaaatgcctttaagggacaaatactgtcagactgaccaccatcatcacggatgctgtgaaccagtttatatcctggaacctggagatcctcctttgttacagcaaccactacagacatccaaatctggtattcaacaaataattgagtgctttcgatcaggaactaaacaacttaagcatattttattaaaagatgtggacactatttttgaatgtaagttatgccgcagtctcttcagaggattaccaaatttaattacccataaaaaattctactgcccaccaagtctccagatggatgacaaccttcctgatgtaaatgataaacaaagccaagccataaatgatctcctagaagccatatatccaagtgtggacaaacgagaatatattattaagctagaacccatagaaactaatcaaaatgcagtatttcaatatatttcgaggactgataatcctattgaagtcacagagtcaagcagtactcctgaacaaaccgaagttcagatacaggaaactagcactgaacagtcaaaaacagtaccggttacagatacagaggtggaaactgtagagccccctcctgttgagattgttacagatgaagttgcacctacatctgatgaacaacctcaggagtcgcaggctgacttggaaacttctgacaattctgattttggtcaccagttgatatgttgtctttgtagaaaagaattcaattctagacgaggtgttcgccgtcacattcgaaaagtacacaagaaaaagatggaagaactaaaaaagtacattgaaacacgaaagaatccaaaccaatcctctaaaggacgcagtaagaatgttctagttccattaagtaggagttgtccagtatgttgtaaatcatttgctacaaaagcgaatgtaaggaggcattttgatgaagttcatagaggactaaggagggattcaattactcctgatatagcaacaaagcctgggcaacctttgttcctggattctatttctcctaaaaaatcttttaagactcgaaaacaaaagtcttcttcaaaggctgaatacaatttaactgcatgcaaatgcctcctttgcaagaggaaatatagttcacaaataatgcttaaaagacatatgcaaattgtccacaagataactctttctggaacaaactctaaaagagaaaaaggccctaataatactgccaacagttcagaaataaaagttaaagttgaaccagcagattctgtagaatcttcacccccttccattacccattctccacagaatgaattaaagggaacaaatcattcaaatgaaaaaaagaacacaccggcagcacagaaaaataaagttaaacaagactctgaaagccctaaatcaactagtccgtcggctgcaggtggccagcaaaaaaccagaaaaccaaaactttcagctggctttgactttaagcaactttactgtaaactttgtaaacgtcagtttacttccaaacagaacttgactaaacacatcgagttgcacacagatggaaataacatttatgttaaattctacaagtgtcctctttgcacttatgaaactcgtcggaaacgtgatgtgatacgacatataactgtggttcataaaaagtcatctcgttatcttgggaaaataacagccagtttagagatcagagctataaaaaagcctattgattttgttctaaataaagtggcaaaaagaggcccttcgagggatgaagcaaaacatagtgattcaaaacatgatggcacttctaactctcctagtaaaaagtatgaagtagctgacgtcggtattgaagtaaaagtcacaaaaaacttttctcttcacagatgcaataaatgtggaaaggcatttgccaaaaagacttaccttgaacatcataagaaaactcataaggcaaatgcttccaattcacctgaaggaaacaaaaccaaaggccgaagtacaagatctaaggctcttgtctggtgaggaacagttaacagagttttgcttttttccccccatcgaacta

SEQ ID NO: 340882 - DNA, 1576 bp, Homo sapiens
atctccgtccggggtcagtcagtcgctccctgtcgctgccggagagtctctgcttcccccttcctacgcgctccgcggcggtagctcgggctctccggaggagggggcgacagagaaaaagagaggctgacttaataaagtttcctgaaacaacaactaccaccgaaaaggcccaaggtggggggagacccccattttcctccgcccctctcctaaagcctgagggaccgttgcaggtggagcggcgctggtgggacccgggttgcggcggcagccgttgccccggcgagggaagcctcaggtcctgcccgctccggttccggctccttcggtggtggcggcggcagctgctgccgggcggttcctcctgtcaactgcctccgcccgcgcgcctcccgcctagccacacagcgcggaggacgccgtgagccgccgccgcagtcgtctcggcccgcggagggacgtggtgagctgtggcgcttccgcgtcagcgccggcggggactctttgggagcgcgtcgggcccgagtccgggttcccccgcgtggtcagcggaggctgcgccaggtggggcccgcagccgcctcccacgccaggctgtccccgcggccgcccggcctgccttccttccttccgcccgcccgccggcccgccctaagagttgaccacgccgcaatgaagagcttcttacagtgaaagcaaagtaggtcgagtccactgaaaatgcctttaagggacaaatactgtcagactgaccaccatcatcacggatgctgtgaaccagtttatatcctggaacctggagatcctcctttgttacagcaaccactacagacatccaaatctggtattcaacaaataattgagtgctttcgatcagatcaatattttgtacttttagggaatattttattttttagttatttgtgtcaaattataattataaaaggtacagcagaaaatataccatgtttttatataggttcacacctgtacttaggagggaccctgtccatctatatactttttgtataaaattttaaaatgttaaagatccacaaggtcttaataaaatgattctatagctagaaaaacatttaccttcccagtgctttgcactaaaatatactgtgaaaggaaactagaaagactgtaactattgctggaaatgttctatattgaatgtacatgctcttgttggaaaaatgtactatatgtgatggaaataaaccagaatcgaagttatttcagctaaatgtgcttcagcaaaggtgcattggttgaaacttaaatgttttattatcaaatttaaacttattcagtgactatgagcagctacacttgaattatattctgatagttttatttctaagaaatagagtaataatttctctttaatttaaaaacagatttactttcccacatattgaaaatttgtacttatagatctaactttaataactaatagtataatatatttagggaactaaatgtgtaggtggtatttcatttataagccatcttcattagttgcacattattaaacctatatgtttgacttttgcaaggtgttatc

SEQ ID NO: 340883 - DNA, 2414 bp, Homo sapiens
cagtggtgcaatctcggctcactacaccttccgcctcctgggttcaagcaattctcctgcctcagcctcccaagtagctgggattacaggcataagccaccacacccggctaattttgtatttttagtagagatggggtttcatcatgttggtcaggctggtctcaaaactcctggacctcaggtgatccgcccacctcggcctcccaaagtgctggggttacaggcatgagccaccgtgcctggccaaaaaatactacttgttaaagaaggttttggaacaaatgtagatttttaaaaaatgcaacataaaatgagtagactccctatacttttcgcaagtctatatatattttaaaagttcaccttctatacctgtgtcccctgtattaaggcatttaatgtatttaatgagtattaaattagtttcagattcaggttctaaagcaaaatattagtttgagtgctgtgagggttaaatgttgtggtttgattatcacacgtttttttatttgtgtggaaaacttgagatgaaaccatcttttagaagtaatttactgttgcatagttttaaaaactaggttttattagtaaactcaaaagtgttcatttattcccatttctcctcagataacttcaagtgatgtacgaaaaggtttggagttcatttttgtggaaagactttaaattggtgttagaaccactaaacatcttcaaatggtactatgaggaaaaaaagaaaaacatttttctaaatattcaactataactgctgttttctgactaaaataaccatctaaccacttgtttctaaggcactgcctattccagcactttcaagtagctgtgatattacatgttgtcatcacagtccatcagctatccacccttgaccttgtgcatttggtcgacagtttctacaaaaatgttacaaattttgttttctaaacaatttgttgattaagtgatcaacaacctgaagaaaatatcaatttttaattgacaaagactttatatcttagtgattttagttttgtttctctttatttggcaacattttcatctgaattgtatagatatatgattttctagtgagtgtatgttaggaacaaaagacaaaatagtatcaacacattataaatatttagcttactaaatatttgtaattatttttacatccatttatttctagcttgttctccagcacttcagtgtttgaaagtttcatcctaaaatatatactacaggaaagctgcagttcattttcatgcatggatcattacatttttcacttgtaaatgtaggtttttatgaaaattaaacattcccctatttttctttaaattttatacaaagcactttaatgatagatgcaaccttatttttcagttcctatttttttaaagaccacacatttactaatgttaatatgaaggtaataaatagcttactgatattttatggatgcagacaatccatgcacaaccacttcttatgatactagtttatttccttaaatattgctacaaaaggaagatgcgggtgtaagccctgatttttttttctcccaagaaaaatcttaaaggaccactttagataatatttgattcctactgtaaaatttagaaaatgatgaattcttgtccatttttgtaatcaagattttaggaaaaacagaagtacatctatctttatgaaattttgggcaggtttttgtgtatcaatattttgtacttttagggaatattttattttttagttatttgtgtcaaattataattataaaaggtacagcagaaaatataccatgtttttatataggttcacacctgtacttaggagggaccctgtccatctatatactttttgtataaaattttaaaatgttaaagatccacaaggtcttaataaaatgattctatagctagaaaaacatttaccttcccagtgctttgcactaaaatatactgtgaaaggaaactagaaagactgtaactattgctggaaatgttctatattgaatgtacatgctcttgttggaaaaatgtactatatgtgatggaaataaaccagaatcgaagttatttcagctaaatgtgcttcagcaaaggtgcattggttgaaacttaaatgttttattatcaaatttaaacttattcagtgactatgagcagctacacttgaattatattctgatagttttatttctaagaaatagagtaataatttctctttaatttaaaaacagatttactttcccacatattgaaaatttgtacttatagatctaactttaataactaatagtataatatatttagggaactaaatgtgtaggtggtatttcatttataagccatcttcattagttgcacattattaaacctatatgtttgacttttgcaaggtgttatc

SEQ ID NO: 340884 - DNA, 4502 bp, Homo sapiens
atctccgtccggggtcagtcagtcgctccctgtcgctgccggagagtctctgcttcccccttcctacgcgctccgcggcggtagctcgggctctccggaggagggggcgacagagaaaaagagaggctgacttaataaagtttcctgaaacaacaactaccaccgaaaaggcccaaggtggggggagacccccattttcctccgcccctctcctaaagcctgagggaccgttgcaggtggagcggcgctggtgggacccgggttgcggcggcagccgttgccccggcgagggaagcctcaggtcctgcccgctccggttccggctccttcggtggtggcggcggcagctgctgccgggcggttcctcctgtcaactgcctccgcccgcgcgcctcccgcctagccacacagcgcggaggacgccgtgagccgccgccgcagtcgtctcggcccgcggagggacgtggtgagctgtggcgcttccgcgtcagcgccggcggggactctttgggagcgcgtcgggcccgagtccgggttcccccgcgtggtcagcggaggctgcgccaggtggggcccgcagccgcctcccacgccaggctgtccccgcggccgcccggcctgccttccttccttccgcccgcccgccggcccgccctaagagttgaccacgccgcaatgaagagcttcttacagtgaaagcaaagtaggtcgagtccactgaaaatgcctttaagggacaaatactgtcagactgaccaccatcatcacggatgctgtgaaccagtttatatcctggaacctggagatcctcctttgttacagcaaccactacagacatccaaatctggtattcaacaaataattgagtgctttcgatcaggaactaaacaacttaagcatattttattaaaagatgtggacactatttttgaatgtaagttatgccgcagtctcttcagaggattaccaaatttaattacccataaaaaattctactgcccaccaagtctccagatggatgacaaccttcctgatgtaaatgataaacaaagccaagccataaatgatctcctagaagccatatatccaagtgtggacaaacgagaatatattattaagctagaacccatagaaactaatcaaaatgcagtatttcaatatatttcgaggactgataatcctattgaagtcacagagtcaagcagtactcctgaacaaaccgaagttcagatacaggaaactagcactgaacagtcaaaaacagtaccggttacagatacagaggtggaaactgtagagccccctcctgttgagattgttacagatgaagttgcacctacatctgatgaacaacctcaggagtcgcaggctgacttggaaacttctgacaattctgattttggtcaccagttgatatgttgtctttgtagaaaagaattcaattctagacgaggtgttcgccgtcacattcgaaaagtacacaagaaaaagatggaagaactaaaaaagtacattgaaacacgaaagaatccaaaccaatcctctaaaggacgcagtaagaatgttctagttccattaagtaggagttgtccagtatgttgtaaatcatttgctacaaaagcgaatgtaaggaggcattttgatgaagttcatagaggactaaggagggattcaattactcctgatatagcaacaaagcctgggcaacctttgttcctggattctatttctcctaaaaaatcttttaagactcgaaaacaaaagtcttcttcaaaggctgaatacaatttaactgcatgcaaatgcctcctttgcaagaggaaatatagttcacaaataatgcttaaaagacatatgcaaattgtccacaagataactctttctggaacaaactctaaaagagaaaaaggccctaataatactgccaacagttcagaaataaaagttaaagttgaaccagcagattctgtagaatcttcacccccttccattacccattctccacagaatgaattaaagggaacaaatcattcaaatgaaaaaaagaacacaccggcagcacagaaaaataaagttaaacaagactctgaaagccctaaatcaactagtccgtcggctgcaggtggccagcaaaaaaccagaaaaccaaaactttcagctggctttgactttaagcaactttactgtaaactttgtaaacgtcagtttacttccaaacagaacttgactaaacacatcgagttgcacacagatggaaataacatttatgttaaattctacaagtgtcctctttgcacttatgaaactcgtcggaaacgtgatgtgatacgacatataactgtggttcataaaaagtcatctcgttatcttgggaaaataacagccagtttagagatcagagctataaaaaagcctattgattttgttctaaataaagtggcaaaaagaggcccttcgagggatgaagcaaaacatagtgattcaaaacatgatggcacttctaactctcctagtaaaaagtatgaagtagctgacgtcggtattgaagtaaaagtcacaaaaaacttttctcttcacagatgcaataaatgtggaaaggcatttgccaaaaagacttaccttgaacatcataagaaaactcataaggcaaatgcttccaattcacctgaaggaaacaaaaccaaaggccgaagtacaagatctaaggctcttgtctgataacttcaagtgatgtacgaaaaggtttggagttcatttttgtggaaagactttaaattggtgttagaaccactaaacatcttcaaatggtactatgaggaaaaaaagaaaaacatttttctaaatattcaactataactgctgttttctgactaaaataaccatctaaccacttgtttctaaggcactgcctattccagcactttcaagtagctgtgatattacatgttgtcatcacagtccatcagctatccacccttgaccttgtgcatttggtcgacagtttctacaaaaatgttacaaattttgttttctaaacaatttgttgattaagtgatcaacaacctgaagaaaatatcaatttttaattgacaaagactttatatcttagtgattttagttttgtttctctttatttggcaacattttcatctgaattgtatagatatatgattttctagtgagtgtatgttaggaacaaaagacaaaatagtatcaacacattataaatatttagcttactaaatatttgtaattatttttacatccatttatttctagcttgttctccagcacttcagtgtttgaaagtttcatcctaaaatatatactacaggaaagctgcagttcattttcatgcatggatcattacatttttcacttgtaaatgtaggtttttatgaaaattaaacattcccctatttttctttaaattttatacaaagcactttaatgatagatgcaaccttatttttcagttcctatttttttaaagaccacacatttactaatgttaatatgaaggtaataaatagcttactgatattttatggatgcagacaatccatgcacaaccacttcttatgatactagtttatttccttaaatattgctacaaaaggaagatgcgggtgtaagccctgatttttttttctcccaagaaaaatcttaaaggaccactttagataatatttgattcctactgtaaaatttagaaaatgatgaattcttgtccatttttgtaatcaagattttaggaaaaacagaagtacatctatctttatgaaattttgggcaggtttttgtgtatcaatattttgtacttttagggaatattttattttttagttatttgtgtcaaattataattataaaaggtacagcagaaaatataccatgtttttatataggttcacacctgtacttaggagggaccctgtccatctatatactttttgtataaaattttaaaatgttaaagatccacaaggtcttaataaaatgattctatagctagaaaaacatttaccttcccagtgctttgcactaaaatatactgtgaaaggaaactagaaagactgtaactattgctggaaatgttctatattgaatgtacatgctcttgttggaaaaatgtactatatgtgatggaaataaaccagaatcgaagttatttcagctaaatgtgcttcagcaaaggtgcattggttgaaacttaaatgttttattatcaaatttaaacttattcagtgactatgagcagctacacttgaattatattctgatagttttatttctaagaaatagagtaataatttctctttaatttaaaaacagatttactttcccacatattgaaaatttgtacttatagatctaactttaataactaatagtataatatatttagggaactaaatgtgtaggtggtatttcatttataagccatcttcattagttgcacattattaaacctatatgtttgacttttgcaaggtgttatc

SEQ ID NO: 340885 - DNA, 3269 bp, Homo sapiens
gagagtatgaggcggactcggttaagtcatacgggacgggtacagatacaatgaggggccgtcgagccccctcctgttgagattgttacagatgaagttgcacctacatctgatgaacaacctcaggagtcgcaggctgacttggaaacttctgacaattctgattttggtcaccagttgatatgttgtctttgtagaaaagaattcaattctagacgaggtgttcgccgtcacattcgaaaagtacacaagaaaaagatggaagaactaaaaaagtacattgaaacacgaaagaatccaaaccaatcctctaaaggacgcagtaagaatgttctagttccattaagtaggagttgtccagtatgttgtaaatcatttgctacaaaagcgaatgtaaggaggcattttgatgaagttcatagaggactaaggagggattcaattactcctgatatagcaacaaagcctgggcaacctttgttcctggattctatttctcctaaaaaatcttttaagactcgaaaacaaaagtcttcttcaaaggctgaatacaatttaactgcatgcaaatgcctcctttgcaagaggaaatatagttcacaaataatgcttaaaagacatatgcaaattgtccacaagataactctttctggaacaaactctaaaagagaaaaaggccctaataatactgccaacagttcagaaataaaagttaaagttgaaccagcagattctgtagaatcttcacccccttccattacccattctccacagaatgaattaaagggaacaaatcattcaaatgaaaaaaagaacacaccggcagcacagaaaaataaagttaaacaagactctgaaagccctaaatcaactagtccgtcggctgcaggtggccagcaaaaaaccagaaaaccaaaactttcagctggctttgactttaagcaactttactgtaaactttgtaaacgtcagtttacttccaaacagaacttgactaaacacatcgagttgcacacagatggaaataacatttatgttaaattctacaagtgtcctctttgcacttatgaaactcgtcggaaacgtgatgtgatacgacatataactgtggttcataaaaagtcatctcgttatcttgggaaaataacagccagtttagagatcagagctataaaaaagcctattgattttgttctaaataaagtggcaaaaagaggcccttcgagggatgaagcaaaacatagtgattcaaaacatgatggcacttctaactctcctagtaaaaagtatgaagtagctgacgtcggtattgaagtaaaagtcacaaaaaacttttctcttcacagatgcaataaatgtggaaaggcatttgccaaaaagacttaccttgaacatcataagaaaactcataaggcaaatgcttccaattcacctgaaggaaacaaaaccaaaggccgaagtacaagatctaaggctcttgtctgataacttcaagtgatgtacgaaaaggtttggagttcatttttgtggaaagactttaaattggtgttagaaccactaaacatcttcaaatggtactatgaggaaaaaaagaaaaacatttttctaaatattcaactataactgctgttttctgactaaaataaccatctaaccacttgtttctaaggcactgcctattccagcactttcaagtagctgtgatattacatgttgtcatcacagtccatcagctatccacccttgaccttgtgcatttggtcgacagtttctacaaaaatgttacaaattttgttttctaaacaatttgttgattaagtgatcaacaacctgaagaaaatatcaatttttaattgacaaagactttatatcttagtgattttagttttgtttctctttatttggcaacattttcatctgaattgtatagatatatgattttctagtgagtgtatgttaggaacaaaagacaaaatagtatcaacacattataaatatttagcttactaaatatttgtaattatttttacatccatttatttctagcttgttctccagcacttcagtgtttgaaagtttcatcctaaaatatatactacaggaaagctgcagttcattttcatgcatggatcattacatttttcacttgtaaatgtaggtttttatgaaaattaaacattcccctatttttctttaaattttatacaaagcactttaatgatagatgcaaccttatttttcagttcctatttttttaaagaccacacatttactaatgttaatatgaaggtaataaatagcttactgatattttatggatgcagacaatccatgcacaaccacttcttatgatactagtttatttccttaaatattgctacaaaaggaagatgcgggtgtaagccctgatttttttttctcccaagaaaaatcttaaaggaccactttagataatatttgattcctactgtaaaatttagaaaatgatgaattcttgtccatttttgtaatcaagattttaggaaaaacagaagtacatctatctttatgaaattttgggcaggtttttgtgtatcaatattttgtacttttagggaatattttattttttagttatttgtgtcaaattataattataaaaggtacagcagaaaatataccatgtttttatataggttcacacctgtacttaggagggaccctgtccatctatatactttttgtataaaattttaaaatgttaaagatccacaaggtcttaataaaatgattctatagctagaaaaacatttaccttcccagtgctttgcactaaaatatactgtgaaaggaaactagaaagactgtaactattgctggaaatgttctatattgaatgtacatgctcttgttggaaaaatgtactatatgtgatggaaataaaccagaatcgaagttatttcagctaaatgtgcttcagcaaaggtgcattggttgaaacttaaatgttttattatcaaatttaaacttattcagtgactatgagcagctacacttgaattatattctgatagttttatttctaagaaatagagtaataatttctctttaatttaaaaacagatttactttcccacatattgaaaatttgtacttatagatctaactttaataactaatagtataatatatttagggaactaaatgtgtaggtggtatttcatttataagccatcttcattagttgcacattattaaacctatatgtttgacttttgcaaggtgttatc

SEQ ID NO: 340886 - DNA, 668 bp, Homo sapiens
cccccccccccatatgaaatcctctttaaaaccttcagttttctacatatcacagtaagtgcttggtaattcaatgttatcagcaggaattgtggcagggttccttccactgtaggtaatcagtaaacatattttcattgaaataataatgtaaaagttggagacaattccgacatcacttatacttaagagtggaatgcatctgaagtgtgtgttgaaatatggatgatgattctgggggatcttggagattcactgagccggaaacaatataatatatcatggtaagagaatgttaacactcttggcttctctgttctgcctcctccatctaagtccctttcctgttattcactttgtactgtgaaaaaactagactacctcttcagaagcaaaggagcagcataaaatgaacatgaacactgccatggataaatttgctggtatgcaccatttcctaggcctagaagatagcgacattggtctaatatgttgcctttttaaaagagttcctgtcgagttggaatagcttgtagtcacaaaacattacagttggtgactgaagaacaaggatttaaatcagctctagctggctccaaaggttatgttctttccttagaaccaaacagagtttgacttctttgagaattatctagcttcttctccta

SEQ ID NO: 340887 - DNA, 346 bp, Homo sapiens
cccaacaagaaaacaaaacatacagatagatttaacacacagtaggcactcaaaaaagctcatggattgatgggtaaaattcacgtaaatagctgaggccacgattgaatattaatggaatgcagatgaaatagtattaaagatatttaatcagggaaaaagcatattttcctgattaaatcctatgtatatgcagctagtattttctaaagggaatgaaagtacacttaacgcacaaacatcaaaatgacaagtgctatcatttgccattttagcaatatttagctaaatttcttttttgttttgttttgttttgaggcggagtttcgctcttgttgggagcttg

SEQ ID NO: 340888 - DNA, 147 bp, Homo sapiens
ttaaatctacacagcagggcctagactcctggttcaaagaaattaagtttatatccaccataagccagatctttttctctctttgaactcttgactctgtgttgtgctgttcccactgacactgtaaattaaaggataaaatggtgc

SEQ ID NO: 340889 - DNA, 269 bp, Homo sapiens
cccttccccccaggtatgacaggtgactgggagacagacagagtgacaaatggaatgagcatgggctttggaatcaaagatactcagccctaccacctactagatgggtgacctggggcaagtcactttatctcatggaacctcagtatcttcatacgaagaggggacagtagtacttagtgcttggtacacaatagggacttacaaaaaatagccactgttcctgtgatgaaccaagagaagaaaaccccataaacttaacaccatag

SEQ ID NO: 340890 - DNA, 218 bp, Homo sapiens
ctcatatctttagcaagggaagggggaaaatgatcattttgaaatgttttcagtgtgttcttcacaacaatttgctctgctcaagtgaaaaagacttcagcagaaccttatctcatataggcagaggagcaatacccaattccagatctctttagccttctatctcactcgaggagcaagaagaggggaaaaaaagaagttgtagtgaaacttacagc

SEQ ID NO: 340891 - DNA, 478 bp, Homo sapiens
ccatgctcccaggagctctatgatgctggtattaatatacccattatacacattaggaaactgaaactcagagatgtcaagtgccttgcccccaaccagacagctggtaaagacatgaattcaggtatgcatgtctctagacatgttgctttgtatcaaatacaaataatacttctttattatagcacgtactcctgacatattattttgcaaactgtaaacttctttgctgttcattcacttgtttaattcttactacagccccactatcaattctatttgtgagggaattaagtctagaaaaattagatacaattgctcaagattccatagcctggccaggaacccaggtgttctattccaagtgcagggccatttcactgcccacatatccatgtgccgggctctgttccatgctaacctgaagtcccctgagagaaagcctgtgtttgatgctgcttctgtatttcccactgat

SEQ ID NO: 340892 - DNA, 208 bp, Homo sapiens
agatgctcccaatttggtgtggtttggagtgtaatttagatcaaacgtctccatgtaaatgagtcagggtttcttaattaggtgcctctaaagcaaaaccttggaccacatcagtaggtgtgggtgtggtacccacaatactggaatctttcctatagaccaggctctcagtatcattcaaataaagcttttttttttcttttttttt

SEQ ID NO: 340893 - DNA, 645 bp, Homo sapiens
agcggattgtattgcacacctctaaaaaaaacactgcctctgatttatcaatataaaaaagatcctctgagaggaggagggcacttttgtgtgatggcaacttcacttctaggggaagaaccgaggttgggatcgactcctctggccatgcttgccgctacctgtaataagataggcagccccagcccgtctccctcctccctctcggacagctcttcttccttcggcaaaggcttccacccctggaaacgctcctcgtcctcttcttccgccagctgcaacgtagtgggttccagtctctcaagcttcggcgtgtccggggcctccaggaacggcggctcgtcctcggcggctgcggcggccgcggcagcagccgcggctgccgcggccctggtgtccgactcgttcagctgcggcggctcgcctggctccagcgccttctccctcacctccagcggcggctcctccgcgcactcgcaggacggctcccaccagccggtgttcatctccaaggtgcacacctctgtggacgggctgcagggcatctacccgcgggtgggcatggcgcacccgtacgagtcgtggtttaagccctcgcacccgggcctgggtgctgcgggcgaggtgggctcggccggcgcctcc

SEQ ID NO: 340894 - DNA, 568 bp, Homo sapiens
ctcccctcccccactccttctcctctcctcctcgcaggaagaaccgaggttgggatcgactcctctggccatgcttgccgctacctgtaataagataggcagccccagcccgtctccctcctccctctcggacagctcttcttccttcggcaaaggcttccacccctggaaacgctcctcgtcctcttcttccgccagctgcaacgtagtgggttccagtctctcaagcttcggcgtgtccggggcctccaggaacggcggctcgtcctcggcggctgcggcggccgcggcagcagccgcggctgccgcggccctggtgtccgactcgttcagctgcggcggctcgcctggctccagcgccttctccctcacctccagcggcggctcctccgcgcactcgcaggacggctcccaccagccggtgttcatctccaaggtgcacacctctgtggacgggctgcagggcatctacccgcgggtgggcatggcgcacccgtacgagtcgtggtttaagccctcgcacccgggcctgggtgctgcgggcgaggtgggctcggccggcgcctcc

SEQ ID NO: 340895 - DNA, 627 bp, Homo sapiens
cgtggtgcttgctcccgaatcagacgccggcagccaaacttgtcccctcctgtagagtaggaagcggccgggcgccggggctgttgggggtgccaggaagaaccgaggttgggatcgactcctctggccatgcttgccgctacctgtaataagataggcagccccagcccgtctccctcctccctctcggacagctcttcttccttcggcaaaggcttccacccctggaaacgctcctcgtcctcttcttccgccagctgcaacgtagtgggttccagtctctcaagcttcggcgtgtccggggcctccaggaacggcggctcgtcctcggcggctgcggcggccgcggcagcagccgcggctgccgcggccctggtgtccgactcgttcagctgcggcggctcgcctggctccagcgccttctccctcacctccagcggcggctcctccgcgcactcgcaggacggctcccaccagccggtgttcatctccaaggtgcacacctctgtggacgggctgcagggcatctacccgcgggtgggcatggcgcacccgtacgagtcgtggtttaagccctcgcacccgggcctgggtgctgcgggcgaggtgggctcggccggcgcctcc

SEQ ID NO: 340896 - DNA, 218 bp, Homo sapiens
acaggaagcaaaatattggcaggacagctggcaacgcggcaatgtccaggatggagtgcccatcctagaggagggagctcacacaagccagccaggagcccacaggaaacagagagactactgtaaatccttattaagagcagactcatctctgctatctaaaagataaaaacctgataatgtttttaagttgtcctaaggtccaattgacttttttt

SEQ ID NO: 340897 - DNA, 356 bp, Homo sapiens
cgagctcggtaccccttgaatttgcaactgaatggtattgatcagatctaggtacaggtgtagattggatgcgtccttgtttagtctcttctatgtaacattttcttggacaggttgagcacttggtagtggatctgcaaggagggggtgccccctttagtctggaatcccctcttgattcctaggtttgctggcatttatccagataggggcagagtcttcctaaacggcttccctcctttggagtctgctgctccttgcatgccataacccagtcttgagaacctggctcaccttccattgctcccctctcccattcagttgcaaattcaagggggatcctcatagagcgcgca

SEQ ID NO: 340898 - DNA, 405 bp, Homo sapiens
gctggcatttatccagataggggcagagtcttcctaaacggcttccctcctttggagtctgctgctccttgcatgccataacccagtcttgagaacctggctcaccttccattgctcccctctcccattcagttgcaggttgtggccacttcgtgccctatctctcttctgtggtgtcccttgaatttcctcctttttacttcccctggcaactcctccgtatgtcgctgtcccagcctctcaagtgattctcccatcttcagttttatcctctctagactatctccctattattttccctaaaacacaaccttgatcatgctcatgctcggtcctaaattgtcaacggtttgcaggtgctaccaaaaacaagtctaaatgtcttagatcaaccagtgtcaccaa

SEQ ID NO: 340899 - DNA, 334 bp, Homo sapiens
acctgtaagtgacttagcacagtggctggcacatagtcagtactaaacgaatactagctgctattcaggaagcattgctggaaagattaggagggaagttttcatccaagtggaactgtccagtaggtggatgaagatatacaaaaatctggaattcaggaggcaagcctggggagaagttacacagttgagattgtcaatgtttatggatggttttaaaatcactttgttatctatccctgaatgtgtatttttaaatgtggaggtatttctggttaccaaaataggcttaaagcaggagtccccaacccctaagccgtggaccagtggtgac

SEQ ID NO: 340900 - DNA, 243 bp, Homo sapiens
ggtgggagacacttctgcttccatagtgaacacatattgtaccctcagccctgttccaggctctgtgtctcagattttattctgttttcagtatgggggatgttacgcatggggaaacagaggcctggaagttagcctgatgctatcgtttatagagataaattatatatagatatggaacatataccaggtgcccttggaagcgcccccttacatctgatttgtgtaattctcatgtcagtt

SEQ ID NO: 340901 - DNA, 1048 bp, Homo sapiens
tgtaccaggttggaaagtggtatgtgtctaattgcaggggcgggggtaggggggaggccagaggattaacactctttaaatagacatcagaaaactaagaatagccttgctgcctggtaattgatgggcattcctgactacgggccacacactcagtaggtgctcgataaacatgggtgaaatacaggaataaacaaatactgaaaatgggtcattgggtgagcacttagccagtaaaaatctgtgctttgtataaaaagaactttggactgaggttatatgagtcttcctgcaggctggagacctctgttacctttacttctctacttttgttgtcttgagaccagcttttttatttttggtgaggagaacagcaggcagttcaaatgtcagggaaagacaagttcagcttgctttttccttatttctgtcttgttacctgctatcctgccaggttagaaagatggaatcactcccttttgccctatcatcaagacttcagtgttccctggagcactctaaatttgccatcagacttggatcatcctctaataccaagctcctgggtccttcctgaaggctgcctccttgtcttgctgagaagaattaaggttgcttccctgggaggaattcagcagcacctcttgtaagtcatcaggtgtgctgtaaggatggggcaggcaacatttctttgtactgtgggaaggcctaaatcagtgtttctcaaggtgtgatccttgcaccaccaatcttaagaaatgttctttggagccgggcacagcggctcacgcatataaccccaccttgggaggctgaggcgagaggatcgcttgagcccaggaattgaagaccagtctgggtcacatagtaagattccctgtctctactaatttaaaaaaaaaaaaaagaaaaggtggttgggcctgtagtcccagttactcttgaggcttaggtgggagaatcgcttgagtccacgaggttgaggctgcagtgagccatgattgtaccactgcactccagccagggtgacagagcaagactctatctc

SEQ ID NO: 340902 - DNA, 464 bp, Homo sapiens
aaatggattgcagggagaacaatggaagcagggaagagaccaattaggatgcttaggttcagatagaagacaacaatggtttagaatgatgattggtagaggatatgggcagaggtaagtgtattcaacttctattttagacatagcatctgtagaacccgttagtagataaaatgttagggaaaggaagtaataaaaaatgatccttggtttttgtttgggtgggtggtaatgttaatttacagagataacagactgaaggaggaccactcttaggtgtatatgttgtgggggaatcaagaactctgttctagagacactaattttgaggtgtctgttagacatcccaatgtatcaagtaggcagttggctatgtagtcagatgatcagagaagagatgtgggttcttggctttctttgacagtggacctataattccttgcactcttttatctctttggttt

SEQ ID NO: 340903 - DNA, 683 bp, Homo sapiens
tgtccaatttaagtccatttggggtcctctgcacccgtacaggctggaaagaggaggacacaagtgcaggtctcagctactctctggcccagtttcttaagagggtgcaggcctgatgcacagtgacagtgggtggcaagaggagccacagacgggacatgcagaacactccagggaagcatgtgtcatgacatatcaacagcaacagggtgacttggcctcccttcccctcccagggagttacaggctgcagcttccctgcccctgaccatactcctgggcagtgtggctggttcaccctggaggccacatccctaacagcatgccaaggagacgtgaaagagaggccagatggaggtcagacccagccagggccccaagacacctaaagcagaggtttcaactacaggaggaagaaaaagcaaacaccacgtggtgattgcatctttctgcttcaagggccactttctccagccctccccagtccacatcccacagggcctgggtcggcttaagttttcagtacttcaagaaaagccagaaagctgtatttttatgccaaatctccaagtttttaaatgttcataattcacaatctttaaacctgttagatagggcacacaaaacacctgcaggttccattcagccccacaggctgccagtctgcttacgctgcagtgatt

SEQ ID NO: 340904 - DNA, 474 bp, Homo sapiens
agtggaggcaatacgactaaaacatggtttatacttgtccatagctcagtcattaacatcatttggaatttattcttacacccatgattccttaaaacaatataacgaacataatctaactttcaactagcaaatattcaatatcctatcacagttctttggggttttcttaaaatttctaactcctaccttcatgtcaggctataaattgctaactttcctgacgtcaacttacatgcctcagaatcccatttcttttccctccctagtctcatctgctttaagataacaaagctagtaaacataaggagacttaatggaagtccaaaaaaggatcagaaatgctatgcaaaaataccccccggggcgtcgggggaccagggagaggaggggacatggctttgatagcaatttcaagcagtttttgggctccttacattccacagctggtttaacctctggattaagtggagt

SEQ ID NO: 340905 - DNA, 303 bp, Homo sapiens
ctcagccggtaccattgctcaccgctcctgggctgtgcacaaacccactcacgcacacagcactcagtaagccgggactgacccactcagacacgcacacaggcgcacatcacacacaggctcagccccccaaacccagacccaggagctggagcgtacgggtccacgtggctagaaaatgcaggttggagcggcccccatgccgcccggacccccagcccaggacatcatggtgcccagagagcgtgagccccaagggcattggcaggagctgccgattccatctccctgggtgggttccag

SEQ ID NO: 340906 - DNA, 1242 bp, Homo sapiens
cgcccccaggacgacatctactccccgagcagcagctccaagatcccggtcaagtggacagcgcctgaggcggccaattatcgtgtcttctcccagaagtcagacgtctggtccttcggcgtcctgctgcacgaggttttcacctatggccagtgtccctatgaagggatgaccaaccacgagacgctgcagcagatcatgcgagggtaccggctgccgcgcccggctgcctgcccggcggaggtctacgtgctcatgctggagtgctggaggagcagccccgaggaacggccctccttcgccacgctgcgggagaagctgcacgccatccacagatgccacccctgagtcctcacgtgacccaacgctctgggctccagccaggccagcccctcctccctgcagagcgccaactcgaagggatgccggtctgccggaccgaggagcctctggctgtgggcctcaggccctggcgtgcacacatgttcgtgcaccaggcagacgtgcagacggagggctggggctgacgtcccccgtgcagtgtgactcgtgcagacggagggctggggctgacgtcccccatgcagtgtgactcgtgcagacgaagggctggggctgacgttccccgtgcagtgtgactcgtgcagacggagggctggggctgacgttccccgtgcagtgtgacacgtgtccctggcctctcaagagagacaacggcacaggagggtgggtagaagcctcggaggctctgggtgaggaaccctgagccctgtgtgtctcctgcctgggtcccctggactccctcccagggtgaagagccaaaggcccagttctctccctagtcccagcttgggtttgtggaaatgaccagtgctgactcccaggcagaccgtggtgttgaccccactggatgtgtggtatgtaggcacggggtggcaccgtcacctgcccctcacagacacactggcggcctgtgcacaaacccactcacgcacacagcactcagtaagccgggactgacccactcagacacgcacacaggcgcacatcacacacaggctcagccccccaaacccagacccaggagctggagcgtacgggtccacgtggctagaaaatgcaggttggagcggcccccatgccgcccggacccccagcccaggacatcatggtgcccagagagcgtgagccccaagggcattggcaggagctgccgattccatctccctgggtgggttccag

SEQ ID NO: 340907 - DNA, 234 bp, Homo sapiens
cccggagtaggaaaaaagacaacagaaaaaaaggcagaggttggaccgcactaggtttcatcaagaaacctcgatgattcctctttcgacactaaccactaggactaaacaggaaaagaagcttcgtgcttaagcaagtcccatcatggtggtttaagagtcactaaattaagctgataatgagtccaatccacagagacaaatacagggtgtggctgctgcgaaatacggcgg

SEQ ID NO: 340908 - DNA, 1562 bp, Homo sapiens
caaatggccacatatatcctaatgtacttgagaaatctcgctactaatgctgtgtcactaattttttaatactgtatttaagaaaaaaaaaaagcctgtcttttctattggcatcattcaagaagaaaaaaaaaaagctgaatcaggatatttctgtgtgaatgcacattcctcactaaatctctcaggcagctgctttagtcactgttactaacaccttgctctgtcatctctttgtacacatgtctaatttatcagtttcttgtagattgtcagcagcctgctgcctccgtaccgccacagtgctcacaactagccgggaggcaagactgcccaactgtcagtcctgacacagctctccctgaggagcagccacattccagctcccagtgcgcccctctccactgtctctccaagcctcctcacccctagtcttcatctcctgtggacgaacatctggggtggaagttttgtagccacacacaggatactgcccaagatccagcgggtgttttcttctcggttgttagatgtacaattggattaatgtccatcgttttggaagacgagagaaagttgagaagaacacgaagcacagaccctgatgtgataaaacattttgtggtttctctgagtcacagataaacttctgccatcaaatggctacagttcatttaaatttaaaaaaaagaaaaaagaaacagaaaacgtgtctcagatggctggctttacctcgatagcataagagagacctaagacatgtaaaatacgtatattgcagtatcatctttcctcacactccaaattcagctagggaagttgattccaatatgtttgtcattgatatttattttgtactttatttgctacatgatttatgtctatacaaataatttctctgaggtgaatttaattcatttattttcaaataagcataatttgctcaattaagtatgagtttgaatttagtttgaaatctggaattggccagactgtggtcatttttcttgcacaaaatgataaatgaggtgcatcagaatgttaacaataactgtattttgctgctacgctggtattgtttaggcacttactttctaatcagtagctcattaactgctgggttttgtttttgtatttttaactagagttcttcactggacattactaagtaaatctaagaaagagactaagttatgatttattgacttattcaagttttgatggcatctttacttttattttttcattgcagttgagtagatgtactggtgctgctcctttgtatgtgtgtatgtgtgtgataacgttaaagaaggctcaataacttgaagggaaaaaaatggtgtgtttatttaatgaccagaattttttttacttctcccaaaatcagggtcctactgagtctttcctgataaaaggtatcaagtacaaatgggaaaatatatacatatatagatgtaagatagcctttaattaattaatttacccagagagtgttcaaagtttgattaaaattgtatgttttgttgttgttagtttttttcataacgaatcttccttgc

SEQ ID NO: 340909 - DNA, 4575 bp, Homo sapiens
  misc_feature (3)..(3): n is a, c, g, or t
  misc_feature (5)..(7): n is a, c, g, or t
ggnannnggccccgagactgcatcattccgcaccggctgctgcagggccagagggagcaggtggagcgagagagcgagagagcgagccgcgagccggagcgcgccagacccagggcgagactgcagtgacgcggcccgggagacatggcggacgggcgtctctgaataagcagaatccggagcccctcgctacccgcggccgccgcagcccgggccatgccgcacggctgctgaccgcacgcaggggccggccccgaggacacatgcggcggcctttgccgcctcgcccctgaccctctgccctgttctccatgttgcatttctcgtcagtttctcgggcggtgtagctgccgctgccaccagagccggcggggcatcgcgctgctcattcatccggccgcactttcttttccgtttccacccatcccttcccatttccttctccctttccccgccagcttcgcatccatctcccccaccccgtaaccccctcctgcctccatccaccggggctatggccgcagaagaggtattgcagacggtggaccattataagactgagatagagaggctaaccaaggagctcacggagaccacccacgagaagatccaggctgccgagtacgggctggtggtgctggaggagaagctgaccctcaaacagcagtatgatgaactggaggctgagtacgacagcctcaaacaggagctggagcagctcaaagaggtggcatttgggcagtccttctccatccaccggaaggttgctgaagatggagagactcgggaggaaacgcttctgcaggagtcagcatcgaaggaggcttactatctggggaagatcttggagatgcagaacgagctgaaacagagccgggctgtggtcactaatgtacaggcagaaaacgagaggctcaccgcagtcgtgcaggatctgaaggagaacaatgagatggtggagctacagagaatacggatgaaggatgaaatccgagaatataagttccgggaggcacggctccttcaggactatactgaattggaagaagaaaatatcacattgcagaaactagtgtccacgttgaagcagaaccaggttgaatacgaaggcttaaagcatgagattaagcgatttgaggaggagacggtactgctgaacagccagctggaagatgccatccgattgaaagagattgctgagcaccaactggaagaagccctcgagactttaaaaaatgaaagagagcaaaagaacaacctgcggaaggagctctcccagtatatcagcctcaatgataaccatatcagcatctcagtagatggactcaaatttgccgaggatgggagtgaaccaaacaatgatgacaaaatgaacggtcatatccatgggcctcttgtgaaactgaatggagactatcggactcccaccttaaggaaaggagagtctctgaaccctgtctctgacttattcagtgagctgaacatttcagaaatacagaagttgaagcagcagcttatgcaggtagagcgggaaaaggccattcttttggccaacctacaggagtcacagacacagctggaacacaccaagggggcactgacggagcagcatgagcgggtgcaccggctcacagagcacgtcaatgccatgaggggcctgcaaagcagcaaggagctcaaggctgagctggacggggagaagggccgggactcaggggaggaggcccatgactatgaggtggacatcaatggtttagagatccttgaatgcaaatacagggtggcagtaactgaggtgattgatctgaaagctgaaattaaggccttaaaggagaaatataataaatctgtagaaaactacactgatgagaaggccaagtatgagagtaaaatccagatgtatgatgagcaggtgacaagccttgagaagaccaccaaggagagtggtgagaagatggcccacatggagaaggagttgcaaaagatgaccagcatagccaacgaaaatcacagtacccttaatacggcccaggatgagttagtgacattcagtgaggagttagctcagctttaccaccatgtgtgtctatgtaataatgaaactcccaacagggtcatgctggattactataggcagagcagagtcacccgcagtggcagcctgaaagggcccgatgatcccagaggacttttgtccccacgattagccaggcggggtgtgtcatccccggtagaaacaaggacctcatctgaaccagttgcaaaagaaagcacagaggccagcaaagaaccaagtccaactaagacccccacaatctctcctgttattactgccccaccgtcatctccagtattggatacaagtgacatccgcaaagagccaatgaatatctacaaccttaatgccataatccgggaccaaatcaagcatctgcagaaagctgtggaccggtccttgcaactgtctcgtcaaagagcagcggctcgggagctagcccccatgattgataaagacaaggaagccttaatggaagagatcctcaagctaaagtccctgctgagcaccaaacgggagcagatcgccacattgagggcggtgttgaaagccaacaagcagacagctgaggtggcgctagctaatctcaagaacaaatatgaaaatgaaaaagcaatggtgactgaaaccatgacgaagcttagaaatgaactgaaggctttgaaagaagatgctgcaaccttctcatccctgagagcaatgtttgcaacaagatgtgatgaatatgtcacccagttggatgagatgcagagacagttagcagctgcagaggatgagaagaagactctgaacactttgttacgaatggctatccagcaaaaactcgccctgacccagaggctggaggacttagagtttgaccatgagcagtcccgacgcagcaaaggcaaacttggaaagagcaagatcggcagccctaaagtaagtggggaggcatcagtcaccgtgcccaccatagacacttacctcctgcatagtcagggcccacagacacccaacattcgggtcagcagtggcactcagaggaaaagacaattttcaccttccctttgtgatcagagccgtcccaggacttcaggggcttcctacctacagaatttattaagagttccccctgatcccacctccacagaatcatttcttctgaagggccccccttccatgagtgaattcatccaagggcaccggctcagcaaggaaaaaaggttaaccgtggctccaccagattgtcagcagcctgctgcctccgtaccgccacagtgctcacaactagccgggaggcaagactgcccaactgtcagtcctgacacagctctccctgaggagcagccacattccagctcccagtgcgcccctctccactgtctctccaagcctcctcacccctagtcttcatctcctgtggacgaacatctggggtggaagttttgtagccacacacaggatactgcccaagatccagcgggtgttttcttctcggttgttagatgtacaattggattaatgtccatcgttttggaagacgagagaaagttgagaagaacacgaagcacagaccctgatgtgataaaacattttgtggtttctctgagtcacagataaacttctgccatcaaatggctacagttcatttaaatttaaaaaaaagaaaaaagaaacagaaaacgtgtctcagatggctggctttacctcgatagcataagagagacctaagacatgtaaaatacgtatattgcagtatcatctttcctcacactccaaattcagctagggaagttgattccaatatgtttgtcattgatatttattttgtactttatttgctacatgatttatgtctatacaaataatttctctgaggtgaatttaattcatttattttcaaataagcataatttgctcaattaagtatgagtttgaatttagtttgaaatctggaattggccagactgtggtcatttttcttgcacaaaatgataaatgaggtgcatcagaatgttaacaataactgtattttgctgctacgctggtattgtttaggcacttactttctaatcagtagctcattaactgctgggttttgtttttgtatttttaactagagttcttcactggacattactaagtaaatctaagaaagagactaagttatgatttattgacttattcaagttttgatggcatctttacttttattttttcattgcagttgagtagatgtactggtgctgctcctttgtatgtgtgtatgtgtgtgataacgttaaagaaggctcaataacttgaagggaaaaaaatggtgtgtttatttaatgaccagaattttttttacttctcccaaaatcagggtcctactgagtctttcctgataaaaggtatcaagtacaaatgggaaaatatatacatatatagatgtaagatagcctttaattaattaatttacccagagagtgttcaaagtttgattaaaattgtatgttttgttgttgttagtttttttcataacgaatcttccttgc

SEQ ID NO: 340910 - DNA, 894 bp, Homo sapiens
  misc_feature (3)..(3): n is a, c, g, or t
  misc_feature (5)..(7): n is a, c, g, or t
ggnannnggccccgagactgcatcattccgcaccggctgctgcagggccagagggagcaggtggagcgagagagcgagagagcgagccgcgagccggagcgcgccagacccagggcgagactgcagtgacgcggcccgggagacatggcggacgggcgtctctgaataagcagaatccggagcccctcgctacccgcggccgccgcagcccgggccatgccgcacggctgctgaccgcacgcaggggccggccccgaggacacatgcggcggcctttgccgcctcgcccctgaccctctgccctgttctccatgttgcatttctcgtcagtttctcgggcggtgtagctgccgctgccaccagagccggcggggcatcgcgctgctcattcatccggccgcactttcttttccgtttccacccatcccttcccatttccttctccctttccccgccagcttcgcatccatctcccccaccccgtaaccccctcctgcctccatccaccggggctatggccgcagaagaggtattgcagacggtggaccattataagactgagatagagaggctaaccaaggagctcacggagaccacccacgagaagatccaggctgccgagtacgggctggtggtgctggaggagaagctgaccctcaaacagcagtatgatgaactggaggctgagtacgacagcctcaaacaggagctggagcagctcaaagaggtgagttaaaagatgtgatttatgacatactgaatcaacttgccttccaatttagtgtgtaatatggtaagcatttatacttttagatatgtcttatttttatttggatgcctgtctaccaaaaaataaatgtactacctatgattaaaaatcccaactaggaatct

SEQ ID NO: 340911 - DNA, 1319 bp, Homo sapiens
tgttctcaaaatctatgcaaaaatatctcgtctaacccctaccattgtgcctggccctttgaaatgtgtttcttgctgacgtgcttgtttctcctttccagtcctgacacagctctccctgaggagcagccacattccagctcccagtgcgcccctctccactgtctctccaagcctcctcacccctagtcttcatctcctgtggacgaacatctggggtggaagttttgtagccacacacaggatactgcccaagatccagcgggtgttttcttctcggttgttagatgtacaattggattaatgtccatcgttttggaagacgagagaaagttgagaagaacacgaagcacagaccctgatgtgataaaacattttgtggtttctctgagtcacagataaacttctgccatcaaatggctacagttcatttaaatttaaaaaaaagaaaaaagaaacagaaaacgtgtctcagatggctggctttacctcgatagcataagagagacctaagacatgtaaaatacgtatattgcagtatcatctttcctcacactccaaattcagctagggaagttgattccaatatgtttgtcattgatatttattttgtactttatttgctacatgatttatgtctatacaaataatttctctgaggtgaatttaattcatttattttcaaataagcataatttgctcaattaagtatgagtttgaatttagtttgaaatctggaattggccagactgtggtcatttttcttgcacaaaatgataaatgaggtgcatcagaatgttaacaataactgtattttgctgctacgctggtattgtttaggcacttactttctaatcagtagctcattaactgctgggttttgtttttgtatttttaactagagttcttcactggacattactaagtaaatctaagaaagagactaagttatgatttattgacttattcaagttttgatggcatctttacttttattttttcattgcagttgagtagatgtactggtgctgctcctttgtatgtgtgtatgtgtgtgataacgttaaagaaggctcaataacttgaagggaaaaaaatggtgtgtttatttaatgaccagaattttttttacttctcccaaaatcagggtcctactgagtctttcctgataaaaggtatcaagtacaaatgggaaaatatatacatatatagatgtaagatagcctttaattaattaatttacccagagagtgttcaaagtttgattaaaattgtatgttttgttgttgttagtttttttcataacgaatcttccttgc

SEQ ID NO: 340912 - DNA, 661 bp, Homo sapiens
caaatggccacatatatcctaatgtacttgagaaatctcgctactaatgctgtgtcactaattttttaatactgtatttaagaaaaaaaaaaagcctgtcttttctattggcatcattcaagaagaaaaaaaaaaagctgaatcaggatatttctgtgtgaatgcacattcctcactaaatctctcaggcagctgctttagtcactgttactaacaccttgctctgtcatctctttgtacacatgtctaatttatcagtttcttgtagattgtcagcagcctgctgcctccgtaccgccacagtgctcacaactagccgggaggcaagactgcccaactgtcaggtaaattcagatgtcctttcccttccacccagctgcatgtcagatccatagaccccagctcccctttccgacacctgaactgcctacgcatcattgtattttgctgtattttatttcaagtgtgggctacatagacacacattggacacctgcagtccctgcgttcccagtaggaatacaagagagctggggtttattttgctggctgccagctggtagactctacaggctgccttcagcccctttgtctgtgtaaatacttggattagtccactgtttcattcctttccaaaaaataaaagctggaattgttatga

SEQ ID NO: 340913 - DNA, 4437 bp, Homo sapiens
  misc_feature (3)..(3): n is a, c, g, or t
  misc_feature (5)..(7): n is a, c, g, or t
ggnannnggccccgagactgcatcattccgcaccggctgctgcagggccagagggagcaggtggagcgagagagcgagagagcgagccgcgagccggagcgcgccagacccagggcgagactgcagtgacgcggcccgggagacatggcggacgggcgtctctgaataagcagaatccggagcccctcgctacccgcggccgccgcagcccgggccatgccgcacggctgctgaccgcacgcaggggccggccccgaggacacatgcggcggcctttgccgcctcgcccctgaccctctgccctgttctccatgttgcatttctcgtcagtttctcgggcggtgtagctgccgctgccaccagagccggcggggcatcgcgctgctcattcatccggccgcactttcttttccgtttccacccatcccttcccatttccttctccctttccccgccagcttcgcatccatctcccccaccccgtaaccccctcctgcctccatccaccggggctatggccgcagaagaggtattgcagacggtggaccattataagactgagatagagaggctaaccaaggagctcacggagaccacccacgagaagatccaggctgccgagtacgggctggtggtgctggaggagaagctgaccctcaaacagcagtatgatgaactggaggctgagtacgacagcctcaaacaggagctggagcagctcaaagaggtggcatttgggcagtccttctccatccaccggaaggttgctgaagatggagagactcgggaggaaacgcttctgcaggagtcagcatcgaaggaggcttactatctggggaagatcttggagatgcagaacgagctgaaacagagccgggctgtggtcactaatgtacaggcagaaaacgagaggctcaccgcagtcgtgcaggatctgaaggagaacaatgagatggtggagctacagagaatacggatgaaggatgaaatccgagaatataagttccgggaggcacggctccttcaggactatactgaattggaagaagaaaatatcacattgcagaaactagtgtccacgttgaagcagaaccaggttgaatacgaaggcttaaagcatgagattaagcgatttgaggaggagacggtactgctgaacagccagctggaagatgccatccgattgaaagagattgctgagcaccaactggaagaagccctcgagactttaaaaaatgaaagagagcaaaagaacaacctgcggaaggagctctcccagtatatcagcctcaatgataaccatatcagcatctcagtagatggactcaaatttgccgaggatgggagtgaaccaaacaatgatgacaaaatgaacggtcatatccatgggcctcttgtgaaactgaatggagactatcggactcccaccttaaggaaaggagagtctctgaaccctgtctctgacttattcagtgagctgaacatttcagaaatacagaagttgaagcagcagcttatgcaggtagagcgggaaaaggccattcttttggccaacctacaggagtcacagacacagctggaacacaccaagggggcactgacggagcagcatgagcgggtgcaccggctcacagagcacgtcaatgccatgaggggcctgcaaagcagcaaggagctcaaggctgagctggacggggagaagggccgggactcaggggaggaggcccatgactatgaggtggacatcaatggtttagagatccttgaatgcaaatacagggtggcagtaactgaggtgattgatctgaaagctgaaattaaggccttaaaggagaaatataataaatctgtagaaaactacactgatgagaaggccaagtatgagagtaaaatccagatgtatgatgagcaggtgacaagccttgagaagaccaccaaggagagtggtgagaagatggcccacatggagaaggagttgcaaaagatgaccagcatagccaacgaaaatcacagtacccttaatacggcccaggatgagttagtgacattcagtgaggagttagctcagctttaccaccatgtgtgtctatgtaataatgaaactcccaacagggtcatgctggattactataggcagagcagagtcacccgcagtggcagcctgaaagggcccgatgatcccagaggacttttgtccccacgattagccaggcggggtgtgtcatccccggtagaaacaaggacctcatctgaaccagttgcaaaagaaagcacagaggccagcaaagaaccaagtccaactaagacccccacaatctctcctgttattactgccccaccgtcatctccagtattggatacaagtgacatccgcaaagagccaatgaatatctacaaccttaatgccataatccgggaccaaatcaagcatctgcagaaagctgtggaccggtccttgcaactgtctcgtcaaagagcagcggctcgggagctagcccccatgattgataaagacaaggaagccttaatggaagagatcctcaagctaaagtccctgctgagcaccaaacgggagcagatcgccacattgagggcggtgttgaaagccaacaagcagacagctgaggtggcgctagctaatctcaagaacaaatatgaaaatgaaaaagcaatggtgactgaaaccatgacgaagcttagaaatgaactgaaggctttgaaagaagatgctgcaaccttctcatccctgagagcaatgtttgcaacaagatgtgatgaatatgtcacccagttggatgagatgcagagacagttagcagctgcagaggatgagaagaagactctgaacactttgttacgaatggctatccagcaaaaactcgccctgacccagaggctggaggacttagagtttgaccatgagcagtcccgacgcagcaaaggcaaacttggaaagagcaagatcggcagccctaaaagccgtcccaggacttcaggggcttcctacctacagaatttattaagagttccccctgatcccacctccacagaatcatttcttctgaagggccccccttccatgagtgaattcatccaagggcaccggctcagcaaggaaaaaaggttaaccgtggctccaccagattgtcagcagcctgctgcctccgtaccgccacagtgctcacaactagccgggaggcaagactgcccaactgtcagtcctgacacagctctccctgaggagcagccacattccagctcccagtgcgcccctctccactgtctctccaagcctcctcacccctagtcttcatctcctgtggacgaacatctggggtggaagttttgtagccacacacaggatactgcccaagatccagcgggtgttttcttctcggttgttagatgtacaattggattaatgtccatcgttttggaagacgagagaaagttgagaagaacacgaagcacagaccctgatgtgataaaacattttgtggtttctctgagtcacagataaacttctgccatcaaatggctacagttcatttaaatttaaaaaaaagaaaaaagaaacagaaaacgtgtctcagatggctggctttacctcgatagcataagagagacctaagacatgtaaaatacgtatattgcagtatcatctttcctcacactccaaattcagctagggaagttgattccaatatgtttgtcattgatatttattttgtactttatttgctacatgatttatgtctatacaaataatttctctgaggtgaatttaattcatttattttcaaataagcataatttgctcaattaagtatgagtttgaatttagtttgaaatctggaattggccagactgtggtcatttttcttgcacaaaatgataaatgaggtgcatcagaatgttaacaataactgtattttgctgctacgctggtattgtttaggcacttactttctaatcagtagctcattaactgctgggttttgtttttgtatttttaactagagttcttcactggacattactaagtaaatctaagaaagagactaagttatgatttattgacttattcaagttttgatggcatctttacttttattttttcattgcagttgagtagatgtactggtgctgctcctttgtatgtgtgtatgtgtgtgataacgttaaagaaggctcaataacttgaagggaaaaaaatggtgtgtttatttaatgaccagaattttttttacttctcccaaaatcagggtcctactgagtctttcctgataaaaggtatcaagtacaaatgggaaaatatatacatatatagatgtaagatagcctttaattaattaatttacccagagagtgttcaaagtttgattaaaattgtatgttttgttgttgttagtttttttcataacgaatcttccttgc

SEQ ID NO: 340914 - DNA, 5075 bp, Homo sapiens
aagcaagtaacaatgtttttcaagttttctttaatgcattacatctttttttcacaagatattttaaaattttatttttccttattaagcgaattgaattatttcaagcatcagtgagagctgctagactgttatatttcgggggtcttgcagggtagcttttcttacacatataagcagaagaaaacattttcccaagtcttaaaagagggttatgatgcatttcattgtgtactctttttcttcccatatactctgcaggcatttgggcagtccttctccatccaccggaaggttgctgaagatggagagactcgggaggaaacgcttctgcaggagtcagcatcgaaggaggcttactatctggggaagatcttggagatgcagaacgagctgaaacagagccgggctgtggtcactaatgtacaggcagaaaacgagaggctcaccgcagtcgtgcaggatctgaaggagaacaatgagatggtggagctacagagaatacggatgaaggatgaaatccgagaatataagttccgggaggcacggctccttcaggactatactgaattggaagaagaaaatatcacattgcagaaactagtgtccacgttgaagcagaaccaggttgaatacgaaggcttaaagcatgagattaagcgatttgaggaggagacggtactgctgaacagccagctggaagatgccatccgattgaaagagattgctgagcaccaactggaagaagccctcgagactttaaaaaatgaaagagagcaaaagaacaacctgcggaaggagctctcccagtatatcagcctcaatgataaccatatcagcatctcagtagatggactcaaatttgccgaggatgggagtgaaccaaacaatgatgacaaaatgaacggtcatatccatgggcctcttgtgaaactgaatggagactatcggactcccaccttaaggaaaggagagtctctgaaccctgtctctgacttattcagtgagctgaacatttcagaaatacagaagttgaagcagcagcttatgcaggtagagcgggaaaaggccattcttttggccaacctacaggagtcacagacacagctggaacacaccaagggggcactgacggagcagcatgagcgggtgcaccggctcacagagcacgtcaatgccatgaggggcctgcaaagcagcaaggagctcaaggctgagctggacggggagaagggccgggactcaggggaggaggcccatgactatgaggtggacatcaatggtttagagatccttgaatgcaaatacagggtggcagtaactgaggtgattgatctgaaagctgaaattaaggccttaaaggagaaatataataaatctgtagaaaactacactgatgagaaggccaagtatgagagtaaaatccagatgtatgatgagcaggtgacaagccttgagaagaccaccaaggagagtggtgagaagatggcccacatggagaaggagttgcaaaagatgaccagcatagccaacgaaaatcacagtacccttaatacggcccaggatgagttagtgacattcagtgaggagttagctcagctttaccaccatgtgtgtctatgtaataatgaaactcccaacagggtcatgctggattactataggcagagcagagtcacccgcagtggcagcctgaaagggcccgatgatcccagaggacttttgtccccacgattagccaggcggggtgtgtcatccccggtagaaacaaggacctcatctgaaccagttgcaaaagaaagcacagaggccagcaaagaaccaagtccaactaagacccccacaatctctcctgttattactgccccaccgtcatctccagtattggatacaagtgacatccgcaaagagccaatgaatatctacaaccttaatgccataatccgggaccaaatcaagcatctgcagaaagctgtggaccggtccttgcaactgtctcgtcaaagagcagcggctcgggagctagcccccatgattgataaagacaaggaagccttaatggaagagatcctcaagctaaagtccctgctgagcaccaaacgggagcagatcgccacattgagggcggtgttgaaagccaacaagcagacagctgaggtggcgctagctaatctcaagaacaaatatgaaaatgaaaaagcaatggtgactgaaaccatgacgaagcttagaaatgaactgaaggctttgaaagaagatgctgcaaccttctcatccctgagagcaatgtttgcaacaagatgtgatgaatatgtcacccagttggatgagatgcagagacagttagcagctgcagaggatgagaagaagactctgaacactttgttacgaatggctatccagcaaaaactcgccctgacccagaggctggaggacttagagtttgaccatgagcagtcccgacgcagcaaaggcaaacttggaaagagcaagatcggcagccctaaagtaagtggggaggcatcagtcaccgtgcccaccatagacacttacctcctgcatagtcagggcccacagacacccaacattcgggtcagcagtggcactcagaggaaaaggtatgcatgcagcgatcttcatagtacggtgcagtggccagattttagttaactgcaaaaataaatgtgctcttgttgtggaggatggaggaggggaagcaaaagaaaaaatgggagctggcatataaatggtcttgctaatgtgggtctttccagatcaaaacctttttgataattgtgtttatgtagtcctttctaaccccctgcccaatccctcctcttgattaatcgtaatataattttcaagtgtctgttaatatttttgctactctttgtatgtgtaaatatgcctctcccttacctccaacctgagaattggtagataaaggtggatattaagaatgaagctgtgttctacctgggttataattttaaaagtcattgtacctttggaaatggtgctgtttatcagcttctctttaacggggcaaggatatgaatatgttctcttagggaaacttttgtccatatgaccaaaactgatgacagactgaaaggggatgtctatatctagataaaatgggatggaatacgcacagtccttttcttgaaagcaggtttttgtgctttttcatttggcatgggaatattgcccagagaaaccacttgtaaggtttttaggggcttgattttgtgagtcctggctgttgagttacttaccctgtattttcggttaatggtaacatttttattttaggagctttcattaaagactcaaataatatattttctatttgcggttcaagctgactaactgtaataaatcttttttccagtatccagaacagtttccaaatagggttgtatcctgatgtggaaactaaaaaaaaaaaaagcaaaaagattgatttacatatttaaaaaattaaatgccagtataaataatgttgtcactggtgaggcgttaaaaggtaattaaagtaaaacttttttgtttcctatatgtatttttcttggatctcctgcaagacaattttcaccttccctttgtgatcagagccgtcccaggacttcaggggcttcctacctacagaatttattaagagttccccctgatcccacctccacagaatcatttcttctgaagggccccccttccatgagtgaattcatccaagggcaccggctcagcaaggaaaaaaggttaaccgtggctccaccagattgtcagcagcctgctgcctccgtaccgccacagtgctcacaactagccgggaggcaagactgcccaactgtcagtcctgacacagctctccctgaggagcagccacattccagctcccagtgcgcccctctccactgtctctccaagcctcctcacccctagtcttcatctcctgtggacgaacatctggggtggaagttttgtagccacacacaggatactgcccaagatccagcgggtgttttcttctcggttgttagatgtacaattggattaatgtccatcgttttggaagacgagagaaagttgagaagaacacgaagcacagaccctgatgtgataaaacattttgtggtttctctgagtcacagataaacttctgccatcaaatggctacagttcatttaaatttaaaaaaaagaaaaaagaaacagaaaacgtgtctcagatggctggctttacctcgatagcataagagagacctaagacatgtaaaatacgtatattgcagtatcatctttcctcacactccaaattcagctagggaagttgattccaatatgtttgtcattgatatttattttgtactttatttgctacatgatttatgtctatacaaataatttctctgaggtgaatttaattcatttattttcaaataagcataatttgctcaattaagtatgagtttgaatttagtttgaaatctggaattggccagactgtggtcatttttcttgcacaaaatgataaatgaggtgcatcagaatgttaacaataactgtattttgctgctacgctggtattgtttaggcacttactttctaatcagtagctcattaactgctgggttttgtttttgtatttttaactagagttcttcactggacattactaagtaaatctaagaaagagactaagttatgatttattgacttattcaagttttgatggcatctttacttttattttttcattgcagttgagtagatgtactggtgctgctcctttgtatgtgtgtatgtgtgtgataacgttaaagaaggctcaataacttgaagggaaaaaaatggtgtgtttatttaatgaccagaattttttttacttctcccaaaatcagggtcctactgagtctttcctgataaaaggtatcaagtacaaatgggaaaatatatacatatatagatgtaagatagcctttaattaattaatttacccagagagtgttcaaagtttgattaaaattgtatgttttgttgttgttagtttttttcataacgaatcttccttgc

SEQ ID NO: 340915 - DNA, 3349 bp, Homo sapiens
  misc_feature (3)..(3): n is a, c, g, or t
  misc_feature (5)..(7): n is a, c, g, or t
ggnannnggccccgagactgcatcattccgcaccggctgctgcagggccagagggagcaggtggagcgagagagcgagagagcgagccgcgagccggagcgcgccagacccagggcgagactgcagtgacgcggcccgggagacatggcggacgggcgtctctgaataagcagaatccggagcccctcgctacccgcggccgccgcagcccgggccatgccgcacggctgctgaccgcacgcaggggccggccccgaggacacatgcggcggcctttgccgcctcgcccctgaccctctgccctgttctccatgttgcatttctcgtcagtttctcgggcggtgtagctgccgctgccaccagagccggcggggcatcgcgctgctcattcatccggccgcactttcttttccgtttccacccatcccttcccatttccttctccctttccccgccagcttcgcatccatctcccccaccccgtaaccccctcctgcctccatccaccggggctatggccgcagaagaggtattgcagacggtggaccattataagactgagatagagaggctaaccaaggagctcacggagaccacccacgagaagatccaggctgccgagtacgggctggtggtgctggaggagaagctgaccctcaaacagcagtatgatgaactggaggctgagtacgacagcctcaaacaggagctggagcagctcaaagaggtggcatttgggcagtccttctccatccaccggaaggttgctgaagatggagagactcgggaggaaacgcttctgcaggagtcagcatcgaaggaggcttactatctggggaagatcttggagatgcagaacgagctgaaacagagccgggctgtggtcactaatgtacaggcagaaaacgagaggctcaccgcagtcgtgcaggatctgaaggagaacaatgagatggtggagctacagagaatacggatgaaggatgaaatccgagaatataagttccgggaggcacggctccttcaggactatactgaattggaagaagaaaatatcacattgcagaaactagtgtccacgttgaagcagaaccaggttgaatacgaaggcttaaagcatgagattaagcgatttgaggaggagacggtactgctgaacagccagctggaagatgccatccgattgaaagagattgctgagcaccaactggaagaagccctcgagactttaaaaaatgaaagagagcaaaagaacaacctgcggaaggagctctcccagtatatcagcctcaatgataaccatatcagcatctcagtagatggactcaaatttgccgaggatgggagtgaaccaaacaatgatgacaaaatgaacggtcatatccatgggcctcttgtgaaactgaatggagactatcggactcccaccttaaggaaaggagagtctctgaaccctgtctctgacttattcagtgagctgaacatttcagaaatacagaagttgaagcagcagcttatgcaggtagagcgggaaaaggccattcttttggccaacctacaggagtcacagacacagctggaacacaccaagggggcactgacggagcagcatgagcgggtgcaccggctcacagagcacgtcaatgccatgaggggcctgcaaagcagcaaggagctcaaggctgagctggacggggagaagggccgggactcaggggaggaggcccatgactatgaggtggacatcaatggtttagagatccttgaatgcaaatacagggtggcagtaactgaggtgattgatctgaaagctgaaattaaggccttaaaggagaaatataataaatctgtagaaaactacactgatgagaaggccaagtatgagagtaaaatccagatgtatgatgagcaggtgacaagccttgagaagaccaccaaggagagtggtgagaagatggcccacatggagaaggagttgcaaaagatgaccagcatagccaacgaaaatcacagtacccttaatacggcccaggatgagttagtgacattcagtgaggagttagctcagctttaccaccatgtgtgtctatgtaataatgaaactcccaacagggtcatgctggattactataggcagagcagagtcacccgcagtggcagcctgaaagggcccgatgatcccagaggacttttgtccccacgattagccaggcggggtgtgtcatccccggtagaaacaaggacctcatctgaaccagttgcaaaagaaagcacagaggccagcaaagaaccaagtccaactaagacccccacaatctctcctgttattactgccccaccgtcatctccagtattggatacaagtgacatccgcaaagagccaatgaatatctacaaccttaatgccataatccgggaccaaatcaagcatctgcagaaagctgtggaccggtccttgcaactgtctcgtcaaagagcagcggctcgggagctagcccccatgattgataaagacaaggaagccttaatggaagagatcctcaagctaaagtccctgctgagcaccaaacgggagcagatcgccacattgagggcggtgttgaaagccaacaagcaggcacagtgccttctgatgaagtcagtaaatgcttatgaagcaccgtccatctagcactgtgctagatgctgaagattcaaagaagactaacacatggtccctgccttccagaagactcagcctcctggggatgtcaggatagaaacacaattacagttcaacgttacacatgctgtaatccaagttatgagaacaatgcagaggaagcaactaaggtttcctagaggagcggaaaagacttcacagaagcaattataccttagtttgttattaaaggataagaagttgttttccagaggaggaggaagtaattccagacagaacagtaggtagagaggctttggagtgacaaaatagaataatatattcagggaatgctcacaaaggcctatgtggctggaaataagactttttttatttagaaagtcaactttggaatgtgtggagaaagtggtgaaagcagaaatcagcaaatccagtgagttatggatacttaaaattacttaattctggaaaaactttgcacagtcaatggacaaacaaatctacaaacaaaactgaggcttggggtatttgtcacaaacaataaatgattttgtatttctgtttcaaaaaaaaaatgataaagaaaaggggggggggcccttttggggagagggggtactcccgacgacaacaacaccgttatgtggaaatagggccgcaggagcaattacgtggcacgcagccgga

SEQ ID NO: 340916 - DNA, 517 bp, Homo sapiens
tctgtagtctctatgaatcttctcatttacttaaggattttttcataggcacagtgccttctgatgaagtcagtaaatgcttatgaagcaccgtccatctagcactgtgctagatgctgaagattcaaagaagactaacacatggtccctgccttccagaagactcagcctcctggggatgtcaggatagaaacacaattacagttcaacgttacacatgctgtaatccaagttatgagaacaatcagaaatcagcaaatccagtgagttatggatacttaaaattacttaattctggaaaaactttgcacagtcaatggacaaacaaatctacaaacaaaactgaggcttggggtatttgtcacaaacaataaatgattttgtatttctgtttcaaaaaaaaaatgataaagaaaaggggggggggcccttttggggagagggggtactcccgacgacaacaacaccgttatgtggaaatagggccgcaggagcaattacgtggcacgcagccgga

SEQ ID NO: 340917 - DNA, 1989 bp, Homo sapiens
  misc_feature (3)..(3): n is a, c, g, or t
  misc_feature (5)..(7): n is a, c, g, or t
ggnannnggccccgagactgcatcattccgcaccggctgctgcagggccagagggagcaggtggagcgagagagcgagagagcgagccgcgagccggagcgcgccagacccagggcgagactgcagtgacgcggcccgggagacatggcggacgggcgtctctgaataagcagaatccggagcccctcgctacccgcggccgccgcagcccgggccatgccgcacggctgctgaccgcacgcaggggccggccccgaggacacatgcggcggcctttgccgcctcgcccctgaccctctgccctgttctccatgttgcatttctcgtcagtttctcgggcggtgtagctgccgctgccaccagagccggcggggcatcgcgctgctcattcatccggccgcactttcttttccgtttccacccatcccttcccatttccttctccctttccccgccagcttcgcatccatctcccccaccccgtaaccccctcctgcctccatccaccggggctatggccgcagaagaggtattgcagacggtggaccattataagactgagatagagaggctaaccaaggagctcacggagaccacccacgagaagatccaggctgccgagtacgggctggtggtgctggaggagaagctgaccctcaaacagcagtatgatgaactggaggctgagtacgacagcctcaaacaggagctggagcagctcaaagaggtgagttgcctgtcacctctccctttcctggccctcactccccccacccgcaaggcccactcatcatgatcaagaagtcataaaggaggtgattgaaaggactgttttttcttctagggccctttgttggtaagagaagattgaaagagtccattgtttcctcccccaagagaaaaattgcctaagaaatgaatatataagctggaatttgggaggcaatggctgtttggcctgcgggggagggagattagtaagagtcatcaagtctcagcactctaagacgacattcaagtgggttggaatgtataaatcaaacttctcaaaaccgctgttatctcaaacccaggtttcagcgacaatttcgtagtccacaaaagtgatgaggtttgtgcctgaggacccacaatttcaggatttagactgtgtggcacctcagctttcctctggatgtaaccactccttggtgagagagggaactcctcaccaatcccatttgacaaaggctaggcaatcttcattctgcttggctttagtcattcttgtcattgggctgcagaagaaaaacaactttgctgggtgatcccactgccttgatttcacctcggagcgaggctgggccatgtccaagtcttatgaggtcaccctgactagaaaaaattgaactcacctacaaatagtctgaaagagtggtgtatatcaaatacgtgggtagtgttgcatttcaaatgaggctcttctggttgaaatgatatatttataagaccagaatatcacaaatgggtgatgtataatgtctctttagttttttggtatttggcctcttttaaagcctgtcggatgtatgggagaaaacaatgaacgtgctttgatttcctatcagtcactcttaagaacatacatattgtttaagtaactcggtcttttttatctgattcttgaggcactatgggtagcaagtaaccacttacaaatttaaatgtaatatacactccttttctgtgtgtcaagtccttatttttaggtgcatattgacatttaaatgttaattattgtttggcatataatatcaaaaatctattatttattttatgctgttacagttaaaagatgtgatttatgacatactgaatcaacttgccttccaatttagtgtgtaatatggtaagcatttatacttttagatatgtcttatttttatttggatgcctgtctaccaaaaaataaatgtactacctatgattaaaaatcccaactaggaatct

SEQ ID NO: 340918 - DNA, 5544 bp, Homo sapiens
  misc_feature (3)..(3): n is a, c, g, or t
  misc_feature (5)..(7): n is a, c, g, or t
ggnannnggccccgagactgcatcattccgcaccggctgctgcagggccagagggagcaggtggagcgagagagcgagagagcgagccgcgagccggagcgcgccagacccagggcgagactgcagtgacgcggcccgggagacatggcggacgggcgtctctgaataagcagaatccggagcccctcgctacccgcggccgccgcagcccgggccatgccgcacggctgctgaccgcacgcaggggccggccccgaggacacatgcggcggcctttgccgcctcgcccctgaccctctgccctgttctccatgttgcatttctcgtcagtttctcgggcggtgtagctgccgctgccaccagagccggcggggcatcgcgctgctcattcatccggccgcactttcttttccgtttccacccatcccttcccatttccttctccctttccccgccagcttcgcatccatctcccccaccccgtaaccccctcctgcctccatccaccggggctatggccgcagaagaggtattgcagacggtggaccattataagactgagatagagaggctaaccaaggagctcacggagaccacccacgagaagatccaggctgccgagtacgggctggtggtgctggaggagaagctgaccctcaaacagcagtatgatgaactggaggctgagtacgacagcctcaaacaggagctggagcagctcaaagaggtggcatttgggcagtccttctccatccaccggaaggttgctgaagatggagagactcgggaggaaacgcttctgcaggagtcagcatcgaaggaggcttactatctggggaagatcttggagatgcagaacgagctgaaacagagccgggctgtggtcactaatgtacaggcagaaaacgagaggctcaccgcagtcgtgcaggatctgaaggagaacaatgagatggtggagctacagagaatacggatgaaggatgaaatccgagaatataagttccgggaggcacggctccttcaggactatactgaattggaagaagaaaatatcacattgcagaaactagtgtccacgttgaagcagaaccaggttgaatacgaaggcttaaagcatgagattaagcgatttgaggaggagacggtactgctgaacagccagctggaagatgccatccgattgaaagagattgctgagcaccaactggaagaagccctcgagactttaaaaaatgaaagagagcaaaagaacaacctgcggaaggagctctcccagtatatcagcctcaatgataaccatatcagcatctcagtagatggactcaaatttgccgaggatgggagtgaaccaaacaatgatgacaaaatgaacggtcatatccatgggcctcttgtgaaactgaatggagactatcggactcccaccttaaggaaaggagagtctctgaaccctgtctctgacttattcagtgagctgaacatttcagaaatacagaagttgaagcagcagcttatgcaggtagagcgggaaaaggccattcttttggccaacctacaggagtcacagacacagctggaacacaccaagggggcactgacggagcagcatgagcgggtgcaccggctcacagagcacgtcaatgccatgaggggcctgcaaagcagcaaggagctcaaggctgagctggacggggagaagggccgggactcaggggaggaggcccatgactatgaggtggacatcaatggtttagagatccttgaatgcaaatacagggtggcagtaactgaggtgattgatctgaaagctgaaattaaggccttaaaggagaaatataataaatctgtagaaaactacactgatgagaaggccaagtatgagagtaaaatccagatgtatgatgagcaggtgacaagccttgagaagaccaccaaggagagtggtgagaagatggcccacatggagaaggagttgcaaaagatgaccagcatagccaacgaaaatcacagtacccttaatacggcccaggatgagttagtgacattcagtgaggagttagctcagctttaccaccatgtgtgtctatgtaataatgaaactcccaacagggtcatgctggattactataggcagagcagagtcacccgcagtggcagcctgaaagggcccgatgatcccagaggacttttgtccccacgattagccaggcggggtgtgtcatccccggtagaaacaaggacctcatctgaaccagttgcaaaagaaagcacagaggccagcaaagaaccaagtccaactaagacccccacaatctctcctgttattactgccccaccgtcatctccagtattggatacaagtgacatccgcaaagagccaatgaatatctacaaccttaatgccataatccgggaccaaatcaagcatctgcagaaagctgtggaccggtccttgcaactgtctcgtcaaagagcagcggctcgggagctagcccccatgattgataaagacaaggaagccttaatggaagagatcctcaagctaaagtccctgctgagcaccaaacgggagcagatcgccacattgagggcggtgttgaaagccaacaagcagacagctgaggtggcgctagctaatctcaagaacaaatatgaaaatgaaaaagcaatggtgactgaaaccatgacgaagcttagaaatgaactgaaggctttgaaagaagatgctgcaaccttctcatccctgagagcaatgtttgcaacaagatgtgatgaatatgtcacccagttggatgagatgcagagacagttagcagctgcagaggatgagaagaagactctgaacactttgttacgaatggctatccagcaaaaactcgccctgacccagaggctggaggacttagagtttgaccatgagcagtcccgacgcagcaaaggcaaacttggaaagagcaagatcggcagccctaaagtaagtggggaggcatcagtcaccgtgcccaccatagacacttacctcctgcatagtcagggcccacagacacccaacattcgggtcagcagtggcactcagaggaaaaggtatgcatgcagcgatcttcatagtacggtgcagtggccagattttagttaactgcaaaaataaatgtgctcttgttgtggaggatggaggaggggaagcaaaagaaaaaatgggagctggcatataaatggtcttgctaatgtgggtctttccagatcaaaacctttttgataattgtgtttatgtagtcctttctaaccccctgcccaatccctcctcttgattaatcgtaatataattttcaagtgtctgttaatatttttgctactctttgtatgtgtaaatatgcctctcccttacctccaacctgagaattggtagataaaggtggatattaagaatgaagctgtgttctacctgggttataattttaaaagtcattgtacctttggaaatggtgctgtttatcagcttctctttaacggggcaaggatatgaatatgttctcttagggaaacttttgtccatatgaccaaaactgatgacagactgaaaggggatgtctatatctagataaaatgggatggaatacgcacagtccttttcttgaaagcaggtttttgtgctttttcatttggcatgggaatattgcccagagaaaccacttgtaaggtttttaggggcttgattttgtgagtcctggctgttgagttacttaccctgtattttcggttaatggtaacatttttattttaggagctttcattaaagactcaaataatatattttctatttgcggttcaagctgactaactgtaataaatcttttttccagtatccagaacagtttccaaatagggttgtatcctgatgtggaaactaaaaaaaaaaaaagcaaaaagattgatttacatatttaaaaaattaaatgccagtataaataatgttgtcactggtgaggcgttaaaaggtaattaaagtaaaacttttttgtttcctatatgtatttttcttggatctcctgcaagacaattttcaccttccctttgtgatcagagccgtcccaggacttcaggggcttcctacctacagaatttattaagagttccccctgatcccacctccacagaatcatttcttctgaagggccccccttccatgagtgaattcatccaagggcaccggctcagcaaggaaaaaaggttaaccgtggctccaccagattgtcagcagcctgctgcctccgtaccgccacagtgctcacaactagccgggaggcaagactgcccaactgtcagtcctgacacagctctccctgaggagcagccacattccagctcccagtgcgcccctctccactgtctctccaagcctcctcacccctagtcttcatctcctgtggacgaacatctggggtggaagttttgtagccacacacaggatactgcccaagatccagcgggtgttttcttctcggttgttagatgtacaattggattaatgtccatcgttttggaagacgagagaaagttgagaagaacacgaagcacagaccctgatgtgataaaacattttgtggtttctctgagtcacagataaacttctgccatcaaatggctacagttcatttaaatttaaaaaaaagaaaaaagaaacagaaaacgtgtctcagatggctggctttacctcgatagcataagagagacctaagacatgtaaaatacgtatattgcagtatcatctttcctcacactccaaattcagctagggaagttgattccaatatgtttgtcattgatatttattttgtactttatttgctacatgatttatgtctatacaaataatttctctgaggtgaatttaattcatttattttcaaataagcataatttgctcaattaagtatgagtttgaatttagtttgaaatctggaattggccagactgtggtcatttttcttgcacaaaatgataaatgaggtgcatcagaatgttaacaataactgtattttgctgctacgctggtattgtttaggcacttactttctaatcagtagctcattaactgctgggttttgtttttgtatttttaactagagttcttcactggacattactaagtaaatctaagaaagagactaagttatgatttattgacttattcaagttttgatggcatctttacttttattttttcattgcagttgagtagatgtactggtgctgctcctttgtatgtgtgtatgtgtgtgataacgttaaagaaggctcaataacttgaagggaaaaaaatggtgtgtttatttaatgaccagaattttttttacttctcccaaaatcagggtcctactgagtctttcctgataaaaggtatcaagtacaaatgggaaaatatatacatatatagatgtaagatagcctttaattaattaatttacccagagagtgttcaaagtttgattaaaattgtatgttttgttgttgttagtttttttcataacgaatcttccttgc

SEQ ID NO: 340919 - DNA, 3886 bp, Homo sapiens
  misc_feature (3)..(3): n is a, c, g, or t
  misc_feature (5)..(7): n is a, c, g, or t
  misc_feature (3245)..(3245): n is a, c, g, or t
  misc_feature (3824)..(3824): n is a, c, g, or t
  misc_feature (3844)..(3844): n is a, c, g, or t
  misc_feature (3878)..(3878): n is a, c, g, or t
ggnannnggccccgagactgcatcattccgcaccggctgctgcagggccagagggagcaggtggagcgagagagcgagagagcgagccgcgagccggagcgcgccagacccagggcgagactgcagtgacgcggcccgggagacatggcggacgggcgtctctgaataagcagaatccggagcccctcgctacccgcggccgccgcagcccgggccatgccgcacggctgctgaccgcacgcaggggccggccccgaggacacatgcggcggcctttgccgcctcgcccctgaccctctgccctgttctccatgttgcatttctcgtcagtttctcgggcggtgtagctgccgctgccaccagagccggcggggcatcgcgctgctcattcatccggccgcactttcttttccgtttccacccatcccttcccatttccttctccctttccccgccagcttcgcatccatctcccccaccccgtaaccccctcctgcctccatccaccggggctatggccgcagaagaggtattgcagacggtggaccattataagactgagatagagaggctaaccaaggagctcacggagaccacccacgagaagatccaggctgccgagtacgggctggtggtgctggaggagaagctgaccctcaaacagcagtatgatgaactggaggctgagtacgacagcctcaaacaggagctggagcagctcaaagaggtggcatttgggcagtccttctccatccaccggaaggttgctgaagatggagagactcgggaggaaacgcttctgcaggagtcagcatcgaaggaggcttactatctggggaagatcttggagatgcagaacgagctgaaacagagccgggctgtggtcactaatgtacaggcagaaaacgagaggctcaccgcagtcgtgcaggatctgaaggagaacaatgagatggtggagctacagagaatacggatgaaggatgaaatccgagaatataagttccgggaggcacggctccttcaggactatactgaattggaagaagaaaatatcacattgcagaaactagtgtccacgttgaagcagaaccaggttgaatacgaaggcttaaagcatgagattaagcgatttgaggaggagacggtactgctgaacagccagctggaagatgccatccgattgaaagagattgctgagcaccaactggaagaagccctcgagactttaaaaaatgaaagagagcaaaagaacaacctgcggaaggagctctcccagtatatcagcctcaatgataaccatatcagcatctcagtagatggactcaaatttgccgaggatgggagtgaaccaaacaatgatgacaaaatgaacggtcatatccatgggcctcttgtgaaactgaatggagactatcggactcccaccttaaggaaaggagagtctctgaaccctgtctctgacttattcagtgagctgaacatttcagaaatacagaagttgaagcagcagcttatgcaggtagagcgggaaaaggccattcttttggccaacctacaggagtcacagacacagctggaacacaccaagggggcactgacggagcagcatgagcgggtgcaccggctcacagagcacgtcaatgccatgaggggcctgcaaagcagcaaggagctcaaggctgagctggacggggagaagggccgggactcaggggaggaggcccatgactatgaggtggacatcaatggtttagagatccttgaatgcaaatacagggtggcagtaactgaggtgattgatctgaaagctgaaattaaggccttaaaggagaaatataataaatctgtagaaaactacactgatgagaaggccaagtatgagagtaaaatccagatgtatgatgagcaggtgacaagccttgagaagaccaccaaggagagtggtgagaagatggcccacatggagaaggagttgcaaaagatgaccagcatagccaacgaaaatcacagtacccttaatacggcccaggatgagttagtgacattcagtgaggagttagctcagctttaccaccatgtgtgtctatgtaataatgaaactcccaacagggtcatgctggattactataggcagagcagagtcacccgcagtggcagcctgaaagggcccgatgatcccagaggacttttgtccccacgattagccaggcggggtgtgtcatccccggtagaaacaaggacctcatctgaaccagttgcaaaagaaagcacagaggccagcaaagaaccaagtccaactaagacccccacaatctctcctgttattactgccccaccgtcatctccagtattggatacaagtgacatccgcaaagagccaatgaatatctacaaccttaatgccataatccgggaccaaatcaagcatctgcagaaagctgtggaccggtccttgcaactgtctcgtcaaagagcagcggctcgggagctagcccccatgattgataaagacaaggaagccttaatggaagagatcctcaagctaaagtccctgctgagcaccaaacgggagcagatcgccacattgagggcggtgttgaaagccaacaagcaggcacagtgccttctgatgaagtcagtaaatgcttatgaagcaccgtccatctagcactgtgctagatgctgaagattcaaagaagactaacacatggtccctgccttccagaagactcagcctcctggggatgtcaggatagaaacacaattacagttcaacgttacacatgctgtaatccaagttatgagaacaatgcagaggaagcaactaaggtttcctagaggagcggaaaagacttcacagaagcaattataccttagtttgttattaaaggataagaagttgttttccagaggaggaggaagtaattccagacagaacagtaggtagagaggctttggagtgacaaaatagaataatatattcagggaatgctcacaaaggcctatgtggctggaaataagactttttttatttagaaagtcaactttggaatgtgtggagaaagtggtgaaagcagaaatcagcaaatccagtgagttatggatacttaaaattacttaattctggaaaaactttgcacagtcaatggacaaacaaatctacaaacaaaactgaggcaggagaatcactagaaccccggggggcggaggttgcggtgagcctagattgcatagttgcactncagcctgggccaccagagcgaaaatctgtctttaaaaaaaaaatcaagatgcttaactgaaacagaggtatagataaggacacttggccaacccacagagactaactttgtgaacaagctgaaattaaggccttaaaggagaaatataataaatctgtagaaaactacactgatgagaaggccaagtatgagagtaaaatccagatgtatgatgagcaggtgacaagccttgagaagaccaccaggagagtggtgagaagatggcccacatggagaaggagttgcaaaagatgaccagcatagccaacgaaaatcacagtacccttaatacggcccaggatgagttagtgacattcagtgaggagttagctcagctttaccaccatgtgtgtctatgtaataatgaaactcccaacagggtcatgctggattactataggcagagcagagtcacccgcagtggcagcctgaaagggcccgatgatcccagaggacttttgtccccacgattagccaggcggggtgtgtcatccccggtaagaaacaaggaccttcatctgaacccagtttgcaaaaagnaagcacaggaggccagccanaggaaccttagttcccaacttaagggccccccanaaatctaa

SEQ ID NO: 340920 - DNA, 2888 bp, Homo sapiens
  misc_feature (3)..(3): n is a, c, g, or t
  misc_feature (5)..(7): n is a, c, g, or t
ggnannnggccccgagactgcatcattccgcaccggctgctgcagggccagagggagcaggtggagcgagagagcgagagagcgagccgcgagccggagcgcgccagacccagggcgagactgcagtgacgcggcccgggagacatggcggacgggcgtctctgaataagcagaatccggagcccctcgctacccgcggccgccgcagcccgggccatgccgcacggctgctgaccgcacgcaggggccggccccgaggacacatgcggcggcctttgccgcctcgcccctgaccctctgccctgttctccatgttgcatttctcgtcagtttctcgggcggtgtagctgccgctgccaccagagccggcggggcatcgcgctgctcattcatccggccgcactttcttttccgtttccacccatcccttcccatttccttctccctttccccgccagcttcgcatccatctcccccaccccgtaaccccctcctgcctccatccaccggggctatggccgcagaagaggtattgcagacggtggaccattataagactgagatagagaggctaaccaaggagctcacggagaccacccacgagaagatccaggctgccgagtacgggctggtggtgctggaggagaagctgaccctcaaacagcagtatgatgaactggaggctgagtacgacagcctcaaacaggagctggagcagctcaaagaggtggcatttgggcagtccttctccatccaccggaaggttgctgaagatggagagactcgggaggaaacgcttctgcaggagtcagcatcgaaggaggcttactatctggggaagatcttggagatgcagaacgagctgaaacagagccgggctgtggtcactaatgtacaggcagaaaacgagaggctcaccgcagtcgtgcaggatctgaaggagaacaatgagatggtggagctacagagaatacggatgaaggatgaaatccgagaatataagttccgggaggcacggctccttcaggactatactgaattggaagaagaaaatatcacattgcagaaactagtgtccacgttgaagcagaaccaggttgaatacgaaggcttaaagcatgagattaagcgatttgaggaggagacggtactgctgaacagccagctggaagatgccatccgattgaaagagattgctgagcaccaactggaagaagccctcgagactttaaaaaatgaaagagagcaaaagaacaacctgcggaaggagctctcccagtatatcagcctcaatgataaccatatcagcatctcagtagatggactcaaatttgccgaggatgggagtgaaccaaacaatgatgacaaaatgaacggtcatatccatgggcctcttgtgaaactgaatggagactatcggactcccaccttaaggaaaggagagtctctgaaccctgtctctgacttattcagtgagctgaacatttcagaaatacagaagttgaagcagcagcttatgcaggtagagcgggaaaaggccattcttttggccaacctacaggagtcacagacacagctggaacacaccaagggggcactgacggagcagcatgagcgggtgcaccggctcacagagcacgtcaatgccatgaggggcctgcaaagcagcaaggagctcaaggctgagctggacggggagaagggccgggactcaggggaggaggcccatgactatgaggtggacatcaatggtttagagatccttgaatgcaaatacagggtggcagtaactgaggtgattgatctgaaagctgaaattaaggccttaaaggagaaatataataaatctgtagaaaactacactgatgagaaggccaagtatgagagtaaaatccagatgtatgatgagcaggtgacaagccttgagaagaccaccaaggagagtggtgagaagatggcccacatggagaaggagttgcaaaagatgaccagcatagccaacgaaaatcacagtacccttaatacggcccaggatgagttagtgacattcagtgaggagttagctcagctttaccaccatgtgtgtctatgtaataatgaaactcccaacagggtcatgctggattactataggcagagcagagtcacccgcagtggcagcctgaaagggcccgatgatcccagaggacttttgtccccacgattagccaggcggggtgtgtcatccccggtagaaacaaggacctcatctgaaccagttgcaaaagaaagcacagaggccagcaaagaaccaagtccaactaagacccccacaatctctcctgttattactgccccaccgtcatctccagtattggatacaagtgacatccgcaaagagccaatgaatatctacaaccttaatgccataatccgggaccaaatcaagcatctgcagaaagctgtggaccggtccttgcaactgtctcgtcaaagagcagcggctcgggagctagcccccatgattgataaagacaaggaagccttaatggaagagatcctcaagctaaagtccctgctgagcaccaaacgggagcagatcgccacattgagggcggtgttgaaagccaacaagcaggtaatctcattctactggtgaaagcatgccagtcaaagctttcttaactaatttattccctaattttattgagtatcgagtatcgtcaagatgagagttcagattcttggtaagtggataaataaaactgtcccagtgccagatcagaatgtcataataattattgtttttaaatgatgaaatacctgtgcccagttaggtggaggcagaggtgaggaacttaaagcaggaacacaggagaagatctagatgcctttctgcagatgtagaa

SEQ ID NO: 340921 - DNA, 1875 bp, Homo sapiens
  misc_feature (3)..(3): n is a, c, g, or t
  misc_feature (5)..(7): n is a, c, g, or t
ggnannnggccccgagactgcatcattccgcaccggctgctgcagggccagagggagcaggtggagcgagagagcgagagagcgagccgcgagccggagcgcgccagacccagggcgagactgcagtgacgcggcccgggagacatggcggacgggcgtctctgaataagcagaatccggagcccctcgctacccgcggccgccgcagcccgggccatgccgcacggctgctgaccgcacgcaggggccggccccgaggacacatgcggcggcctttgccgcctcgcccctgaccctctgccctgttctccatgttgcatttctcgtcagtttctcgggcggtgtagctgccgctgccaccagagccggcggggcatcgcgctgctcattcatccggccgcactttcttttccgtttccacccatcccttcccatttccttctccctttccccgccagcttcgcatccatctcccccaccccgtaaccccctcctgcctccatccaccggggctatggccgcagaagaggtattgcagacggtggaccattataagactgagatagagaggctaaccaaggagctcacggagaccacccacgagaagatccaggctgccgagtacgggctggtggtgctggaggagaagctgaccctcaaacagcagtatgatgaactggaggctgagtacgacagcctcaaacaggagctggagcagctcaaagaggtgggccctttgttggtaagagaagattgaaagagtccattgtttcctcccccaagagaaaaattgcctaagaaatgaatatataagctggaatttgggaggcaatggctgtttggcctgcgggggagggagattagtaagagtcatcaagtctcagcactctaagacgacattcaagtgggttggaatgtataaatcaaacttctcaaaaccgctgttatctcaaacccaggtttcagcgacaatttcgtagtccacaaaagtgatgaggtttgtgcctgaggacccacaatttcaggatttagactgtgtggcacctcagctttcctctggatgtaaccactccttggtgagagagggaactcctcaccaatcccatttgacaaaggctaggcaatcttcattctgcttggctttagtcattcttgtcattgggctgcagaagaaaaacaactttgctgggtgatcccactgccttgatttcacctcggagcgaggctgggccatgtccaagtcttatgaggtcaccctgactagaaaaaattgaactcacctacaaatagtctgaaagagtggtgtatatcaaatacgtgggtagtgttgcatttcaaatgaggctcttctggttgaaatgatatatttataagaccagaatatcacaaatgggtgatgtataatgtctctttagttttttggtatttggcctcttttaaagcctgtcggatgtatgggagaaaacaatgaacgtgctttgatttcctatcagtcactcttaagaacatacatattgtttaagtaactcggtcttttttatctgattcttgaggcactatgggtagcaagtaaccacttacaaatttaaatgtaatatacactccttttctgtgtgtcaagtccttatttttaggtgcatattgacatttaaatgttaattattgtttggcatataatatcaaaaatctattatttattttatgctgttacagttaaaagatgtgatttatgacatactgaatcaacttgccttccaatttagtgtgtaatatggtaagcatttatacttttagatatgtcttatttttatttggatgcctgtctaccaaaaaataaatgtactacctatgattaaaaatcccaactaggaatct

SEQ ID NO: 340922 - DNA, 4245 bp, Homo sapiens
  misc_feature (522)..(522): n is a, c, g, or t
  misc_feature (591)..(591): n is a, c, g, or t
  misc_feature (2082)..(2082): n is a, c, g, or t
  misc_feature (2482)..(2482): n is a, c, g, or t
  misc_feature (2487)..(2487): n is a, c, g, or t
  misc_feature (2489)..(2489): n is a, c, g, or t
  misc_feature (2491)..(2491): n is a, c, g, or t
  misc_feature (2495)..(2495): n is a, c, g, or t
  misc_feature (2535)..(2535): n is a, c, g, or t
  misc_feature (2541)..(2541): n is a, c, g, or t
  misc_feature (2550)..(2550): n is a, c, g, or t
  misc_feature (2560)..(2561): n is a, c, g, or t
  misc_feature (2577)..(2577): n is a, c, g, or t
  misc_feature (2667)..(2667): n is a, c, g, or t
  misc_feature (2705)..(2705): n is a, c, g, or t
  misc_feature (2712)..(2712): n is a, c, g, or t
  misc_feature (2789)..(2789): n is a, c, g, or t
  misc_feature (2798)..(2798): n is a, c, g, or t
  misc_feature (2811)..(2811): n is a, c, g, or t
  misc_feature (2814)..(2815): n is a, c, g, or t
  misc_feature (2829)..(2829): n is a, c, g, or t
  misc_feature (2833)..(2833): n is a, c, g, or t
  misc_feature (2840)..(2840): n is a, c, g, or t
  misc_feature (2847)..(2847): n is a, c, g, or t
  misc_feature (2854)..(2854): n is a, c, g, or t
  misc_feature (2862)..(2862): n is a, c, g, or t
  misc_feature (2869)..(2869): n is a, c, g, or t
gttttgtaactcaactggcctgcttcctggccaaccagcagaacaaatacaaatatgaagagtgcaaagacctcataaaatctatgctgaggaatgagcgacagttcaaggaggagaagcttgcagagcagctcaagcaagctgaggagctcaggcaatataaagtcctggttcactctcaggaacgagagctgacccagttaagggagaagttacgggaagggagagatgcctcccgctcattgaatcagcatctccaggccctcctcactccggataagccagacaagtcccaggggcaggacctccaagaacagctggctgaggggtgtagactggcacagcaacttttccagaagctcagcccagaaaatgacgaagatgaggatgaagatgttcaagttgaggaggctgagaaagtactggaatcatctgcccccagggaggtgcagaaggctgaagaaagcaaagtccctgaggactcactggaggaatgtgccatcacttgttcaaatagccacngcccttgtgactccaaccagcctcacaagaacatcaacatcacctttgaggaagacaaagtcaactcanctctggttgtagacagagaatcctctcatgatgaatgtcaggatgctgtaaacattctcccagtccctggccccacctcttctgccacaaacgtcagcatggtggtatcagccggccctttgtccagcgagaaggcagagatgaacattctagaaatcaacgagaaattgcatccccagctggcagagaagaaacagcagttcagaaacctcaaagagaaatgttttgtaactcaactggcctgcttcctggccaaccagcagaacaaatacaaaaatgaagagtgcaaagacctcataaaatctatgctgaggaatgagcgacagttcaaggaggagaagcttgcagagcagctcaagcaagctgaggagctcaggcaatataaagtcctggttcactctcaggaacgagagctgacccagttaagggagaagttacgggaagggagagatgcctcctgctcattgaatcagcatctccaggccctcctcactccggatgagccagacaagtcccaggggcaggacctccaagaacagctggctgaggggtgtagactggcacagcaccttgtccaaaagctcagcccagaaaatgacaacgatgacgatgaagatgttcaagttgaggtggctgagaaagtgcagaaatcgtctgcccccagggagatgccgaaggctgaagaaaaggaagtccctgaggactcactggaggaatgtgccatcacttgttcaaatagccatggcccttatgactccaaccagccacataggaaaaccaaaatcacatttgaggaagacaaagtcgactcaactctcattggctcatcctctcatgttgaatgggaggatgctgtacacattatcccagaaaatgaaagtgatgatgaggaagaggaagaaaaagggccagtgtctcccaggaatctgcaggagtctgaagaggaggaagtcccccaggagtcctgggatgaaggttattcgactctctcaattcctcctgaaatgttggcctcgtaccagtcttacagcggcacatttcactcattagaggaacagcaagtctgcatggctgttgacataggcggacatcggtgggatcaagtgaaaaaggaggaccaagaggcaacaggtcccaggctcagcagggagctgctggatgagaaagggcctgaagtcttgcaggactcactggatagatgttattcaactccttcaggttatcttgaactgactgactcatgccagccctacagaagtgccttttacatattggagcaacagcgtgttggctgggctcttgacatggatgaaattgaaaagtaccaagaagtggaagaagaccaagacccatcatgccccaggctcagcagggagctgctggatgagaaagagcctgaagtcttgcaggactcactggatagatgttattcgactccttcaggttatcttgaactgcctgacttaggccagccctacagaagtgctgttnactcattggaggaacagtaccttggcttggctcttgacgtggacagaattaaaaaggaccaggaagaggaagaagaccaaggcccaccatgccccaggctcagcagggagctgctggaggcagtagagcctgaagtcttgcaggactcactggatagatgttattcaactccttccagttgtcttgaacagcctgactcctgcctgccctatggaagttccttttatgcattggaggaaaaacatgttggcttttctcttgacgtgggagaaattgaaaagaaggggaaggggaagaaaagaaggggaagaagatcaacgaagaaaagaaggagaaggggaagaaaagaaggggaagaagatcaaaacccaccatgccccaggctcagcaggtgtgctgntggangngnaagngcctgaagtcttgcaggactcactggatagatgttattcnactccntcaaggttntcttgaactnnctgactcatgccagcnctacagaagtgtgtgttactcatttgaggaacagcacattcagcttcgcccttgacgtggacaatagggtttctttactttgatgggaanaaggtctccacctgagtcttccagatgggagtcatatncccacantaagcagcccttataagccgagagatgtcattcctgcaggcaggacctataggcacgtgaagatttgaatgaaactntagttccanttggaagcccagncannggatgggtcagtgngcanggctctnttcctantctcagnccatgccngtggcancctgtgctcagtctgaagacaatggacccaagttaggtgtgacacgttcacataactgtgcagcacatgccgggagtgatcagtcagacattttaatttgaaccacgtatctctgggtagctacaaagttcctcagggatttcattttgcaggcatgtctctgagcttctatacctgctcaaggtcagtgtcatctttgtgtttagctcatccaaaggtgttaccctggtttcaatgaacctaacctcattctttgtatcttcagtgttgaattgttttagctgatccatctttaacgcaggagggatccttggctgaggattgtatttcagaaccaccaactgctcttgacaattgttaacccgctaggctcctttggttagagaagccacagtccttcagcctccaattggtgtcagtacttaggaagaccacagctagatggacaaacagcattgggagaccttagccctgctcctctcgattccatcctgtagagaacaggagtcaggagccgctggcaggagacagcatgtcacccaggactctgccggtgcagaatatgaacaacgccatgttcttgcagaaaacgcttagcctgagtttcataggaggtaatcaccagacaactgcagaatgtagaacactgagcaggacaactgacctgtctccttcacatagtccatatcaccacaaatcacacaacaaaaaggagaagagatattttgggttcaaaaaaagtaaaaagataatatagctgcatttctttagttattttgaaccccaaatatttcctcatctttttgttgttgtcattgatggtggtgacatggacttgtttatagaggacaggtcagctgtctggctcagtgatctacattctgaagttgtctgaaaatgtcttcatgattaaattcagcctaaacgttttgccgggaacactgcagagacaatgctgtgagtttccaaccttagcccatctgcgggcagagaaggtctagtttgtccatcagcattatcatgatatcaggactggttacttggttaaggaggggtctaggagatctgtcccttttagagacaccttacttataatgaagtatttgggagggtggttttcaaaagtagaaatgtcctgtattccgatgatcatcctgtaaacattttatcatttattaatcatccctgcctgtgtctattattatattcatatctctacgctggaaactttctgcctcaatgtttactgtgcctttgtttttgctagtttgtgttgttgaaaaaaaaaacattctctgcctgagttttaatttttgtccaaagttattttaatctatacaattaaaagcttttgcctctagatcgcgggcggccgc

SEQ ID NO: 340923 - DNA, 2874 bp, Homo sapiens
  misc_feature (711)..(711): n is a, c, g, or t
  misc_feature (1111)..(1111): n is a, c, g, or t
  misc_feature (1116)..(1116): n is a, c, g, or t
  misc_feature (1118)..(1118): n is a, c, g, or t
  misc_feature (1120)..(1120): n is a, c, g, or t
  misc_feature (1124)..(1124): n is a, c, g, or t
  misc_feature (1164)..(1164): n is a, c, g, or t
  misc_feature (1170)..(1170): n is a, c, g, or t
  misc_feature (1179)..(1179): n is a, c, g, or t
  misc_feature (1189)..(1190): n is a, c, g, or t
  misc_feature (1206)..(1206): n is a, c, g, or t
  misc_feature (1296)..(1296): n is a, c, g, or t
  misc_feature (1334)..(1334): n is a, c, g, or t
  misc_feature (1341)..(1341): n is a, c, g, or t
  misc_feature (1418)..(1418): n is a, c, g, or t
  misc_feature (1427)..(1427): n is a, c, g, or t
  misc_feature (1440)..(1440): n is a, c, g, or t
  misc_feature (1443)..(1444): n is a, c, g, or t
  misc_feature (1458)..(1458): n is a, c, g, or t
  misc_feature (1462)..(1462): n is a, c, g, or t
  misc_feature (1469)..(1469): n is a, c, g, or t
  misc_feature (1476)..(1476): n is a, c, g, or t
  misc_feature (1483)..(1483): n is a, c, g, or t
  misc_feature (1491)..(1491): n is a, c, g, or t
  misc_feature (1498)..(1498): n is a, c, g, or t
tgggaaatatctgaacgaacacttctgtatttacagaaaatgacaacgatgacgatgaagatgttcaagttgaggtggctgagaaagtgcagaaatcgtctgcccccagggagatgccgaaggctgaagaaaaggaagtccctgaggactcactggaggaatgtgccatcacttgttcaaatagccatggcccttatgactccaaccagccacataggaaaaccaaaatcacatttgaggaagacaaagtcgactcaactctcattggctcatcctctcatgttgaatgggaggatgctgtacacattatcccagaaaatgaaagtgatgatgaggaagaggaagaaaaagggccagtgtctcccaggaatctgcaggagtctgaagaggaggaagtcccccaggagtcctgggatgaaggttattcgactctctcaattcctcctgaaatgttggcctcgtaccagtcttacagcggcacatttcactcattagaggaacagcaagtctgcatggctgttgacataggcggacatcggtgggatcaagtgaaaaaggaggaccaagaggcaacaggtcccaggctcagcagggagctgctggatgagaaagagcctgaagtcttgcaggactcactggatagatgttattcgactccttcaggttatcttgaactgcctgacttaggccagccctacagaagtgctgttnactcattggaggaacagtaccttggcttggctcttgacgtggacagaattaaaaaggaccaggaagaggaagaagaccaaggcccaccatgccccaggctcagcagggagctgctggaggcagtagagcctgaagtcttgcaggactcactggatagatgttattcaactccttccagttgtcttgaacagcctgactcctgcctgccctatggaagttccttttatgcattggaggaaaaacatgttggcttttctcttgacgtgggagaaattgaaaagaaggggaaggggaagaaaagaaggggaagaagatcaacgaagaaaagaaggagaaggggaagaaaagaaggggaagaagatcaaaacccaccatgccccaggctcagcaggtgtgctgntggangngnaagngcctgaagtcttgcaggactcactggatagatgttattcnactccntcaaggttntcttgaactnnctgactcatgccagcnctacagaagtgtgtgttactcatttgaggaacagcacattcagcttcgcccttgacgtggacaatagggtttctttactttgatgggaanaaggtctccacctgagtcttccagatgggagtcatatncccacantaagcagcccttataagccgagagatgtcattcctgcaggcaggacctataggcacgtgaagatttgaatgaaactntagttccanttggaagcccagncannggatgggtcagtgngcanggctctnttcctantctcagnccatgccngtggcancctgtgctcagtctgaagacaatggacccaagttaggtgtgacacgttcacataactgtgcagcacatgccgggagtgatcagtcagacattttaatttgaaccacgtatctctgggtagctacaaagttcctcagggatttcattttgcaggcatgtctctgagcttctatacctgctcaaggtcagtgtcatctttgtgtttagctcatccaaaggtgttaccctggtttcaatgaacctaacctcattctttgtatcttcagtgttgaattgttttagctgatccatctttaacgcaggagggatccttggctgaggattgtatttcagaaccaccaactgctcttgacaattgttaacccgctaggctcctttggttagagaagccacagtccttcagcctccaattggtgtcagtacttaggaagaccacagctagatggacaaacagcattgggagaccttagccctgctcctctcgattccatcctgtagagaacaggagtcaggagccgctggcaggagacagcatgtcacccaggactctgccggtgcagaatatgaacaacgccatgttcttgcagaaaacgcttagcctgagtttcataggaggtaatcaccagacaactgcagaatgtagaacactgagcaggacaactgacctgtctccttcacatagtccatatcaccacaaatcacacaacaaaaaggagaagagatattttgggttcaaaaaaagtaaaaagataatatagctgcatttctttagttattttgaaccccaaatatttcctcatctttttgttgttgtcattgatggtggtgacatggacttgtttatagaggacaggtcagctgtctggctcagtgatctacattctgaagttgtctgaaaatgtcttcatgattaaattcagcctaaacgttttgccgggaacactgcagagacaatgctgtgagtttccaaccttagcccatctgcgggcagagaaggtctagtttgtccatcagcattatcatgatatcaggactggttacttggttaaggaggggtctaggagatctgtcccttttagagacaccttacttataatgaagtatttgggagggtggttttcaaaagtagaaatgtcctgtattccgatgatcatcctgtaaacattttatcatttattaatcatccctgcctgtgtctattattatattcatatctctacgctggaaactttctgcctcaatgtttactgtgcctttgtttttgctagtttgtgttgttgaaaaaaaaaacattctctgcctgagttttaatttttgtccaaagttattttaatctatacaattaaaagcttttgcctctagatcgcgggcggccgc

SEQ ID NO: 340924 - DNA, 340 bp, Homo sapiens
acatgagagttttcagttgaacggtgacccatgcctagatgttcatgtctctgttgcacattgggctgactgtgcttgcagactgtgaagtgggaaatatctgaacgaacacttctgtatttacagaaaatgacaacgatgacgatgaagatgttcaagttgaggtggctgagaaagtgcagaaatcgtctgcccccaggtaacactgaatactcaggaacaagtaatggatggtaacatatgaagaatatctaggaggtacaccctctctggcatctatgatgggccaaaaacccgcatttgcttggccacagtatgtgaaatataacccagcttagac

SEQ ID NO: 340925 - DNA, 1002 bp, Homo sapiens
attgtccaagaccacacagagcccacattagagccgggtgtaagaatgcccctccctttaccccctcccctgctccaaatctcccacactttccactttacgaattgcttcctcttttccaaatggcaagaatgatgtctatgacgagttgctcaattgcttacgggaacaaggcacccccttcccccaagcatcagcctcccctaggctgtccctctccatagacagtggttgtaattgaaggggaggcagccattttccagccctgcctgcctactgtcactcaggcacatccctacccctctgggccccaggtttcccatctgtgtgtgaaggaaggatgacatctgtggttttcataatatcttcaaagcagggaaacccttcctttgaaggaaaccttcaataaaagcaacagatgaaaatgaaactgctggggttggcctggcccacacagcttctccctgcagaggcctgagggtcccactcagtagaaaactcctgggctcgttggtccctaaaggcctctctgctctgatttcctctggtgctaggtggatggagggacactaatattcttagagctgatgagagggtgtgtggaagtccccagtggcctagagttcaggctggcagggagcagggtgtcagggcaagtggtcagtgtgggagagaggacaggacacagtaggggagtcagagagctgagttcaaattcactggcttgcttacctgtcagtgtgtgagcttgggcaaggtactcaacctctgtaaatctatagaatgagttgataataactgcctggcagtgctgtcactaatatggtaacatagaaaatactgagctctttgcctggcatgcagttgaagattaatcattggtgtcaccagtattagggacaggaggcttccactgagcccaaggtcattgcctttctcttccccaccacacttgctgcacaccaagtcccagcagagaaaccacagctgggagcaggatct

SEQ ID NO: 340926 - DNA, 747 bp, Homo sapiens
tccacgactcttttcacagccagtaacagaaagcaacttcttttactaaactccaacattcaattaatgaagacctccaaagtacgctgagaacacacgtttgggtttgtgttcagtttgtgcaattaccaagcaggctaaactttagtccttgcctttgtacattattcacagaagagtgactaccatttataaaaacaagaatgagatagcactggggatttcacttctcaagaaggagagcatataagtatttcaaattcatacagagcacaggaaaatgctaatgtaatgacacgttaaattctttccatcaaaatcattctgcaagtcaccttctcaactctactttgtctcattcagggctagattttggtctacatgcacttcaatcaattcctgtctgcacatgccctggacagagtaggaagtaggcagtgtaaacaaaagatcactgtttcttgtgatcaaacaatgaaagggtttttattcactgctggcctcatctggagagcagcttcatgtgctgctgtccactgcagcccaccaccaggacatgcccaggtcacagttagccaagagcagtgttcctgcacatggagtgacttgagctggacaacctgactgtgaagaacctagaagccacagaaggtaaacaactccagcttcagtattaggggttatggaggggaaagagggaggcatgttggttgcagaatgagacttaacagcagggggtcctctaga

SEQ ID NO: 340927 - DNA, 659 bp, Homo sapiens
tccacgactcttttcacagccagtaacagaaagcaacttcttttactaaactccaacattcaattaatgaagacctccaaagtacgctgagaacacacgtttgggtttgtgttcagtttgtgcaattaccaagcaggctaaactttagtccttgcctttgtacattattcacagaagagtgactaccatttataaaaacaagaatgagatagcactggggatttcacttctcaagaaggagagcatataagtatttcaaattcatacagagcacaggaaaatgctaatgtaatgacacgttaaattctttccatcaaaatcattctgcaagtcaccttctcaactctactttgtctcattcagggctagattttggtctacatgcacttcaatcaattcctgtctgcacatgccctggacagagtaggaagtaggcagtgtaaacaaaagatcactgtttcttgtgatcaaacaatgaaagggtttttattcactgctggcctcatctggagagcagcttcatgtgctgctgtccactgcagcccaccaccaggacatgcccaggtcacagttagccaagagcagtgtcgctagaggatgtactagtctagagactcgggcaacagtgacgaccaagaacaaacgaatgcaagagtacg

SEQ ID NO: 340928 - DNA, 620 bp, Homo sapiens
tccacgactcttttcacagccagtaacagaaagcaacttcttttactaaactccaacattcaattaatgaagacctccaaagtacgctgagaacacacgtttgggtttgtgttcagtttgtgcaattaccaagcaggctaaactttagtccttgcctttgtacattattcacagaagagtgactaccatttataaaaacaagaatgagatagcactggggatttcacttctcaagaaggagagcatataagtatttcaaattcatacagagcacaggaaaatgctaatgtaatgacacgttaaattctttccatcaaaatcattctgcaagtcaccttctcaactctactttgtctcattcagggctagattttggtctacatgcacttcaatcaattcctgtctgcacatgccctggacagagtaggaagtaggcagtgtaaacaaaagatcactgtttcttgtgatcaaacaatgaaagggtttttattcactgctggcctcatctggagagcagcttcatgtgctgctgtccactgcagcccaccaccaggacatgcccagctgcaaaggttattcccaagcaaggagtaggcacacgagcggccattgagtagagc

SEQ ID NO: 340929 - DNA, 189 bp, Homo sapiens
atcctttagcagatatacggtttacaaatttttttcccattacttaggtagccctttcattttgttgatttttttccttctccatgcagaagctttttagtttgatgaaatcccacttgtctattttagctttcattccctgtatgttggtgtcataaccaataaatcattgctcaggccaatatcaag

SEQ ID NO: 340930 - DNA, 123 bp, Homo sapiens
agtttcttgatgtctaaggagccagtcttgaaagtgttagaccaaggttactgtcagagccaccatgttcttcttccttggcgtagagaaataatatctaggttctgtgcaggtcagcacatg

SEQ ID NO: 340931 - DNA, 236 bp, Homo sapiens
cttttcagtttcttccttgattgctgttgtcacaactttatccagctcctttttagactgttctgcttttaaattaagctgttcacactttatcttagcttcattaagtttctgttcaatcaaagccttatcttcctgtgacagcttttcaccattctcttttaagaagttctctgtgtttttcactacttcagccaatgcctgtgcacttccttgcatatctttctgtaattcct

SEQ ID NO: 340932 - DNA, 299 bp, Homo sapiens
tcatctgccgaaaggaagtgcttgctttatctgcaggaagcacattgatctgctgaactcataacaaccaagagttacaagctgttgctaaacctgcttacttgtgtagataacttaaaataccttcataaaagaacttcactaatattgttttggtttttgtccaaaacaagccatgagttataaaattccagtactgaaacatttaataataatctcctatgtaggtactatctttaagttcgtatctgtgtgtttttaataagagctttaataaaagcaaaccagtaatgaaacag

SEQ ID NO: 340933 - DNA, 417 bp, Homo sapiens
ccatctcttcagaagcctcattttctggttttaaaacgcttgaaagttgaattcgtaatcagaaaattgataggcaagtgtggtatctgaacagagaggctggaactattccatgcagatagagagagaatctccctcccttcctaacaccagtagggttctgacccaaccagatgttattagtcaacaaatatgtacagaacacccacggtatgccaggctccattctaggacctgggcatggtttttgcctttatgaagcttacattcttgttgggagagacatattgaacaagcaaacttaaaaaatgtgataaattcagataatgagaagtgctataaggaaaaataattaaaagtgacttagaatggggaacaccgctctaaggaggtagcacacaacctgaaccttttatc

SEQ ID NO: 340934 - DNA, 367 bp, Homo sapiens
aatataagtgaggtcagaaaggtaggtaggggccagatcacgcagcacttaataggccatgataaggattttaaaattgtacgtaacaggaagccatcgaaggggtggaggatttgataccttttaaagcagtatgtcagctactatgtgaagacaggagttaagggtggaagcagagattggtagcttaacctattaactgggcccgtggaggtgctatttattgaaatgggaactattgtaaggggaatatatttggaagcggggggagatcaagaactcccatttgaacttgttaaatttgacactgccagttagaatgactattaacaaaaagacaaaaaaataacaaatgctggtgaggaca

SEQ ID NO: 340935 - DNA, 250 bp, Homo sapiens
gatgcaggcaaggtagctgttactgcagtggtttctatgcttgcctttcaccagagagagcagttttatgattcatcattcatgccacacaaccctctctcctaatatataagtttgacaaaaggcagagcactttgggaactagcattcatcatgcttgtttgcacaaacctgatttatgtttacctatcctctgacctcccctgcccctctgttctctagattccagtaggaagctccacagtaacag

SEQ ID NO: 340936 - DNA, 578 bp, Homo sapiens
gccaaggcaggtggatcatgagttcaggagattgagaccatcctggctaacacactgaaaccccgtctctactaaaaatacaaaaacaaaatattcagaacatttacaaagctgcttagcaaaggaaattaatctcaatggttagctttcctcaattattgttttccccttttctccattttaacccttatttcagactttcatctatttcagactattcatgtagattgtcttagtcctttgcggctgctattatataacaaagcaccaaagactgtatcttataaacagcggtaatttctttctcatagttctggaggctggatgagggcagatcagggcactagcatgattctggtgagggctgttttccaggtagcagactaccaacttcttgttgtatgctcatgtggcagaaagagagctagagaaaattctatggggtccctatataaggccctgaatcccattcatgacctatttacctcccaaaggccctacttccttacaccagtcatattgacagttaggatttcaatatgaatttgggatcgcaggagatacaaacattcaagcta

SEQ ID NO: 340937 - DNA, 1355 bp, Homo sapiens
atgttctacagctgtgttcaatatggtagccactagctacagatggctctcaagcacttgaaatgtggtgaatgggaccgaagaactgaatttttattttagctattttttattcatttctatgtaaatagtcacatgtggccagggctgccattttattggacagtgcagctctaaagcagtggctataaatgtgagacctcccaacaatagattagcatcatctgaaatctggtcagaaattcaaattcttgggtgcaaatcaaaaacccttactgaatcaaacaccctgggggtgggagtccagcaatcagcattagagaagccctccagatgattctgatgctaaagtttgagagccactgtttgcaggaaagagtagagtggcaagcaagggggaagggcagagagactgaatggggatatagtggagagggtcaaggtaaggagtaaggagaatccagtgagaaggctgtaggagaccaatccaataaaaaaaaatctcttttccatcaattctgggaactgttgcttagactggagcccttctgcaaaagctgatggtcactttacttgcttggagatcccttgtggaattagcctagtggcataaaagaactttacaaaccttccaaggaaggcgagagcaaaacggcctcacaagagggagtgactcagctttgacttttgggcttagcaggtttctctgacttttgaacataggctgagtgatgtggcacatcactataactggggtttactccccttgttccatcctgcaatcaccagatcccctgagccctgcattcaaagctggtagtgacattagcttaaaaactgaaaacgatgttttaaacatcattaaaaacatcagtcccgctgcactgggggtttaatgtgagttgggagagaagctgctcatagttggagtagactattttaagagcccacttatgatacctcccgctatgcctctctatactacacaaatttcacaattggagaaatagaagcatagagaatttaagaagtttgagcccagctcacaaggtcactcagtagcagctctaaggggcgctgtctattaggccttctttagtctctaatgtatttaatctggcagctttttgaactctgagcatcattttctttagcttgcccagcaagctataaattaagcaaccgcacctcctaatgacttttaggatgttctcctattgtgccagaccccaagtgcacaattgctaaaccactctgttttgtaaatatggagaaccatagcaccctgtaagtcaggcactcctaaaatctatttttaatatcttagattattaaaaatagtttgaataaattcc

SEQ ID NO: 340938 - DNA, 654 bp, Homo sapiens
tttttggtattttcagtagagacagggcttcaccctgttggccaggctgttcttaaactcctgacctcaggtgatccgcctgcctcagccttccagagtgctgggattacaggcgtgagtcatcacgcctgaccctctaatcccaacttctaacttaccagcggtgtgaccctgtgcaagccgtgttatgtctctgtgcctcagtttgcttgtctgtaaggtgcaaaggctgcgagttgcaacttccgagggtcgaggtgaggggttagcagatcatcaggtggcacacagtgggcactgcggaagtgtgtgttgctgccactgttggcaggaatattgagcctgccccgtgcctcctcaggggccctgtgggtttgcgtcgtcctgagcccccactgcaaaccagaggaaagggcaggctggctccagctactcagcaggtgggacaagctcgacgtctgcccactggaagagggcaactactccttcgacggccccagcctgcagcccaccatggcccccgccccaggtaggagagaggggtctttaccatgccccccaaaaaccatcaccactaactgtggccccacttaccatcatggtcctcttcccaggagagagagggagtggggcagagcaaagcagaccccagtc

SEQ ID NO: 340939 - DNA, 3919 bp, Homo sapiens
gtgccgggttcgagtgaagtgactcggctgggctttgcaccgggtcttgctgtgtaccacaaacaccgcctgtctctgggatgacacggatgcgacagtttggctttgatcctaggattccacctgagcggaaacatccgcgagccagggagtcctggagagcccgagcgcctctaccatgtctccatcagctttgatcgctgcaagatcacgtccgtgagctgcggctgtgacaaccgcgacctcttcactcgaatgcccacgtggtggccctgtccctgtaccgcattcggcacgcccaccaggtggagctgcggctgcccatctccgagacgctctcccagatgaaccgggaccagctgcagaagttcgtgcagtacctcatcagcgcccatcacactgaggtgctgcccactgctcagcgcttggctgatgagatcctcctgctgggctccgagatcaacttggtgaatggtgccccagaccccaccgccggcgcaggaatcgaggacgccaactgctggcacctggacgaggagcagatccaggagcaggtgaagcagctactgtccaatggcggctactacggggccagccagcagctgcgctccatgttcagcaaggtgcgggagatgctgcgaatgcgggactccaacggggcgcgcatgctgattctcatgaccgagcagttcctgcaggacacgcgcctggccctgtggcggcagcagggcgcgggcatgacggacaagtgccggcagctctgggatgagctgggggccctgtgggtttgcgtcgtcctgagcccccactgcaaaccagaggaaagggcaggctggctccagctactcagcaggtgggacaagctcgacgtctgcccactggaagagggcaactactccttcgacggccccagcctgcagcccaccatggcccccgccccagagctgctccagaagggctccacctgcatcaccaacaccgaaggatgggtggggcaccccctggaccccattggctgcctctgcagggcgctcctggaggcctgtcgtctggaggaggagacacttaccctttacccagactcaggccccgagaagcggaaggtggcctaccagcacgtgcctgtgcccgggagccctggggagtcctacttggtgctggcgctggaggtggcactgctggggctggggcagcagcgggccctgccggaggggctgtacgcccaggacaaggtggtgcgcaacgaggagcagctgctggccctgctggaggaggtggagttggatgagcggttggtgcaggtgctgcgcaagcaggcggggctgctgctggaagggggtcccttcagtggctttggggaggtgctgttccgggagagcgtgcccatgcacacctgtgcccgctacctgttcaccgcactgctgcctcatgacccggacctggcctatcgcctcgcgctgcgagctatgaggctgcccatactggagacagcatttcctgctggagaacctcatcccagcccgctggactccatcatgagcaaccgcttcccccgctggttcatccttggccacctggagacccgccagtgtgaactggcttccaccatgttgacggccgccaagggagaccccaagtggctgcacacggtactgggctccatccagcagaacatccactctccggccctgctctttaagctggcgcaggacgcctgcaagacagccaccccggtcagcgccccaccagacaccacgctgctgggcatcgcactggagctggggctgcaggtgatgcggatgactctgaacgtaatgacctggcggcggagggagatggtgcgctggctggtcagctgtgccacagagattggcccgcaagccctgatgaatatcatgcagaactggtattccttattcacaccagtggaggcggctaccatcgtggcagtgacgggcaccacacacgccactctgctgcgactgcagctggacacatcgcggagggaggagctctgggcctgcgcccgcaccctggccttgcagtgcgcgatgaaggaccctcagaactgcgccttgcctgccctgaccctgtgcgagaagaaccactcggccttcgaggcggcctaccagatcgtgctggacgcggcggccggcggcctgggccacgcccacctcttcactgtggcccgctatatggagcaccgcgggctgccgctccgggcctacaagctggcgacgctggccctggcgcagctcagcatcgccttcaaccaggacagccaccctgccgtcaacgacgtgctttgggcctgctctctcagccactccctgggccggcacgagctctctgccatcgtccccctcatcattcgcagcatccactgtgccccaatgctgtccgatattctgcgccgctggactctctcggcgcccggtctgggccccttaggggcacgccgggccgccaagccactgggtgccgaccgggcgccgctctgccagctcctggacgcggcagtcaccgcctacatcaccaccagccactcgcgcctcacgcacatcagcccgcggcactatggggatttcatcgaattcctgggcaaggcccgggagaccttcctgctggcgcccgacgggcacctccagttctcacagttcttggagaacctcaaacagacctacaagggcaagaagaaactcatgcttttggtgcgggagcgttttggttgagggacagtggggtgcgtgggagtggggatccccctcgcccctgcgtcccccacccttgctctccaattaggcccacgtggcatttcagtattattaagtcagggaaggagcccggctggagatgggggcagggggagcagcatcctgccacgtgtgtgcctgggagtctgtgagcaagtgtgcaagactccagaagcagaagccatactgccacccagaagcctggaaggggtgtgtgcttgggctgctggtatgaccccactttgggcaccccaaaagcaataggcaaactccccttacccagactggcttgggctccaggagggaggctgggaggcaggactttccagaaatcggccctctaagtcaatgtagcacattttcccccaaccccaccctgggtggccaagggtcctcccccaccccctactgctcagggccccccattatgccacctccaaagtggctgcccagccaggaccattggctcacccccactgaaggaattgaagaggcctcaggcctcagcctcatacctcacccccttatcctatccggccaggacccccatttccttgggcactagggtcccagggtgggctcagggttggggaagtcctcgctgccctctcttctcacctgctagtcactggacgtacaactcaggaactgagcgaggctcacactgccccttccaacctggggttgggggacacagacgcgagagagccggagacccccacccccgatctggaaaggaaagagacctgtatcttggtgtttttctggctttttcaccctttcgcctcctgtctttctgcttcgccccttcatcttactctgtttccatttttcccggcacttacctgcctttctctctgcacctaagtccctgccgccctctctctttggccatccttcctttcccccaccttgacccagggaggagaagggagaacatcacccccccaagtcacccccacatcttttcccttcttgtatattaaggacaaaataccacatcattttgtaactttttttctatttattgaacggtgtattacatgtccttttcctttttttttttcaaagattgaacagaaatttttctttttaattttattttgagactggggtgcatctccagagccactcacaccctcaacctcgtttcctccgcaaaaaaa

SEQ ID NO: 340940 - DNA, 3247 bp, Homo sapiens
actggaatgacgcctacctgcagaggatcctggccagtgactcctacgggcccagcctcacaggcagcgtgggtggggacaaaccgactttcgacccccagggccgcccactgtggctgggagaacctttccccactgcctgtgcccgtgtggacaccctgcgtgcccacggatacccccgccaggccctgcggctggcaagtgccatcatcaacacactccggctgcagcagcggcatcagctagagagctacaagcagcagaaaaaagagctgctccagaagggctccacctgcatcaccaacaccgaaggatgggtggggcaccccctggaccccattggctgcctctgcagggcgctcctggaggcctgtcgtctggaggaggagacacttaccctttacccagactcaggccccgagaagcggaaggtggcctaccagcacgtgcctgtgcccgggagccctggggagtcctacttggtgctggcgctggaggtggcactgctggggctggggcagcagcgggccctgccggaggggctgtacgcccaggacaaggtggtgcgcaacgaggagcagctgctggccctgctggaggaggtggagttggatgagcggttggtgcaggtgctgcgcaagcaggcggggctgctgctggaagggggtcccttcagtggctttggggaggtgctgttccgggagagcgtgcccatgcacacctgtgcccgctacctgttcaccgcactgctgcctcatgacccggacctggcctatcgcctcgcgctgcgagctatgaggctgcccatactggagacagcatttcctgctggagaacctcatcccagcccgctggactccatcatgagcaaccgcttcccccgctggttcatccttggccacctggagacccgccagtgtgaactggcttccaccatgttgacggccgccaagggagaccccaagtggctgcacacggtactgggctccatccagcagaacatccactctccggccctgctctttaagctggcgcaggacgcctgcaagacagccaccccggtcagcgccccaccagacaccacgctgctgggcatcgcactggagctggggctgcaggtgatgcggatgactctgaacgtaatgacctggcggcggagggagatggtgcgctggctggtcagctgtgccacagagattggcccgcaagccctgatgaatatcatgcagaactggtattccttattcacaccagtggaggcggctaccatcgtggcagtgacgggcaccacacacgccactctgctgcgactgcagctggacacatcgcggagggaggagctctgggcctgcgcccgcaccctggccttgcagtgcgcgatgaaggaccctcagaactgcgccttgcctgccctgaccctgtgcgagaagaaccactcggccttcgaggcggcctaccagatcgtgctggacgcggcggccggcggcctgggccacgcccacctcttcactgtggcccgctatatggagcaccgcgggctgccgctccgggcctacaagctggcgacgctggccctggcgcagctcagcatcgccttcaaccaggacagccaccctgccgtcaacgacgtgctttgggcctgctctctcagccactccctgggccggcacgagctctctgccatcgtccccctcatcattcgcagcatccactgtgccccaatgctgtccgatattctgcgccgctggactctctcggcgcccggtctgggccccttaggggcacgccgggccgccaagccactgggtgccgaccgggcgccgctctgccagctcctggacgcggcagtcaccgcctacatcaccaccagccactcgcgcctcacgcacatcagcccgcggcactatggggatttcatcgaattcctgggcaaggcccgggagaccttcctgctggcgcccgacgggcacctccagttctcacagttcttggagaacctcaaacagacctacaagggcaagaagaaactcatgcttttggtgcgggagcgttttggttgagggacagtggggtgcgtgggagtggggatccccctcgcccctgcgtcccccacccttgctctccaattaggcccacgtggcatttcagtattattaagtcagggaaggagcccggctggagatgggggcagggggagcagcatcctgccacgtgtgtgcctgggagtctgtgagcaagtgtgcaagactccagaagcagaagccatactgccacccagaagcctggaaggggtgtgtgcttgggctgctggtatgaccccactttgggcaccccaaaagcaataggcaaactccccttacccagactggcttgggctccaggagggaggctgggaggcaggactttccagaaatcggccctctaagtcaatgtagcacattttcccccaaccccaccctgggtggccaagggtcctcccccaccccctactgctcagggccccccattatgccacctccaaagtggctgcccagccaggaccattggctcacccccactgaaggaattgaagaggcctcaggcctcagcctcatacctcacccccttatcctatccggccaggacccccatttccttgggcactagggtcccagggtgggctcagggttggggaagtcctcgctgccctctcttctcacctgctagtcactggacgtacaactcaggaactgagcgaggctcacactgccccttccaacctggggttgggggacacagacgcgagagagccggagacccccacccccgatctggaaaggaaagagacctgtatcttggtgtttttctggctttttcaccctttcgcctcctgtctttctgcttcgccccttcatcttactctgtttccatttttcccggcacttacctgcctttctctctgcacctaagtccctgccgccctctctctttggccatccttcctttcccccaccttgacccagggaggagaagggagaacatcacccccccaagtcacccccacatcttttcccttcttgtatattaaggacaaaataccacatcattttgtaactttttttctatttattgaacggtgtattacatgtccttttcctttttttttttcaaagattgaacagaaatttttctttttaattttattttgagactggggtgcatctccagagccactcacaccctcaacctcgtttcctccgcaaaaaaa

SEQ ID NO: 340941 - DNA, 3600 bp, Homo sapiens
gtgccgggttcgagtgaagtgactcggctgggctttgcaccgggtcttgctgtgtaccacaaacaccgcctgtctctgggatgacacggatgcgacagtttggctttgatcctaggattccacctgagcggaaacatccgcgagccagggagtcctggagagcccgagcgcctctaccatgtctccatcagctttgatcgctgcaagatcacgtccgtgagctgcggctgtgacaaccgcgacctcttcactcgaatgcccacgtggtggccctgtccctgtaccgcattcggcacgcccaccaggtggagctgcggctgcccatctccgagacgctctcccagatgaaccgggaccagctgcagaagttcgtgcagtacctcatcagcgcccatcacactgaggtgctgcccactgctcagcgcttggctgatgagatcctcctgctgggctccgagatcaacttggtgaatggtgccccagaccccaccgccggcgcaggaatcgaggacgccaactgctggcacctggacgaggagcagatccaggagcaggtgaagcagctactgtccaatggcggctactacggggccagccagcagctgcgctccatgttcagcaaggtgcgggagatgctgcgaatgcgggactccaacggggcgcgcatgctgattctcatgaccgagcagttcctgcaggacacgcgcctggccctgtggcggcagcagggcgcgggcatgacggacaagtgccggcagctctgggatgagctgggggccctgtgggtttgcgtcgtcctgagcccccactgcaaaccagaggaaagggcaggctggctccagctactcagcaggtgggacaagctcgacgtctgcccactggaagagggcaactactccttcgacggccccagcctgcagcccaccatggcccccgccccagagctgctccagaagggctccacctgcatcaccaacaccgaaggatgggtggggcaccccctggaccccattggctgcctctgcagggcgctcctggaggcctgtcgtctggaggaggagacacttaccctttacccagactcaggccccgagaagcggaaggtggcctaccagcacgtgcctgtgcccgggagccctggggagtcctacttggtgctggcgctggaggtggcactgctggggctggggcagcagcgggccctgccggaggggctgtacgcccaggacaaggtggtgcgcaacgaggagcagctgctggccctgctggaggaggtggagttggatgagcggttggtgcaggtgctgcgcaagcaggcggggctgctgctggaagggggtcccttcagtggctttggggaggtgctgttccgggagagcgtgcccatgcacacctgtgcccgctacctgttcaccgcactgctgcctcatgacccggacctggcctatcgcctcgcgctgcgagctatgaggctgcccatactggagacagcatttcctgctggagaacctcatcccagcccgctggactccatcatgagcaaccgcttcccccgctggttcatccttggccacctggagacccgccagtgtgaactggcttccaccatgttgacggccgccaagggagaccccaagtggctgcacacggtactgggctccatccagcagaacatccactctccggccctgctctttaagctggcgcaggacgcctgcaagacagccaccccggtcagcgccccaccagacaccacgctgctgggcatcgcactggagctggggctgcaggtgatgcggatgactctgaacgtaatgacctggcggcggagggagatggtgcgctggctggtcagctgtgccacagagattggcccgcaagccctgatgaatatcatgcagaactggtattccttattcacaccagtggaggcggctaccatcgtggcagtgacgggcaccacacacgccactctgctgcgactgcagctggacacatcgcggagggaggagctctgggcctgcgcccgcaccctggccttgcagtgcgcgatgaaggaccctcagaactgcgccttgcctgccctgaccctgtgcgagaagaaccactcggccttcgaggcggcctaccagatcgtgctggacgcggcggccggcggcctgggccacgcccacctcttcactgtggcccgctatatggagcaccgcgggctgccgctccgggcctacaagctggcgacgctggccctggcgcagctcagcatcgccttcaaccaggacagccaccctgccgtcaacgacgtgctttgggcctgctctctcagccactccctgggccggcacgagctctctgccatcgtccccctcatcattcgcagcatccactgtgccccaatgctgtccgatattctgcgccgctggactctctcggcgcccggtctgggccccttaggggcacgccgggccgccaagccactgggtgccgaccgggcgccgctctgccagctcctggacgcggcagtcaccgcctacatcaccaccagccactcgcgcctcacgcacatcagcccgcggcactatggggatttcatcgaattcctgggcaaggcccgggagaccttcctgctggcgcccgacgggcacctccagttctcacagttcttggagaacctcaaacagacctacaagggcaagaagaaactcatgcttttggtgcgggagcgttttggttgagggacagtggggtgcgtgggagtggggatccccctcgcccctgcgtcccccacccttgctctccaattaggcccacgtggcatttcagtattattaagtcagggaaggagcccggctggagatgggggcagggggagcagcatcctgccacgtgtgtgcctgggagtctgtgagcaagtgtgcaagactccagaagcagaagccatactgccacccagaagcctggaaggggtgtgtgcttgggctgctggtatgaccccactttgggcaccccaaaagcaataggcaaactccccttacccagactggcttgggctccaggagggaggctgggaggcaggactttccagaaatcggccctctaagtcaatgtagcacattttcccccaaccccaccctgggtggccaagggtcctcccccaccccctactgctcagggccccccattatgccacctccaaagtggctgcccagccaggaccattggctcacccccactgaaggaattgaagaggcctcaggcctcagcctcatacctcacccccttatcctatccggccaggacccccatttccttgggcactagggtcccagggtgggctcagggttggggaagtcctcgctgccctctcttctcacctgctagtcactggacgtacaactcaggaactgagcgaggctcacactgccccttccaacctggggtctatccagtttttggacaagattaaaagcaattcttaactggtcataattttttttaaaggtaataagaacactatggtttatacaatattgaaaaaatacaattttttatggttggaactcaaatcaccacccagcactttaagccctccctaagacccta

SEQ ID NO: 340942 - DNA, 458 bp, Homo sapiens
ggccagtttttttgtaaagatgggagcctctctatgttgcccaggctggtctcgaactcttggcctcaagcgatcctccctcctaagcttcccaaagcgctgggattacatcaaccccaggctcctaacccactggcccttcctacaggtggaggagcggttctcccgggtgcctgagcccgtccagaagcgcatcgtgttttggtcgtttccacgcagtgaacgggaaatatgtatgtactcgtcgctgggttacccgcccccagagggcgagcacgatgcccgggtgccctttacccgcgggctgcacctgctccagagcggggccgtggaccgcgtgttgcaagtgggtgagtctttgtcccccactcctgctggggaggccaggaggtccataccaggcctggaaatgggggagttggagggaggcctggggccaggggatgggaggttacaga

SEQ ID NO: 340943 - DNA, 4348 bp, Homo sapiens
taaaggggccgcatcaccctgccggcccggcgcgggtcgggggtgggtgcggtaggggtcccggggcggccgagcgcagaggacggacgggaaggagggcagggggcgcgggagccggcgaagcggagcgggcatcggaccgagccccccaaagaggccccgccccggccctggccccggccgggccggatggaaccccccgcggccaagcggagccggggctgccccgcgggacccgaggagcgcgatgccggggccggggccgcgcgtggccggggccggcccgaggcgctgctggacctcagcgccaagcgggtagccgagagctgggccttcgagcaggtggaggagcggttctcccgggtgcctgagcccgtccagaagcgcatcgtgttttggtcgtttccacgcagtgaacgggaaatatgtatgtactcgtcgctgggttacccgcccccagagggcgagcacgatgcccgggtgccctttacccgcgggctgcacctgctccagagcggggccgtggaccgcgtgttgcaagtgggattccacctgagcggaaacatccgcgagccagggagtcctggagagcccgagcgcctctaccatgtctccatcagctttgatcgctgcaagatcacgtccgtgagctgcggctgtgacaaccgcgacctcttcactcgaatgcccacgtggtggccctgtccctgtaccgcattcggcacgcccaccaggtggagctgcggctgcccatctccgagacgctctcccagatgaaccgggaccagctgcagaagttcgtgcagtacctcatcagcgcccatcacactgaggtgctgcccactgctcagcgcttggctgatgagatcctcctgctgggctccgagatcaacttggtgaatggtgccccagaccccaccgccggcgcaggaatcgaggacgccaactgctggcacctggacgaggagcagatccaggagcaggtgaagcagctactgtccaatggcggctactacggggccagccagcagctgcgctccatgttcagcaaggtgcgggagatgctgcgaatgcgggactccaacggggcgcgcatgctgattctcatgaccgagcagttcctgcaggacacgcgcctggccctgtggcggcagcagggcgcgggcatgacggacaagtgccggcagctctgggatgagctgggggccctgtgggtttgcgtcgtcctgagcccccactgcaaaccagaggaaagggcaggctggctccagctactcagcaggtgggacaagctcgacgtctgcccactggaagagggcaactactccttcgacggccccagcctgcagcccaccatggcccccgccccagagctgctccagaagggctccacctgcatcaccaacaccgaaggatgggtggggcaccccctggaccccattggctgcctctgcagggcgctcctggaggcctgtcgtctggaggaggagacacttaccctttacccagactcaggccccgagaagcggaaggtggcctaccagcacgtgcctgtgcccgggagccctggggagtcctacttggtgctggcgctggaggtggcactgctggggctggggcagcagcgggccctgccggaggggctgtacgcccaggacaaggtggtgcgcaacgaggagcagctgctggccctgctggaggaggtggagttggatgagcggttggtgcaggtgctgcgcaagcaggcggggctgctgctggaagggggtcccttcagtggctttggggaggtgctgttccgggagagcgtgcccatgcacacctgtgcccgctacctgttcaccgcactgctgcctcatgacccggacctggcctatcgcctcgcgctgcgagctatgaggctgcccatactggagacagcatttcctgctggagaacctcatcccagcccgctggactccatcatgagcaaccgcttcccccgctggttcatccttggccacctggagacccgccagtgtgaactggcttccaccatgttgacggccgccaagggagaccccaagtggctgcacacggtactgggctccatccagcagaacatccactctccggccctgctctttaagctggcgcaggacgcctgcaagacagccaccccggtcagcgccccaccagacaccacgctgctgggcatcgcactggagctggggctgcaggtgatgcggatgactctgaacgtaatgacctggcggcggagggagatggtgcgctggctggtcagctgtgccacagagattggcccgcaagccctgatgaatatcatgcagaactggtattccttattcacaccagtggaggcggctaccatcgtggcagtgacgggcaccacacacgccactctgctgcgactgcagctggacacatcgcggagggaggagctctgggcctgcgcccgcaccctggccttgcagtgcgcgatgaaggaccctcagaactgcgccttgcctgccctgaccctgtgcgagaagaaccactcggccttcgaggcggcctaccagatcgtgctggacgcggcggccggcggcctgggccacgcccacctcttcactgtggcccgctatatggagcaccgcgggctgccgctccgggcctacaagctggcgacgctggccctggcgcagctcagcatcgccttcaaccaggacagccaccctgccgtcaacgacgtgctttgggcctgctctctcagccactccctgggccggcacgagctctctgccatcgtccccctcatcattcgcagcatccactgtgccccaatgctgtccgatattctgcgccgctggactctctcggcgcccggtctgggccccttaggggcacgccgggccgccaagccactgggtgccgaccgggcgccgctctgccagctcctggacgcggcagtcaccgcctacatcaccaccagccactcgcgcctcacgcacatcagcccgcggcactatggggatttcatcgaattcctgggcaaggcccgggagaccttcctgctggcgcccgacgggcacctccagttctcacagttcttggagaacctcaaacagacctacaagggcaagaagaaactcatgcttttggtgcgggagcgttttggttgagggacagtggggtgcgtgggagtggggatccccctcgcccctgcgtcccccacccttgctctccaattaggcccacgtggcatttcagtattattaagtcagggaaggagcccggctggagatgggggcagggggagcagcatcctgccacgtgtgtgcctgggagtctgtgagcaagtgtgcaagactccagaagcagaagccatactgccacccagaagcctggaaggggtgtgtgcttgggctgctggtatgaccccactttgggcaccccaaaagcaataggcaaactccccttacccagactggcttgggctccaggagggaggctgggaggcaggactttccagaaatcggccctctaagtcaatgtagcacattttcccccaaccccaccctgggtggccaagggtcctcccccaccccctactgctcagggccccccattatgccacctccaaagtggctgcccagccaggaccattggctcacccccactgaaggaattgaagaggcctcaggcctcagcctcatacctcacccccttatcctatccggccaggacccccatttccttgggcactagggtcccagggtgggctcagggttggggaagtcctcgctgccctctcttctcacctgctagtcactggacgtacaactcaggaactgagcgaggctcacactgccccttccaacctggggttgggggacacagacgcgagagagccggagacccccacccccgatctggaaaggaaagagacctgtatcttggtgtttttctggctttttcaccctttcgcctcctgtctttctgcttcgccccttcatcttactctgtttccatttttcccggcacttacctgcctttctctctgcacctaagtccctgccgccctctctctttggccatccttcctttcccccaccttgacccagggaggagaagggagaacatcacccccccaagtcacccccacatcttttcccttcttgtatattaaggacaaaataccacatcattttgtaactttttttctatttattgaacggtgtattacatgtccttttcctttttttttttcaaagattgaacagaaatttttctttttaattttattttgagactggggtgcatctccagagccactcacaccctcaacctcgtttcctccgcaaaaaaa

SEQ ID NO: 340944 - DNA, 3506 bp, Homo sapiens
tttttggtattttcagtagagacagggcttcaccctgttggccaggctgttcttaaactcctgacctcaggtgatccgcctgcctcagccttccagagtgctgggattacaggcgtgagtcatcacgcctgaccctctaatcccaacttctaacttaccagcggtgtgaccctgtgcaagccgtgttatgtctctgtgcctcagtttgcttgtctgtaaggtgcaaaggctgcgagttgcaacttccgagggtcgaggtgaggggttagcagatcatcaggtggcacacagtgggcactgcggaagtgtgtgttgctgccactgttggcaggaatattgagcctgccccgtgcctcctcaggggccctgtgggtttgcgtcgtcctgagcccccactgcaaaccagaggaaagggcaggctggctccagctactcagcaggtgggacaagctcgacgtctgcccactggaagagggcaactactccttcgacggccccagcctgcagcccaccatggcccccgccccagagctgctccagaagggctccacctgcatcaccaacaccgaaggatgggtggggcaccccctggaccccattggctgcctctgcagggcgctcctggaggcctgtcgtctggaggaggagacacttaccctttacccagactcaggccccgagaagcggaaggtggcctaccagcacgtgcctgtgcccgggagccctggggagtcctacttggtgctggcgctggaggtggcactgctggggctggggcagcagcgggccctgccggaggggctgtacgcccaggacaaggtggtgcgcaacgaggagcagctgctggccctgctggaggaggtggagttggatgagcggttggtgcaggtgctgcgcaagcaggcggggctgctgctggaagggggtcccttcagtggctttggggaggtgctgttccgggagagcgtgcccatgcacacctgtgcccgctacctgttcaccgcactgctgcctcatgacccggacctggcctatcgcctcgcgctgcgagctatgaggctgcccatactggagacagcatttcctgctggagaacctcatcccagcccgctggactccatcatgagcaaccgcttcccccgctggttcatccttggccacctggagacccgccagtgtgaactggcttccaccatgttgacggccgccaagggagaccccaagtggctgcacacggtactgggctccatccagcagaacatccactctccggccctgctctttaagctggcgcaggacgcctgcaagacagccaccccggtcagcgccccaccagacaccacgctgctgggcatcgcactggagctggggctgcaggtgatgcggatgactctgaacgtaatgacctggcggcggagggagatggtgcgctggctggtcagctgtgccacagagattggcccgcaagccctgatgaatatcatgcagaactggtattccttattcacaccagtggaggcggctaccatcgtggcagtgacgggcaccacacacgccactctgctgcgactgcagctggacacatcgcggagggaggagctctgggcctgcgcccgcaccctggccttgcagtgcgcgatgaaggaccctcagaactgcgccttgcctgccctgaccctgtgcgagaagaaccactcggccttcgaggcggcctaccagatcgtgctggacgcggcggccggcggcctgggccacgcccacctcttcactgtggcccgctatatggagcaccgcgggctgccgctccgggcctacaagctggcgacgctggccctggcgcagctcagcatcgccttcaaccaggacagccaccctgccgtcaacgacgtgctttgggcctgctctctcagccactccctgggccggcacgagctctctgccatcgtccccctcatcattcgcagcatccactgtgccccaatgctgtccgatattctgcgccgctggactctctcggcgcccggtctgggccccttaggggcacgccgggccgccaagccactgggtgccgaccgggcgccgctctgccagctcctggacgcggcagtcaccgcctacatcaccaccagccactcgcgcctcacgcacatcagcccgcggcactatggggatttcatcgaattcctgggcaaggcccgggagaccttcctgctggcgcccgacgggcacctccagttctcacagttcttggagaacctcaaacagacctacaagggcaagaagaaactcatgcttttggtgcgggagcgttttggttgagggacagtggggtgcgtgggagtggggatccccctcgcccctgcgtcccccacccttgctctccaattaggcccacgtggcatttcagtattattaagtcagggaaggagcccggctggagatgggggcagggggagcagcatcctgccacgtgtgtgcctgggagtctgtgagcaagtgtgcaagactccagaagcagaagccatactgccacccagaagcctggaaggggtgtgtgcttgggctgctggtatgaccccactttgggcaccccaaaagcaataggcaaactccccttacccagactggcttgggctccaggagggaggctgggaggcaggactttccagaaatcggccctctaagtcaatgtagcacattttcccccaaccccaccctgggtggccaagggtcctcccccaccccctactgctcagggccccccattatgccacctccaaagtggctgcccagccaggaccattggctcacccccactgaaggaattgaagaggcctcaggcctcagcctcatacctcacccccttatcctatccggccaggacccccatttccttgggcactagggtcccagggtgggctcagggttggggaagtcctcgctgccctctcttctcacctgctagtcactggacgtacaactcaggaactgagcgaggctcacactgccccttccaacctggggttgggggacacagacgcgagagagccggagacccccacccccgatctggaaaggaaagagacctgtatcttggtgtttttctggctttttcaccctttcgcctcctgtctttctgcttcgccccttcatcttactctgtttccatttttcccggcacttacctgcctttctctctgcacctaagtccctgccgccctctctctttggccatccttcctttcccccaccttgacccagggaggagaagggagaacatcacccccccaagtcacccccacatcttttcccttcttgtatattaaggacaaaataccacatcattttgtaactttttttctatttattgaacggtgtattacatgtccttttcctttttttttttcaaagattgaacagaaatttttctttttaattttattttgagactggggtgcatctccagagccactcacaccctcaacctcgtttcctccgcaaaaaaa

SEQ ID NO: 340945 - DNA, 1812 bp, Homo sapiens
gtgccgggttcgagtgaagtgactcggctgggctttgcaccgggtcttgctgtgtaccacaaacaccgcctgtctctgggatgacacggatgcgacagtttggctttgatcctaggattccacctgagcggaaacatccgcgagccagggagtcctggagagcccgagcgcctctaccatgtctccatcagctttgatcgctgcaagatcacgtccgtgagctgcggctgtgacaaccgcgacctcttcactcgaatgcccacgtggtggccctgtccctgtaccgcattcggcacgcccaccaggtggagctgcggctgcccatctccgagacgctctcccagatgaaccgggaccagctgcagaagttcgtgcagtacctcatcagcgcccatcacactgaggtgctgcccactgctcagcgcttggctgatgagatcctcctgctgggctccgagatcaacttggtgaatggtgccccagaccccaccgccggcgcaggaatcgaggacgccaactgctggcacctggacgaggagcagatccaggagcaggtgaagcagctactgtccaatggcggctactacggggccagccagcagctgcgctccatgttcagcaaggtgcgggagatgctgcgaatgcgggactccaacggggcgcgcatgctgattctcatgaccgagcagttcctgcaggacacgcgcctggccctgtggcggcagcagggcgcgggcatgacggacaagtgccggcagctctgggatgagctgggggccctgtgggtttgcgtcgtcctgagcccccactgcaaaccagaggaaagggcaggctggctccagctactcagcaggtgggacaagctcgacgtctgcccactggaagagggcaactactccttcgacggccccagcctgcagcccaccatggcccccgccccagagctgctccagaagggctccacctgcatcaccaacaccgaaggatgggtggggcaccccctggaccccattggctgcctctgcagggcgctcctggaggcctgtcgtctggaggaggagacacttaccctttacccagactcaggccccgagaagcggaaggtggcctaccagcacgtgcctgtgcccgggagccctggggagtcctacttggtgctggcgctggaggtggcactgctggggctggggcagcagcgggccctgccggaggggctgtacgcccaggacaaggtggtgcgcaacgaggagcagctgctggccctgctggaggaggtggagttggatgagcggttggtgcaggtgctgcgcaagcaggcggggctgctgctggaagggggtcccttcagtggctttggggaggtgctgttccgggagagcgtgcccatgcacacctgtgcccgctacctgttcaccgcactgctgcctcatgacccggacctggcctatcgcctcgcgctgcgagctatgaggctgcccatactggagacagcatttcctgctggagaacctcatcccagcccgctggactccatcatgagcaaccgcttcccccgctggttcatccttggccacctggagacccgccagtgtgaactggcttccaccatgttgacggccgccaagggagaccccaagtggctgcacacggtactgggctccatccagcagaacatccactctccggccctgctctttaagctggcgcaggacgcctgcaagacagccaccccggtcagcgccccaccagacaccacgctgctgggcatcgcactggagctggggctgcaggtgatgcggatgactctggatg

SEQ ID NO: 340946 - DNA, 309 bp, Homo sapiens
gtgaagaataataaaagattttatttttgaaacatcttgcatagttgccctggttggagtgcagcagcacgatcatagctccctgtagcctagaactcctggctcaagtgatcctctgcctcaatgtccagcatagctgagacaacagtttggaactatcacacctggctaaatgtttttaatgcttcaagttttttgtataaatggggtctcactatgttgacaaggctggtatcaaattcctggcctcaagcaattctatctcctcagccaatcaatatgccaggaatacaggcatgagacaccgtg

SEQ ID NO: 340947 - DNA, 2830 bp, Homo sapiens
  misc_feature (22)..(22): n is a, c, g, or t
tggtacggtcccaagcccttanatcgcgcggcttccacccacgcagtgttctaagtgaaggccagaaactcgctcgccatgtcggctgcagaggcggggggtgttttccacagagccaggggcaggaccctggccgcgtttcccgcagaaaaggaaagcgaatggaaaggcccattctacttcatcctgggcgcagacccacagtttgggctgatcaaggcctggtccactggggactgtgacaatggcggtgacgaatgggaacaggagatccgtctaactgagcaagccgtccaggccatcaacaagctgaaccccaaacccaaattcttcgttctgtgcggcgacctcatccacgccatgccagggaagccgtggcggacggagcagacggaggacctgaagcgagtgcttagggcagtggacagggccatcccactggtccttgtcagcggcaaccatgacattggcaacacccccacggccgagaccgtcgaggagttctgccggacttggggagatgactacttcagcttctgggtcgggggcgtcctgttcctggtcctcaactcccagttctacgagaacccctccaaatgccccagcctgaagcaggctcaggaccagtggctggacgagcagctgagcatcgcgaggcagcggcactgccagcatgccatcgtcttccagcacatcccgctgttcctggagagcatcgacgaggacgacgactactacttcaacctcagcaagtccactcggaagaagttggcagacaagttcatccacgcaggtgtcagagtcgtgttctcaggccactaccacaggaatgccgggggtacctaccagaacctcgacatggtggtgtcatctgccattggatgccagctgggcagagacccccacgggctccgagtcgtggtggtcaccgccgagaaaattgttcaccgatactacagtctagatgagctgagtgagaaaggaatagaagacgatctcatggatttgatcaagaaaaaatgacgctccttcccgttcccgttcacttttcacttgcactatttttttattttgccagaaacagcagctgcacacaacctcttgctgaaatataaaaatagcccaggcaggtttgtgaatttatgtccttttgcataaatcagagagctggggccctgtcctgaattatattcaaaatagaactgcatttcctttaaaatggagcgaatgatcctggaaatcagtttttaaaatattagactatctctgcatggatgtttgaataaattctcctaatgctgtgtttctcaactccacttttgaattggattgtattctggttagcatatggtcaaagtctgcctatcgacctcaattccaatctgacagccaagtatgatctttgataattccttaaacaaactacacctgattgtattaaattgtggtcacgattcccaaaacgctaggcaaaacaaagttcatctcctttcctttccagcggaacgaacagctgtctgccttgttgtgagagccatgcagacttattttgacaaggagccaagtaggcaccatttactgttcaattctgagacttctgatgataggaacagaatgcagttgatacagctcggagcttaaatttgccttcctgggtgcctagaaaagtcacctttgcacataaattggccatttctgaaaatctcctccaagagactgaaaccaaagctctaaaacgccgcttcttcagtctctggggagcacgttgagttggttcacatccacattctggctgtgtagccactccacagatgggtggtctcttgggatcagaatgcccctccactcatgagactcttcattttgtccactttgacaggaaaagtgggaatgtatgcagagctctcaaaagaaacaaaaaaggccaaaacggtgccttcagccacatcctctgaattggccctgacttggactaaatgcactaatgcaaaatcccttgacaaaagcgcataggttatttcaaaccagcattgttttttatgtaacctgttttaccgcatcttctcagcagcttctgaccactgctcaattttctcctttacagccattgttctggtggacaaataacctaggtactccaaatcctggcaggaaaaatatacagcattatgaaacagcactcagtaatcctaaaatgatttccaaagctggttacacatgacctgcaaagtctattaaattaaaagactttctcattacagagtttagtcaacgtagcaaaaccatgggaaattaaatggaaagataattaaatatgtaaattcataaggaacaaaagacgagaagttaattatacaataggctggtgacaccagagttcattgttatgtgccacaagaaaattaaattttttaaaaaactagaacgctcttcttttagtgttttgctgaaatcctgttttgtatttgtttctttacaacaggtgtaggtataggaggtcaagaaaaggagttcggtaaagggcatagctaataacaaccacacattgggccaggcgcagtggcttacgcctgtaatcccagcactttgggaggctgagacgggcagatcacctgagatcaggagtttgagaacagcctggccaacatggtgaaactccatctctactaaaaatacaaaaattagccaggcatgctggtgcacacctgtaatcccagctactcgggaggctgaggcaggagatcgctggaactcaggaggcagaggttgcagtgagccaagatcatgccactgcactccagcctgggcaacagagcaagactctgtctca

SEQ ID NO: 340948 - DNA, 2786 bp, Homo sapiens
ggtattacaggtgtgagccactgtacccagtccactaatatttaatctcaggattgacttcacaccatcactcagcaacatagggcagggggccatgtagtcatggaatttctaaggtatcctggggaaggatgggcagaggcccccgtcggacttgttggtttgcttttagcacgtgactgcattttgcagtttccatgtgctaggtggagtggatttccagattactctttttttaaattttatgttagtaagtacttaagttagttatttcaagtgaataagcccctggctttctcaggacgtgaccctcactcttccagggaagccgtggcggacggagcagacggaggacctgaagcgagtgcttagggcagtggacagggccatcccactggtccttgtcagcggcaaccatgacattggcaacacccccacggccgagaccgtcgaggagttctgccggacttggggagatgactacttcagcttctgggtcgggggcgtcctgttcctggtcctcaactcccagttctacgagaacccctccaaatgccccagcctgaagcaggctcaggaccagtggctggacgagcagctgagcatcgcgaggcagcggcactgccagcatgccatcgtcttccagcacatcccgctgttcctggagagcatcgacgaggacgacgactactacttcaacctcagcaagtccactcggaagaagttggcagacaagttcatccacgcaggtgtcagagtcgtgttctcaggccactaccacaggaatgccgggggtacctaccagaacctcgacatggtggtgtcatctgccattggatgccagctgggcagagacccccacgggctccgagtcgtggtggtcaccgccgagaaaattgttcaccgatactacagtctagatgagctgagtgagaaaggaatagaagacgatctcatggatttgatcaagaaaaaatgacgctccttcccgttcccgttcacttttcacttgcactatttttttattttgccagaaacagcagctgcacacaacctcttgctgaaatataaaaatagcccaggcaggtttgtgaatttatgtccttttgcataaatcagagagctggggccctgtcctgaattatattcaaaatagaactgcatttcctttaaaatggagcgaatgatcctggaaatcagtttttaaaatattagactatctctgcatggatgtttgaataaattctcctaatgctgtgtttctcaactccacttttgaattggattgtattctggttagcatatggtcaaagtctgcctatcgacctcaattccaatctgacagccaagtatgatctttgataattccttaaacaaactacacctgattgtattaaattgtggtcacgattcccaaaacgctaggcaaaacaaagttcatctcctttcctttccagcggaacgaacagctgtctgccttgttgtgagagccatgcagacttattttgacaaggagccaagtaggcaccatttactgttcaattctgagacttctgatgataggaacagaatgcagttgatacagctcggagcttaaatttgccttcctgggtgcctagaaaagtcacctttgcacataaattggccatttctgaaaatctcctccaagagactgaaaccaaagctctaaaacgccgcttcttcagtctctggggagcacgttgagttggttcacatccacattctggctgtgtagccactccacagatgggtggtctcttgggatcagaatgcccctccactcatgagactcttcattttgtccactttgacaggaaaagtgggaatgtatgcagagctctcaaaagaaacaaaaaaggccaaaacggtgccttcagccacatcctctgaattggccctgacttggactaaatgcactaatgcaaaatcccttgacaaaagcgcataggttatttcaaaccagcattgttttttatgtaacctgttttaccgcatcttctcagcagcttctgaccactgctcaattttctcctttacagccattgttctggtggacaaataacctaggtactccaaatcctggcaggaaaaatatacagcattatgaaacagcactcagtaatcctaaaatgatttccaaagctggttacacatgacctgcaaagtctattaaattaaaagactttctcattacagagtttagtcaacgtagcaaaaccatgggaaattaaatggaaagataattaaatatgtaaattcataaggaacaaaagacgagaagttaattatacaataggctggtgacaccagagttcattgttatgtgccacaagaaaattaaattttttaaaaaactagaacgctcttcttttagtgttttgctgaaatcctgttttgtatttgtttctttacaacaggtgtaggtataggaggtcaagaaaaggagttcggtaaagggcatagctaataacaaccacacattgggccaggcgcagtggcttacgcctgtaatcccagcactttgggaggctgagacgggcagatcacctgagatcaggagtttgagaacagcctggccaacatggtgaaactccatctctactaaaaatacaaaaattagccaggcatgctggtgcacacctgtaatcccagctactcgggaggctgaggcaggagatcgctggaactcaggaggcagaggttgcagtgagccaagatcatgccactgcactccagcctgggcaacagagcaagactctgtctca

SEQ ID NO: 340949 - DNA, 1899 bp, Homo sapiens
tggctagggtacgaggctggcgtaatcggcacgagggcccaaagcgggacaggtccagcggttgttctgtgtgaagtcgcgcggcttccacccacgcagtgttctaagtgaaggccagaaactcgctcgccatgtcggctgcagaggcggggggtgttttccacagagccaggggcaggaccctggccgcgtttcccgcagaaaaggaaagcgaatggaaaggcccattctacttcatcctgggcgcagacccacagtttgggctgatcaaggcctggtccactggggactgtgacaatggcggtgacgaatgggaacaggagatccgtctaactgagcaagccgtccaggccatcaacaagctgaaccccaaacccaaattcttcgttctgtgcggcgacctcatccacgccatgccagggaagccgtggcggacggagcagacggaggacctgaagcgagtgcttagggcagtggacagggccatcccactggtccttgtcagcggcaaccatgacattggcaacacccccacggccgagaccgtcgaggagttctgccggacttggggagatgactacttcagcttctgggtcgggggcgtcctgttcctggtcctcaactcccagttctacgagaacccctccaaatgccccagcctgaagcaggctcaggaccagtggctggacgagcagctgagcatcgcgaggcagcggcactgccagcatgccatcgtcttccagcacatcccgctgttcctggagagcatcgacgaggacgacgactactacttcaacctcagcaagtccactcggaagaagttggcagacaagttcatccacgcaggtgtcagagtcgtgttctcaggccactaccacaggaatgccgggggtacctaccagaacctcgacatggtggtgtcatctgccattggatgccagctgggcagagacccccacgggctccgagtcgtggtggtcaccgccgagaaaattgttcaccgatactacagtctagatgagctgagtgagaaaggaatagaagacgatctcatggatttgatcaagaaaaaatgacgctccttcccgttcccgttcacttttcacttgcactatttttttattttgccagaaacagcagctgcacacaacctcttgctgaaatataaaaatagcccaggcaggtttgtgaatttatgtccttttgcataaatcagagagctggggccctgtcctgaattatattcaaaatagaactgcatttcctttaaaatggagcgaatgatcctggaaatcagtttttaaaatattagactatctctgcatggatgtttgaataaattctcctaatgctgtgtttctcaactccaaaaaaaaaaaaaacgaaaaaaaaataaccaaaaaagggggggggggcggcaaaaaagttcccccagggggggcccaggtttagggtcacccggtttttcttgtccaacaaggggggggccccccataaaagagagagccgcgtataataaagcagcagagcgaaggaggccagcgagattatataaacaacgggcgcggagaacgggcgagaaaccaggttcccgatctcggtgcacaaaactcttgggtggaagaaaagaaaaaccccccctaaacttacggccggggggggggggggccaacacatatttgtggcggcacaaacatcaatcctctacacaaaggaatatattaaacacgcccaccagcgcggggaacaaaaatattacatacactgttcacgagggggtgaaatacgagtgtggtttgtaaaacacacatgacgagccacgaaatatgaccttgagccgggtttaaaaagatttgctccaacaaggagagacttatatcttgggacaatatttttacc

SEQ ID NO: 340950 - DNA, 696 bp, Homo sapiens
tggctagggtacgaggctggcgtaatcggcacgagggcccaaagcgggacaggtccagcggttgttctgtgtgaagtcgcgcggcttccacccacgcagtgttctaagtgaaggccagaaactcgctcgccatgtcggctgcagaggcggggggtgttttccacagagccaggggcaggaccctggccgcgtttcccgcagaaaaggaaagcgaatggaaaggcccattctacttcatcctgggcgcagacccacagtttgggctgatcaaggcctggtccactggggactgtgacaatggcggtgacgaatgggaacaggagatccgtctaactgagcaagccgtccaggccatcaacaagctgaaccccaaacccaaattcttcgttctgtgcggcgacctcatccacgccatgccagggaagccgtggcggacggagcagacggaggacctgaagcgagtgcttagggcagtggaccgtagggcgcacggtccactgcagagcaggtgaagggcgtacaggtaccatcgtcgtaatcgatgccatgctggaccatgaagcactacagaacaggaaggtaggacgtgtactaggctgatgtgagccggatccgggcacagcgaggtccagatggtgcaaaccgatatgcagatgtcttcatataccaaacgctttatggagcatgatctctatg

SEQ ID NO: 340951 - DNA, 2883 bp, Homo sapiens
tggctagggtacgaggctggcgtaatcggcacgagggcccaaagcgggacaggtccagcggttgttctgtgtgaagtcgcgcggcttccacccacgcagtgttctaagtgaaggccagaaactcgctcgccatgtcggctgcagaggcggggggtgttttccacagagccaggggcaggaccctggccgcgtttcccgcagaaaaggaaagcgaatggaaaggcccattctacttcatcctgggcgcagacccacagtttgggctgatcaaggcctggtccactggggactgtgacaatggcggtgacgaatgggaacaggagatccgtctaactgagcaagccgtccaggccatcaacaagctgaaccccaaacccaaattcttcgttctgtgcggcgacctcatccacgccatgccagggaagccgtggcggacggagcagacggaggacctgaagcgagtgcttagggcagtggacagggccatcccactggtccttgtcagcggcaaccatgacattggcaacacccccacggccgagaccgtcgaggagttctgccggacttggggagatgactacttcagcttctgggtcgggggcgtcctgttcctggtcctcaactcccagttctacgagaacccctccaaatgccccagcctgaagcaggctcaggaccagtggctggacgagcagctgagcatcgcgaggcagcggcactgccagcatgccatcgtcttccagcacatcccgctgttcctggagagcatcgacgaggacgacgactactacttcaacctcagcaagtccactcggaagaagttggcagacaagttcatccacgcaggtgtcagagtcgtgttctcaggccactaccacaggaatgccgggggtacctaccagaacctcgacatggtggtgtcatctgccattggatgccagctgggcagagacccccacgggctccgagtcgtggtggtcaccgccgagaaaattgttcaccgatactacagtctagatgagctgagtgagaaaggaatagaagacgatctcatggatttgatcaagaaaaaatgacgctccttcccgttcccgttcacttttcacttgcactatttttttattttgccagaaacagcagctgcacacaacctcttgctgaaatataaaaatagcccaggcaggtttgtgaatttatgtccttttgcataaatcagagagctggggccctgtcctgaattatattcaaaatagaactgcatttcctttaaaatggagcgaatgatcctggaaatcagtttttaaaatattagactatctctgcatggatgtttgaataaattctcctaatgctgtgtttctcaactccacttttgaattggattgtattctggttagcatatggtcaaagtctgcctatcgacctcaattccaatctgacagccaagtatgatctttgataattccttaaacaaactacacctgattgtattaaattgtggtcacgattcccaaaacgctaggcaaaacaaagttcatctcctttcctttccagcggaacgaacagctgtctgccttgttgtgagagccatgcagacttattttgacaaggagccaagtaggcaccatttactgttcaattctgagacttctgatgataggaacagaatgcagttgatacagctcggagcttaaatttgccttcctgggtgcctagaaaagtcacctttgcacataaattggccatttctgaaaatctcctccaagagactgaaaccaaagctctaaaacgccgcttcttcagtctctggggagcacgttgagttggttcacatccacattctggctgtgtagccactccacagatgggtggtctcttgggatcagaatgcccctccactcatgagactcttcattttgtccactttgacaggaaaagtgggaatgtatgcagagctctcaaaagaaacaaaaaaggccaaaacggtgccttcagccacatcctctgaattggccctgacttggactaaatgcactaatgcaaaatcccttgacaaaagcgcataggttatttcaaaccagcattgttttttatgtaacctgttttaccgcatcttctcagcagcttctgaccactgctcaattttctcctttacagccattgttctggtggacaaataacctaggtactccaaatcctggcaggaaaaatatacagcattatgaaacagcactcagtaatcctaaaatgatttccaaagctggttacacatgacctgcaaagtctattaaattaaaagactttctcattacagagtttagtcaacgtagcaaaaccatgggaaattaaatggaaagataattaaatatgtaaattcataaggaacaaaagacgagaagttaattatacaataggctggtgacaccagagttcattgttatgtgccacaagaaaattaaattttttaaaaaactagaacgctcttcttttagtgttttgctgaaatcctgttttgtatttgtttctttacaacaggtgtaggtataggaggtcaagaaaaggagttcggtaaagggcatagctaataacaaccacacattgggccaggcgcagtggcttacgcctgtaatcccagcactttgggaggctgagacgggcagatcacctgagatcaggagtttgagaacagcctggccaacatggtgaaactccatctctactaaaaatacaaaaattagccaggcatgctggtgcacacctgtaatcccagctactcgggaggctgaggcaggagatcgctggaactcaggaggcagaggttgcagtgagccaagatcatgccactgcactccagcctgggcaacagagcaagactctgtctca

SEQ ID NO: 340952 - DNA, 3021 bp, Homo sapiens
ccttacctttgacatgacgtatgctaagggattaagaagaagagctaactgtcctcaaatatatatgcacccaattacaggagcagccagattcataaagcaagttcttagagacctacgaagagacactttcacacaataatagtgggagactttaacaccctactgtcaatattagacagatcaatgagacagaaaattaataaggatattcaggacttgaactcagctctgcaccaagcagacctaatagacatctatggaactcttcaccccaaatcaacaggattgacttcacaccatcactcagcaacatagggcagggggccatgtagtcatggaatttctaaggtatcctggggaaggatgggcagaggcccccgtcggacttgttggtttgcttttagcacgtgactgcattttgcagtttccatgtgctaggtggagtggatttccagattactctttttttaaattttatgttagtaagtacttaagttagttatttcaagtgaataagcccctggctttctcaggacgtgaccctcactcttccagggaagccgtggcggacggagcagacggaggacctgaagcgagtgcttagggcagtggacagggccatcccactggtccttgtcagcggcaaccatgacattggcaacacccccacggccgagaccgtcgaggagttctgccggacttggggagatgactacttcagcttctgggtcgggggcgtcctgttcctggtcctcaactcccagttctacgagaacccctccaaatgccccagcctgaagcaggctcaggaccagtggctggacgagcagctgagcatcgcgaggcagcggcactgccagcatgccatcgtcttccagcacatcccgctgttcctggagagcatcgacgaggacgacgactactacttcaacctcagcaagtccactcggaagaagttggcagacaagttcatccacgcaggtgtcagagtcgtgttctcaggccactaccacaggaatgccgggggtacctaccagaacctcgacatggtggtgtcatctgccattggatgccagctgggcagagacccccacgggctccgagtcgtggtggtcaccgccgagaaaattgttcaccgatactacagtctagatgagctgagtgagaaaggaatagaagacgatctcatggatttgatcaagaaaaaatgacgctccttcccgttcccgttcacttttcacttgcactatttttttattttgccagaaacagcagctgcacacaacctcttgctgaaatataaaaatagcccaggcaggtttgtgaatttatgtccttttgcataaatcagagagctggggccctgtcctgaattatattcaaaatagaactgcatttcctttaaaatggagcgaatgatcctggaaatcagtttttaaaatattagactatctctgcatggatgtttgaataaattctcctaatgctgtgtttctcaactccacttttgaattggattgtattctggttagcatatggtcaaagtctgcctatcgacctcaattccaatctgacagccaagtatgatctttgataattccttaaacaaactacacctgattgtattaaattgtggtcacgattcccaaaacgctaggcaaaacaaagttcatctcctttcctttccagcggaacgaacagctgtctgccttgttgtgagagccatgcagacttattttgacaaggagccaagtaggcaccatttactgttcaattctgagacttctgatgataggaacagaatgcagttgatacagctcggagcttaaatttgccttcctgggtgcctagaaaagtcacctttgcacataaattggccatttctgaaaatctcctccaagagactgaaaccaaagctctaaaacgccgcttcttcagtctctggggagcacgttgagttggttcacatccacattctggctgtgtagccactccacagatgggtggtctcttgggatcagaatgcccctccactcatgagactcttcattttgtccactttgacaggaaaagtgggaatgtatgcagagctctcaaaagaaacaaaaaaggccaaaacggtgccttcagccacatcctctgaattggccctgacttggactaaatgcactaatgcaaaatcccttgacaaaagcgcataggttatttcaaaccagcattgttttttatgtaacctgttttaccgcatcttctcagcagcttctgaccactgctcaattttctcctttacagccattgttctggtggacaaataacctaggtactccaaatcctggcaggaaaaatatacagcattatgaaacagcactcagtaatcctaaaatgatttccaaagctggttacacatgacctgcaaagtctattaaattaaaagactttctcattacagagtttagtcaacgtagcaaaaccatgggaaattaaatggaaagataattaaatatgtaaattcataaggaacaaaagacgagaagttaattatacaataggctggtgacaccagagttcattgttatgtgccacaagaaaattaaattttttaaaaaactagaacgctcttcttttagtgttttgctgaaatcctgttttgtatttgtttctttacaacaggtgtaggtataggaggtcaagaaaaggagttcggtaaagggcatagctaataacaaccacacattgggccaggcgcagtggcttacgcctgtaatcccagcactttgggaggctgagacgggcagatcacctgagatcaggagtttgagaacagcctggccaacatggtgaaactccatctctactaaaaatacaaaaattagccaggcatgctggtgcacacctgtaatcccagctactcgggaggctgaggcaggagatcgctggaactcaggaggcagaggttgcagtgagccaagatcatgccactgcactccagcctgggcaacagagcaagactctgtctca

SEQ ID NO: 340953 - DNA, 2457 bp, Homo sapiens
tggctagggtacgaggctggcgtaatcggcacgagggcccaaagcgggacaggtccagcggttgttctgtgtgaagtcgcgcggcttccacccacgcagtgttctaagtgaaggccagaaactcgctcgccatgtcggctgcagaggcggggggtgttttccacagagccaggggcaggaccctggccgcgtttcccgcagaaaaggaaagcgaatggaaaggcccattctacttcatcctgggcgcagacccacagtttgggctgatcaaggcctggtccactggggactgtgacaatggcggtgacgaatgggaacaggagatccgtctaactgagcaagccgtccaggccatcaacaagctgaaccccaaacccaaattcttcgttctgtgcggcgacctcatccacgccatgccaggtgtcagagtcgtgttctcaggccactaccacaggaatgccgggggtacctaccagaacctcgacatggtggtgtcatctgccattggatgccagctgggcagagacccccacgggctccgagtcgtggtggtcaccgccgagaaaattgttcaccgatactacagtctagatgagctgagtgagaaaggaatagaagacgatctcatggatttgatcaagaaaaaatgacgctccttcccgttcccgttcacttttcacttgcactatttttttattttgccagaaacagcagctgcacacaacctcttgctgaaatataaaaatagcccaggcaggtttgtgaatttatgtccttttgcataaatcagagagctggggccctgtcctgaattatattcaaaatagaactgcatttcctttaaaatggagcgaatgatcctggaaatcagtttttaaaatattagactatctctgcatggatgtttgaataaattctcctaatgctgtgtttctcaactccacttttgaattggattgtattctggttagcatatggtcaaagtctgcctatcgacctcaattccaatctgacagccaagtatgatctttgataattccttaaacaaactacacctgattgtattaaattgtggtcacgattcccaaaacgctaggcaaaacaaagttcatctcctttcctttccagcggaacgaacagctgtctgccttgttgtgagagccatgcagacttattttgacaaggagccaagtaggcaccatttactgttcaattctgagacttctgatgataggaacagaatgcagttgatacagctcggagcttaaatttgccttcctgggtgcctagaaaagtcacctttgcacataaattggccatttctgaaaatctcctccaagagactgaaaccaaagctctaaaacgccgcttcttcagtctctggggagcacgttgagttggttcacatccacattctggctgtgtagccactccacagatgggtggtctcttgggatcagaatgcccctccactcatgagactcttcattttgtccactttgacaggaaaagtgggaatgtatgcagagctctcaaaagaaacaaaaaaggccaaaacggtgccttcagccacatcctctgaattggccctgacttggactaaatgcactaatgcaaaatcccttgacaaaagcgcataggttatttcaaaccagcattgttttttatgtaacctgttttaccgcatcttctcagcagcttctgaccactgctcaattttctcctttacagccattgttctggtggacaaataacctaggtactccaaatcctggcaggaaaaatatacagcattatgaaacagcactcagtaatcctaaaatgatttccaaagctggttacacatgacctgcaaagtctattaaattaaaagactttctcattacagagtttagtcaacgtagcaaaaccatgggaaattaaatggaaagataattaaatatgtaaattcataaggaacaaaagacgagaagttaattatacaataggctggtgacaccagagttcattgttatgtgccacaagaaaattaaattttttaaaaaactagaacgctcttcttttagtgttttgctgaaatcctgttttgtatttgtttctttacaacaggtgtaggtataggaggtcaagaaaaggagttcggtaaagggcatagctaataacaaccacacattgggccaggcgcagtggcttacgcctgtaatcccagcactttgggaggctgagacgggcagatcacctgagatcaggagtttgagaacagcctggccaacatggtgaaactccatctctactaaaaatacaaaaattagccaggcatgctggtgcacacctgtaatcccagctactcgggaggctgaggcaggagatcgctggaactcaggaggcagaggttgcagtgagccaagatcatgccactgcactccagcctgggcaacagagcaagactctgtctca

SEQ ID NO: 340954 - DNA, 889 bp, Homo sapiens
tggctagggtacgaggctggcgtaatcggcacgagggcccaaagcgggacaggtccagcggttgttctgtgtgaagtcgcgcggcttccacccacgcagtgttctaagtgaaggccagaaactcgctcgccatgtcggctgcagaggcggggggtgttttccacagagccaggggcaggaccctggccgcgtttcccgcagaaaaggaaagcgaatggaaaggcccattctacttcatcctgggcgcagacccacagtttgggctgatcaaggcctggtccactggggactgtgacaatggcggtgacgaatgggaacaggagatccgtctaactgagcaagccgtccaggccatcaacaagctgaaccccaaacccaaattcttcgttctgtgcggcgacctcatccacgccatgccagggaagccgtggcggacggagcagacggaggacctgaagcgagtgcttagggcagtggacagggccatcccactggtccttgtcagcggcaaccatgacattggcaacacccccacggccgagaccgtcgaggagttctgccggacttggggagatgactacttcagcttctgggtcgggggcgtcctgttcctggtcctcaactcccagttctacgagaacccctccaaatgccccagcctgaagcaggctcaggaccagtggctggacgagcagctgagcatcgcgaggcagcggcactgccagcatgccatcgtcttccagcacatcccgctgttcctggagagcatcgacgaggacgacgactactacttcaacctcagcaagtccactcggaagaagttggcagacaagttcatccacgcaggagtggacttgctgaggttgaggtagtagtcgtcgcaacacaa

SEQ ID NO: 340955 - DNA, 573 bp, Homo sapiens
tggctagggtacgaggctggcgtaatcggcacgagggcccaaagcgggacaggtccagcggttgttctgtgtgaagtcgcgcggcttccacccacgcagtgttctaagtgaaggccagaaactcgctcgccatgtcggctgcagaggcggggggtgttttccacagagccaggggcaggaccctggccgcgtttcccgcagaaaaggaaagcgaatggaaaggcccattctacttcatcctgggcgcagacccacagtttgggctgatcaaggcctggtccactggggactgtgacaatggcggtgacgaatgggaacaggagatccgtctaactgagcaagccgtccaggccatcaacaagctgaaccccaaacccaaattcttcgttctgtgcggcgacctcatccacgccatgccaggtaagactcgggtcatcgcttgtgaccttttctccttcagccggtcatgactgcatttgggcaggagaaaaaaagattttgcttcgaaggcatctttgctcagtcatggaccgttctttcgcttcatgattgttgcagtatcattgaacatca

SEQ ID NO: 340956 - DNA, 452 bp, Homo sapiens
cgcagtggctcacgcctgtaatcctagcactttgggaggccgaggcgggcagatcacctgagggtgggagtttgagaccagcctgaccaacatggtgaaaccccatctctactaaagatacaaaattagccgagcatggtggcgcacgcctgtaatctcagctacttgggaggctgaggcaggagaatcacttgaactccagcctgggcaacaagagcaaaactccgtctcaaaaaaataaataaattcaatctcaatcacagcaacatctagactggtatttgaccaaatatctgggttgtgtggcctagccacaatgacacataaaattaaccagcacagataacaagatcacactacttcatggtgtatttacttgttcccctggacagagcctagggacatgtgccttatatggctgttgtgcaagttttgctactgggactttggtt

SEQ ID NO: 340957 - DNA, 456 bp, Homo sapiens
tgtgtgagaactgcaggtatagcacctaggaggtcatcttagaaatctactggagcaagagaaagaacagagaaaaggggaagtccccattaccctccgagcaaagaagcttccttgctactgaatgtggctagagctgtaccccacccactctgtctgcactactgtgcagttgttccaaggtggttgtctgatttgactgtgaagagcctggatagttaacatgtgttgggtctgggtggtgatacatcagtgtgtgttatctcactctatatagccttactttggaagtatttcatggtgataatagacaaagctagtgggttttgtgtgaagagagtctgttcataggaaaacatgatctgttcatcagtctagcttggcagctagctaaataaaccacgtgtaactcaatggctcatagagctttattattaccatagagatttatgttac

SEQ ID NO: 340958 - DNA, 660 bp, Homo sapiens
agctttctaaacaacttagttgcacatcctactttagagaaaagacaagtgttaagtgatggtgacttgaaaactgtaaagtttattgtttggaaaaccgcatgagaaaaatggccagaacatatttgtgctaaaaagagttaacatagcaggccttaagactgctatccttagaaaggactgcttgcaatgttggtgcttgtttggcatctgggaacttagatttttgggtttgtgctgaacagtatgttttatgccgaaattaccagcttctgtaaaaatccgggacaccaagtctttaatgggcttccctgcgcggaaactgctgcattttcactgatggaggaaggatgtgttttgtttgacccctcttgggagggagaccgcataaggagcctacacgtgattcctccagactccgcttgtgtctttttctattatgatgagcctttatatccatactgcattgtgtaataaatgtcagccatgaattcaactatatgttgagtcccgtgcatcctatcaaagctctaaatgtgggggagatcacggagatcctcagccacagttttgtaaatttgtataaaggtaagggatataagtgccgtttttttacgaggatatatttcctagtggtactgggcttttagtgtaaccatc

SEQ ID NO: 340959 - DNA, 986 bp, Homo sapiens
gagcgagcccgagcaggcagacgcgcggccggcggtctgggggcgcgccgcctcccggtccccaaaatgtgaagcggggagggcggagacgcagagacggcccggccgggcgccctcgccgccctccggcagccgcgccgctccctccgctgcacgcccaggcctgagcagcgaggccaccgggccgcgcgctcccagcttcgctcggacgcggcttcggcccgcagagggttcgtggcccggacgcggcgagagctgggcccaggacggtgcgtccggcctcgcccgcggctgctcgcaccaacaagtttgaacaatgatcaccgtcaaccccgatgggaagataatggtcagaagatgcctggtcaccctgagaccctttcggctttttgtcctgggcatcggcttcttcactctctgcttcctgatgacgtctctgggaggccagttctcggcccggcgcctgggggactcgccattcaccatccgcacagaagtgatggggggccccgagtcccgcggcgtcctgcgcaagatgagcgacctgctggagctgatggtgaagcgcatggacgcactggccaggctggagaacagcagtgagctgcaccgggccggcggcgacctgcactttcccgcagacaggatgccccctggggccggcctcatggagcggatccaggctattgcccagaacgtctccgacatcgctgtgaaggtggaccagatcctgcgccacagtctgctcctgcacagcaaggtgtcagaaggccggcgggaccagtgtgaggcacccagtgaccccaagttccctgactgctcagggaaggtggcagtggatgcgtgcccgctggacctctgacccctgctacgccttctttggggtggacggcaccgagtgctccttcctcatcttacctcagtgaggtcgagtggttctgccccccgctgccctggaggaaccagacggctgccagagggcaccc

SEQ ID NO: 340960 - DNA, 370 bp, Homo sapiens
cctctggagtaaaaccagctttttgaatctgataataaaacaaaagctgttttttcctgctctctactaatagaaagtctttattaactttaccttactggttttgttagtacagtgactagtgactggtagtaaatgataacctagtggtaatgggagatcctgaagtctcctgaatcatcaatgacaggtcacattgggttcagtgcagctttagccttttgagtatgttttattgtaaggagttccaaacgccagccactccttgaaagatgaggtacctggtgatttgctgctgagtcactgaccgagatattctttaaaaatgcagatttcccagccccacttcctggagattttgactgagtgg

SEQ ID NO: 340961 - DNA, 291 bp, Homo sapiens
ctgggaaaaatacacatgcaggagtgttgtcgaaaacaatacctaactggacagcaaacagggaaggccaacattatacctagattgagataatggctgggggcagtgtcaaaggggacgcgactggttccaaagctcgagaagaccatggggtcacttgggctacatgagaaaacgccccagtgtgctggttcatcattccgactcctgcctgtctcttcccgtccaaggaacatggaccctaagtcgtgcaggtgcggatgaccatgggcagaattaggggccgtggca

SEQ ID NO: 340962 - DNA, 335 bp, Homo sapiens
tccactggcagaggtagggaaggaaagtgctggcccataaaatgtttagattagttgcatttgctaatcagtctgatcttcccatgccaggccctaaaggagccacagtctgaattctttttcttgaactcttgtctgaaatgaaacacagtatcttcagacaaattagagcattctgaaaacacctttggacacagtagtcctagctttcttcctcttctctaaagtactcaaggttaggaagccagaagtttgccactcagggaaagaagtagcctttgtttgaccctctatgctcacagcagaactggtagatctggatagaggtagcaagt

SEQ ID NO: 340963 - DNA, 246 bp, Homo sapiens
tagatgcccctcctcctcctgtaaagggaagtgggattctcatggcaatgggtctttgtctcatggtcttttccttgtggctccctatatcctgcaggacagccccaggttcctgtcccactctgccatgactttgggtgaggcccctcctttcttgccacctcagtttgcagacccagagtatgggagcagattgccaaggaagttgtcagctctaactgccaccctagctgtttgaatgtccct

SEQ ID NO: 340964 - DNA, 771 bp, Homo sapiens
ctcatgattcagagtgagataaaggcaaggagtcattggcaacagaagccagaaagctttcccctgaggctctctctgaggatcttggatttgcttctggaagcttagctctggagaagagcagcattcaggacaagcgaacaggtctggaacttgcttgggctagtcgcttcacttgagtgctttagtttcctcatctgtaaaatgggttaatcacagtaagtaacatataaagtggtgagaattaaagcattactatgtggaaagcatatagatcaatgtttattgaataatgtgtgtatatactctgtgttttcatttaattttctgccgtgtgtactttcctgtcattaaaatagtctttagaaacacggttttagggactgtacaaagtctttgcttcctgaattttgaacttggagaacagaagataaggaagggccaagtgagaaagagaagatgaaacaaaatacctgatgcttcttgtttgttgtaggaaataatgaggaaagaaaatagtcctcagactcacagcaggaaacagaggactagaccatgaccttgagatccaggcagccagctgactgaggggtgtgtgcactcaggtgtatgccacacaccctccacatacacacacatgtgttctttgtcttagggaggaacaaggaacatttttgtcttggcattggattaagtttctatttctcaaaaatcatttcataaatataaaaacaccaaagctacagattgttgcctgttgctgcagttgat

SEQ ID NO: 340965 - DNA, 192 bp, Homo sapiens
cactcttctgattttcctagtagttgcttctttacatttctttatagttccttcaccccatcatacatttctagacactaaataatttggttttggtaatgtttttagactgtgtcttttaagtctcctaatctgtaggtatcactccagctatttaatgttgtttctcagtctgcgctctgctggtgtaat

SEQ ID NO: 340966 - DNA, 351 bp, Homo sapiens
gaggcagaggttgcggtgagctgagatcgtgccactgtactccagcctgggtgacagagcgagactgactcaaaaaaacataaaaaatttggagagtagaagaaaaaaaagtttctcatggtgggtatctaaagtaatcactacacattttgctctgtgtcttttagctttgtttcctccttaagcttaggttttaaaaatatgtagttataattgtataaataattcaaatattgattttttaaacttatgctaacatggatataatttcctgtgattagtatttatacagtaattaaaaatgcttgcataatagtacatcaaggtgatttttcacctttgtttatttaa

SEQ ID NO: 340967 - DNA, 477 bp, Homo sapiens
ggctataggtatggttgggaggagtggggcaggcaattaccatcatgcattataagcatatttgtttctttgagttttttaaactttttttttcttatagagacagggtcttgctatgtctcccaagctggtctcaaactcctgagctcaagtgatcctactgcctcgtactcccaaaatgctgggattacacgtgtgagccaccgcccacacttagcctaaactttgataaaaaataaataaatatgagtagaacactactcatcatgtcctgttctggggacatgccacttagcttttccaaggctctggggccacccaaactcctccctgcaagtcaggtcagctggaaattgtgctttgttgtgtggttctcattcagagagcttagccagggttggtttgagactggtccatcagctccttccttcagctgttttttttttttttctgagtcagagacttaaatgagtcttt

SEQ ID NO: 340968 - DNA, 281 bp, Homo sapiens
cacagggctgtccctctgtgtgtgtgtctgtcctcatctgctcttcttacaaggacaccggtccaatcagggcccaccctagcgacctcattttaccctaatcacctctgtgaggacctcatctccaacgcagtccccttctgcagtgctgggggttggggctttgacaggtgaatccgggggaggcacgcccacctgaacgctcagcccataacaagtgcagtctctcttttcctcgctgtctttctgcaatacatacgaatgacttatgtaacgctgaa

SEQ ID NO: 340969 - DNA, 954 bp, Homo sapiens
  misc_feature (4)..(5): n is a, c, g, or t
cctnncccaagtagctgggaccacaggcacgtcccaccacgcccggctaattttttgtatttttagtagagatgggatttcaccgtgttagccagcatggtctctatctcttgaccttgtgatctgcccacctcggcctcccaaagtgctgggactactggcgtgagccatcgcgcccggcccattctttaagctccacctaaaacatcacatcacttgtgaaccaatgtaatgtcaacagccctgtgtgcatatctgttataacaccccactgagttctgtgacacatcatgtgctcatctccctgggtccctcggaggccccatgctaaaggctacgcctgctgatccatgtgtcccacctcatgatgggcccagcgagcacatgggggcatctaggaagtgctgacggggtgaggaagcatgtgaacacatacctgtgtgcctgctctcactgagtcacagagatgtgcacatgaaagcacttccaattcattagcactgccatatcttcaaatgcagcttaaacagcaaagtatatttgtttcacaagaaaaaaaatttctgatgttcttaggaactttacaacacaaatatatactaaatttctgcttacttttgggactatgagtatttagatttaaggggtgtcgaggtatttcttttttgagacggagtttcactcttgtcgcccacgctggagtgcaatggcacgatctcggctcactgcaacctccacctcccgggttcaagcaaatcccctgccttagcctcccgagtagctgtgactacaggtacctgccaccacacctggccaatttttgtatttttagtaaagacagcgtttcaccatgctggccaggctggtctcgaactcctgacctcaggtgatccacctgacttggcctcccaaagtggctgggattacaggtgtgggccaccgcgcccggccagg

SEQ ID NO: 340970 - DNA, 622 bp, Homo sapiens
gcaatacaacaggctgaagatggactcaaagaatttgatgcaggaatcattgaattaaagaggcgtggtgacaagctacaggtcgagcagccgtccatgcaagaactctccaagctccaggacatgtatgatgagctgatgatgatcattggctcccggaggagtggtctgaatcagaaccttacactcaagagtcagtatgagagggccctacaagatctggctgacctgctagaaactggtcaggagaagatggcaggagaccagaaaatcatcgtgtcttccaaagaggaaatccagcaactacttgacaaacataaggaatactttcagggcctggaatctcatatgatcttgactgaaacactcttcagaaagataatcagctttgcagtccaaaaggaaacccagttccatacagagctgatggctcaggcttctgctgtactgaaacgggctcacaagaggggtgtggagctggagtacattctagagacgtggtcccatctggatgaggaccagcaggagctcagcagacagctggaggtggtggaaagcagcatcccaagcgtgggtctggtggaggagaacgaggacaggcttattgaccgcataacactct

SEQ ID NO: 340971 - DNA, 131 bp, Homo sapiens
ccccctcccagacacagtgagcccccacaggaaggtagacaccttcctcatcccttctccactcttactaaagaatggtttggtcacctttgctctgctgagacctgcccagaggggttaagtatcttcaa

SEQ ID NO: 340972 - DNA, 116 bp, Homo sapiens
ctgagtgttaatttttcttcttttctctaattcccattttccccctcatgtctttctctataatgtaaaaaacaaaaacaccaccaaaacccctcctgtaacattttttttttttt

SEQ ID NO: 340973 - DNA, 418 bp, Homo sapiens
cacaacattcacacctcaaggaatgtattatacagttggtgacttagattatacaaacataaaatgatttggggtaattaaatcctaaggttgatagtgctctttataagtaaaataagagctcagagaagtgaaaagtaagggtggaatgaagtttccgagaggaaatatgtggcagagatggaccagctgttcatcaaacctgtttcttcttcttcctgggcaaacacctagaccaccttcccagcaatcccccttgcagtcagatgtggccaccttaccaagttctagctaatggaaagggaaaaaaaaacaaattgagccacatctgggcctagccaataaaaaccagccactcatgagcctccacatgcttttccttttttgctattatgatccaaataagcactgtgacctt

SEQ ID NO: 340974 - DNA, 477 bp, Homo sapiens
cagtgcatccatcagggtcagctgatgcccgtaggatctgaagttagtgatcatttttaggtcctcactctttcagagagcaggtcctgtgccacacaagaggaggcatgagggtcacaggcatgggaacatattatgagcctatgaagccccctgacccccctgccaaccccactgcagcaaagcccttcgctcgccctccccactcccttggtccttgctcatacacctattttggtgacacccatgctggctgccttgcacctgcggagggcccggctcacctccagcgtatgcattccttctcttcgttgtctattttagcttcctatttccaggatatagcggagcatttgactcctcacaaacattcagaatcattactcaatgaatggatggatgaatgagcaatgttgaaggaaaaaaggtggggggcattgggttaagagacaaaagatattcaaactagtcctaatt

SEQ ID NO: 340975 - DNA, 577 bp, Homo sapiens
aggcaaagtgggactgacccgccatccttctgcgcagctcctgggtgactactgaagctgatgtctacttagtagaggtctgggagattgtatggggcctggctgggacttctggtcagcgagcagacctttgaagaattggcttcttcaaacctgtggcccattcccaacagtgaggctgctgggagctggctacgtgctgtgggtccaggcagttcaagaggccttcctagaatatatgagaactctgcaaattttccttcagcctggggagcggtgagaaaggatgaagtgtaacagggccctgaaacctcatcccaactcgctattaagcaagggtgctcttttctaatctaatagagtaaaactgagaaaggggtcttctctacttcccaattccagggccttcctgcattcgctggtgatgatggagtagggtgaccttaggaggtgtgacttgggccctacaggctgtctgggaaagtcagagcttccctccatactcctcccagaacactgagtgggtggctgtgttgtgagagtcccttgagagcccagaggcagaaacgaactcttt

SEQ ID NO: 340976 - DNA, 504 bp, Homo sapiens
gcatcatctcagtcaattaaaaagaatgatccagatatacatcatccagcattattaagaagccaacacatctaggctctaggtcagacatgtcttagcagccaatattgtatcagacaaaccaccatttcacatacatccatttgcacatttaaaaatgagagcacagttaacatcatgctggattgttaccacagtcccatatctacctttcagagaatcaaacagtatgacacacataaaattcctttgtaaatcagctctattaagagtgaactaacttacttctaactgggaaaaagagcttgcagtatggacacaagaaaccaggcaggaaagaaagggaggtgggggtaggatcttgcaatgaagaacaaacccagctatgttcagcttgctatgccacttctatgggccacaggaaagtttcacaataagagataaataaacaattcaattttttccactttatagcacaactgaaagcaaaaccaatacagccct

SEQ ID NO: 340977 - DNA, 500 bp, Homo sapiens
tacagattcttatttttctctctctaaaagatgtgtacccctgaatatttctctgacatctcaaatttaaaatatctgaatctaacccattatcttttctaccatctcccgagtctgttcttcctcctgtgttggttctcaaggttaatacctccatgactcacgctgtcacctgtcatggaaggctcagagtcacctgtgattactccgttttcctcatcactcacatggagtccatgaccaaatcctcagagttctgcttgtgaagtgagtttcccatctttcccagccttatctctaccctaaccactgtgttaattcattcctcttcagctctttcccaggccatttgaataacattctagttatcatttgatctgaagtctctgtcctgctccctcaattctacttcaattaacttcccacttctattgccagagttaaatatatttctgacaacattatttccatccttaaaacattgaatggttcccaattac

SEQ ID NO: 340978 - DNA, 236 bp, Homo sapiens
tcagtgttgctgaactgaaatccaggtgtctgcagggtcgtgcttccccacaggctctgggagaaaacccatttcttgcctcttccagccagtggtggtttctggaattccttggcatgtggctacatcactccaatctctgcttccccttttgacgttgccttctttttttttaagacggagtctcgctctgttgaccaggctggagtacgtgatctcggttcactgcaacctct

SEQ ID NO: 340979 - DNA, 416 bp, Homo sapiens
ctctgcctcccaggttcacgccattctcctgtctcagcctcccgagtagctaggactacagacgcccgccacaacgcccggctaattttttttgtatttttagtagagacggggtttcatcatgttagccaggatggtctcgatctcctgaccttgtgatccacccacctcggcctcccaaagtgctgggattacaggagtgagccaccgcgcccggcccctccatgatctcatgcctacagcctggcctcctgccttgctgaccgcacctgccggctccctccaccaagttcattccaccaaagagtggaaggacacagctgctgtgtcctctgcctgggactctcttccttccctgagtcacctggttcagccagttcatttaggcctatgcccagatgtcaccttttcaggtg

SEQ ID NO: 340980 - DNA, 366 bp, Homo sapiens
tttcataaagatagggtgaaaaaaagaaggaagaaataatcaaaggtacaatggaagaaaagtaccttaagctaaataaaggcagttgtttccagattgtacagaatcatcaagtgctgagaagaatacattttaacagagccatatctggaggaatttcagaagtgaaaagataaagatcctaataaacatatgaatagggaaaaaagttatctaaaaaagacagaatcagactggcatcagatatctatctcataagcaatcctagatgaagggtaacaacgtaccaatgtttcccaagctctgagagaaaattactttgaatttatggttctaatcacaataatttatgaatgtactataagg

SEQ ID NO: 340981 - DNA, 514 bp, Homo sapiens
catacagtctagttaaggtgggcaggagttacacacatggagttaaatcatccatggcaacaagacacatgacacccaaaacagcagtgtctgatgactagcagatgctgtccgttccatcattccacagatggacaaagttgccatgagttggaatgctcaaggaggaaacaatagacagaataactgttgggtagggtctcggaatatgagccagagtcggctcatggccagtgattgggagaggagagcgtgcccagtgacagaggcaggaatgagcatctgcgaagggacagttaggagaccagtctagctggaataaggggtttgtgtagcacagtactgagaaaggaagacagaggcaggcttgtggagggtcttgactgccaggctaaggaaattggaattcaaagaggagtcagggagatttctgagtggaaggattgcatcgtaaaagcagcgtttgagaaacactagctaatggtagtgagtagaatgcattggttgtgttgta

SEQ ID NO: 340982 - DNA, 389 bp, Homo sapiens
cctcctccatcaatcacagcccacagtgtagtaagagcggaaggagcttggaggtcatctgacagggaccggcagtcctattgatgctggactacaaaagaaagttttggcacaattcaaccttgcaaaagaaggcatgaaggcgtcacttctctgtggtagaggggtggaaactccctgagtgtagctggtctgtttgatttctgaccaccactgagatctggacccaggccatctacctcgtgattcttgctactttatatcctcactgatgtcatcaccttctgaatagagggaaaccagccaagcaacttggacttttggcaggagactatttctaagtactcagtgcctcgtgcagtcctgggcatacagtggatacaaaaaaa

SEQ ID NO: 340983 - DNA, 237 bp, Homo sapiens
cagaatttccaacaaacaccaggagtaactttcaagtggaaacacagctggcacgggcagcacagggcttataaatgacggggcaataaagtggaattatgacctttgcacctgtcctttgcttctgtgcctttctcctctgcagccaccctgggctgtctctggcctggcctccttttacaatggagctgggggtaggacagtctattagaccaagcctcacaaagcagggaagca

SEQ ID NO: 340984 - DNA, 546 bp, Homo sapiens
acacacgattctacacaaggtctttcaagggcatctgtgaagttatgaatgctctgcaattttgaatatcatctctactataaacaggttggttttggttttcttttttgcttcaaaagcacggctacattaaaataaaagatttaaaaatagattttttaatatacacctactatgtactcacaaaaatttaaaaaaaaatttgttcttaagatttttttcccatcatgccagtgggaagagaaacagtgagtagccacttactcaagtcacctccttgagaagagcaagccaccaacagcccaatagcttcacgcctctcacagccctggggtgctgccctagggaagtgcctctcctcagatccctatcagtgctgcaatcagaaagcagtttggggcaggggtcgctggttcctcactcaagatccctagaaagctgcttccatgcacatgtccccaggcagaatcgggcgctctctgcactgtctgccacatgggggccacgggcgtctgtgaagaccagagactcgcctccccgatgagg

SEQ ID NO: 340985 - DNA, 196 bp, Homo sapiens
tgtgaagtatgcaggtgtgtgtgacgtgggtgtaagagtgtgtgtgcaaatgcatgagtggctgagtctgcatgagtgttatgagaaaatgtgtgtaagagaccacgtgagagtgagtgttcatacatgtgtctgcaagtgtgtgggtgtgaaaaagtgccggagactgggagcacatgagagtttgactgtgtgc

SEQ ID NO: 340986 - DNA, 892 bp, Homo sapiens
agtttcaaaactgctgagcaaaagaaaccagggtctgcttcgtatccatgatgtctggaacaggaaaaagcagcccatgtgatggaagccgactgctgggggctgggggctgactcggcagggcctgaggggctttctgggaggagagtggatgtgctcctgatttggatgagggtactggctgcataggtacatatatgtgccaaaactcatagaactgtacatgcaaagagggtacatttattaaatagacatcatctctcaataaaattgatttaaaaaaattaaacccacagggcattgatctgctttgaatttggaggtctaaggattaggggaccggattaccctacaagacagcctgaacacatatcagagccagatgtgaaggcactgcctgtccctgaagacctggggctctaagtcattcacgtgcggggccggcgctccgcattcaatcttccggcataccactcccctcggatgtcttctgagacaaggacagcccacgtccaccaaccccactgcaggcaaaccggcgcctgcctgatggaggacagtaaaggaaggaaaagttatctaacaaatttcaaatgtgtctgtgtacaccagcatgccaaatgtcagaagaaattctagggcagtttgtggactggtttcctgcgaagctagagcttttacttaacgccttaaaacccacaacaagccaaaagggctctcgtgtctacaaagagcaggcacacttggcacagaacacctggctaaacacagaacattaagaaaacaaaaaacacaggtctggccccagctactcaggaggctgaggcagggctatcactgagccgaagaggtcaaggttacagcaagccatcatcacgccactgccctccag

SEQ ID NO: 340987 - DNA, 153 bp, Homo sapiens
tctgttagctacaaaaaagatttaaaaaatcagtgaacataggaaggaagatttaaattctgcacacaattttaaaataatcccaacttccatttattagttttagtttttccctatcagtaatataagccattaaattagataaattctaag

SEQ ID NO: 340988 - DNA, 404 bp, Homo sapiens
aggccaaagtgggaggattgcttgagcctaggagtttgagcccagcctggacaacatagcaagacctcgtctctacaaataaaataaaacccaaacttcctaacaatggggcttagcaaacttttttctatagagggccagatagtaaatacattacactttgtggaccttacagtctttgtagcagttgaagacctctgcccttctagcactgaggcagccatagacaatatgaaaacaaatggacgtggctgttttccaataaaactttattcataaagacaggcagcgggccagatttggcccacagacagtaattcggtgaacactggtctacaaaacaactgaatggggaggaccctgcctccctcaccagccaccagtctcattctgacccactcctc

SEQ ID NO: 340989 - DNA, 447 bp, Homo sapiens
cacttaagactgtttcctaatcgtctgcctgctcctctattcaccctgcatacgctgtgacagatcaatcttctccgagcacaattctgctcacttcatttacttgctcaaaatctttaataaagtccatatttctcagcctggcattcaaatactcttcccaatttatactcaactgacacttattccaccttatttcccactagtctctgccaaacacctaaagcttcaatcaagtagaaacctatgcttttatcccgaggcattttgatccttctcatcacttcaactttgtattgagaactgacgttcttaactcttcccactaccatctatgcttactcgaattctaattaccattaatacaaggcccagatcaatgctgtattcaccaagacgcctcagcttctctctcctcagaactgccataatacaattgtacctagt

SEQ ID NO: 340990 - DNA, 200 bp, Homo sapiens
ggaccgcataactatacagcataaactatcacagcataaactattacagcataaactataacagcataaagaatattcaaaatgttcaggacacaatccaaaatgacttgacatacaaggaactaggaatacattaaacaaccctaaggaggaaaagcaatcaagaaagccaaccacaagactgctcagatgctgaaata

SEQ ID NO: 340991 - DNA, 709 bp, Homo sapiens
taaaaagaaaaaatagcaacaggttttacaattgttgagagaggtcagctcttgttcagagagcgcctcagaatctaggccaaagatcagggttctactagacaaagagaatgagaaggatacttagggcagaacctggatgcccatgcctactgccgcagactggactgagggggtctcccatagtcacagacgtaagcctgtggctgcaccatgggtgagccttggaaacagtgctcagggaaagaagcctgtcacaaaaggccacatgatatatgattccatttatatgaaatgtccaggacaggctaatccgtagagacagaaagaggtgggtggttgcctaggactagaggggctcggggagtagggagtggctgctgatgggtgtggagttttgttgtgggatggcagacatgttctaaagtgtgccgtggttttggtctcacaactcttgagtatgccagaaactattgaactgtgtaatttaattggatgaattgtatggtgcatgaattattctcaatagagctgttaaaaaaaagtaggcatgcaaggtcaccatctgatggaaagcttagccaaagtggtattgggctttgatgaaagcagcttctgagagtattttagaagtgttgacagtacctcctttctggcatggagtctgctgttccatttccacctttttttctgaagcttttggttcttg

SEQ ID NO: 340992 - DNA, 493 bp, Homo sapiens
actctcagtcccagcggccgccagacccgccggagttggacccgagcacgccgcggagcccggaccctccctcggacgctctgccccggccatggcgtcgctgctgccactgctctgtctctgtgtcgtcgctgcgcacctggcgggggcccgaggtgaggcgcctccagcccccgcgcccagcccctgaggctcccgagggcctggcagccggccttgggtgaagccgcactcggggagagaacccagggacccacgcgcttccccggggactgggtccccttcaccagtcggatccccgcgaccacctggggcgcggagcgggcctcatccattctcttccttggctaagccgggagtgtggataagaacctagggttcctcccggggtttggactctgaatcaccggccaggtctcccaccctggaccgaaggggtcggaactggcccctcccacctaactcccacacacgcactcactccaaccgctgg

SEQ ID NO: 340993 - DNA, 682 bp, Homo sapiens
actctcagtcccagcggccgccagacccgccggagttggacccgagcacgccgcggagcccggaccctccctcggacgctctgccccggccatggcgtcgctgctgccactgctctgtctctgtgtcgtcgctgcgcacctggcgggggcccgagacgccacccccaccgaggagccaatggcgactgcactgggcctggaaagacggtccgtgtacaccggccagccctcaccagccctggaggactgggaagaggccagcgagtggacgtcctggttcaacgtggaccaccccggaggcgacggcgacttcgagagcctggctgccatccgcttctactacgggccagcgcgcgtgtgcccgcgaccgctggcgctggaagcgcgcaccacggactgggccctgccgtccgccgtcggcgagcgcgtgcacttgaaccccacgcgcggcttctggtgcctcaaccgcgagcaaccgcgtggccgccgctgctccaactaccacgtgcgcttccgctgcccactagaagcctcgtggggcgcgtggggcccgtggggtccctgctcggggagctgtgggccaggccgtcgcttgcgccgccgccactgcccaagccccgctggggatgcgtgtcccgggcgtcctctggaggcgcagaagtgcgtgcggcctcggtgtcca

SEQ ID NO: 340994 - DNA, 539 bp, Homo sapiens
gagattttggagatgtacaggtagaagtcaggggatggtgaagacaactgaaagttctttccagcctgagaatttcctggtgaaatcaaggtcaaaggactgtgtgtgtgaggggtcagcaagggcatttggtgaacagaaagctgcagtaagcagagaagacagtgatgtcatcacaaagttactaaaaacgtgtcacgtcactgggtgtttcctgcaggcatttcccagcagagacgaaataaaaaagtcataggagtgggaagtaataaatgggcatcatggatgtcgctcatgagtctcgctgaagaaggtggcaggctggtgtggaactgtttgtgcgagcacaagagttcatgtcctgaaaagcacaaacagccttcaccgcttgcatctactcacttgctgccctcacagtcaagttgtttggtgttgctgtcttcacctcctcactgtcgtcattcctcagccagccgccttgtttctcatcactcctttaaagcctctctctccaaagtcacctgagatctccagccatg

SEQ ID NO: 340995 - DNA, 545 bp, Homo sapiens
gcgtgagccaccgtgcccggcccaggcattttgaaatacttcagaatgtgtttcaggctgacatcactgaaactcagaaaaatacttattactcctgtagttacaacatgggaaaggcattgctaagaaagcatcaccataaataaacccgtgggattcagaaggtggggagttgggtgatgtgttttctactaaccatgtgttttaaaaaaaagggtgactagaagttcctgtttatctttgaatttcaataaatttagggcttgttttccaaccactctggtagaatttagaagaacctaacttatttatttttatctttttgacagtcttgctctgtcaccaggctggagtgcagtggcgcgatcttggctcactgcaatctctgcctcccagattcaagctattttcctgcctcagcctcctgagtagctgggattacaggcatgcaccaccatgtccagctatttttttttttttttttgtatttttagtagagtcagggtttcaccatgttggtcaggctggtgtcaaactcctgagct

SEQ ID NO: 340996 - DNA, 530 bp, Homo sapiens
cttggtcattctgacaaaaagtgctcacaggtgccctggtaatcaaggtgagtttcatgatgagggttgcccaggctctacaagtctacccaggctctctgggatgataacctaaatttcaagtagtaatttgagagctgaagaacggggatagagaaaagagagtaattttcaatgaggacattagatgccacatttaaacaattcagttaactctcagtagagaatgaaagactttactcataatggttctttattatcagccagcctacaaagcttatggagctcagtccgactgaggccacctacaaagctggaatgttaataggcttatttccaaacatgtcccaggaaaactaagactacagtgtggctggaattaactttgttcctcacagcttataacctaatagaaacaaaaaaaacacttgaatatttaaaaaaaaaaaagggtgggtgtctagggaaaggaattcatcttcctggctagacagaacagatggataaattattttaatgccatacctctc

SEQ ID NO: 340997 - DNA, 449 bp, Homo sapiens
  misc_feature (182)..(182): n is a, c, g, or t
  misc_feature (234)..(234): n is a, c, g, or t
  misc_feature (383)..(383): n is a, c, g, or t
  misc_feature (396)..(396): n is a, c, g, or t
  misc_feature (399)..(399): n is a, c, g, or t
  misc_feature (405)..(405): n is a, c, g, or t
  misc_feature (411)..(411): n is a, c, g, or t
  misc_feature (419)..(419): n is a, c, g, or t
  misc_feature (427)..(427): n is a, c, g, or t
  misc_feature (429)..(429): n is a, c, g, or t
tccagacattcttaaatttctttcgagtgattcagattcttagccttccaagattcctaggtttccagggccatctaggaatagacctgttgggagggcctaagctggtactgattcataaccctggggagtcctgagaggtcccctggcacttgtctgtgaggtaggtgacctttcctccncaccagcctccatgtgtgggtacagacagtgttgggctgcggggtcctcccnaccagcctctgctgacctgtcctcctgcacttgctttctttgttggcacctggtactccctagagtctgatgagtctgggatccttacgtgacgcatatcacccttatcctgtggactttgggaatgactgcaatccagaatacggggntcattgctctttnccnaacccntcagtnggccccancacaggtntncagggaccttgtactcagga

SEQ ID NO: 340998 - DNA, 329 bp, Homo sapiens
ctgagaccatctgcatagagggcttaacatagtgactggtacttagcaaatgctccatgagttatgattgctggcactggcatgctctccagagtggccctcagaacaggggccctcagccaccaaatcctagacagggcttcctctgacagaggtgcaggctatgactacatggctccagggcatgccactcaccctgcagtccccatggccttgggtggtggttatcacgcttctccatcagggggcggtaaagctctttccgaaagtgctgggattccaggcatgagctatggtgaagctcttaaagaaggggtggcttggccggg

SEQ ID NO: 340999 - DNA, 345 bp, Homo sapiens
actcaagtatcacctgtgggtcactccctctctccccccaacacacacaggcacacaccaggttgagcaaagcaccacccacctggaacttatcctgatgacaggctatagtgataataatcataccaccccttacagagcatagacacggggcctagcactgtccatacactgcttcagtaaactcacataagaaccttttgagaatgggagtatcctatcatgagccctttttacagatagggaagtcgagtctcaaaaccataaccatgcccaaggccacagccaggagcaggcagggccagggtttgccctggactatctctggctgattccctccctccc

SEQ ID NO: 341000 - DNA, 559 bp, Homo sapiens
tctggcccctgtatatggaaaaacaaatgttgtgatgcagccacgggactaagtttctgagcttagttgttacactgcagaatccctttagtactccgaggagcttttaaaacaccaagaaagaatctgtgggtagtgcccaagctttggtatgtgctgccagggatgagaaacaccaagcactcctttagattctgctctcgaagttcccgagtagctgggactacaggttcgagccaccacgcccagctagttttggtattgttagtagagacgggatttcaccatgttggccaggatggtcttgatctcttgacctcaagatccacccatatcagcctcccaaagtgctggggttacaggcatgagccatggcacatgaccagaacatttttctatgtatttattagtccttcatactttttctcatgttaattgccagtacttatgcaagataccgggaaagctttttgacaggaagaagtaagtttctttctcctgtaagcaagtcctgaggctgtataacactccaaattacaaggctatttcaaaatggttt

SEQ ID NO: 341001 - DNA, 109 bp, Homo sapiens
tatacatattgatttactacaacagttttgagagataataatacaatctaggaatctataatgtttcagttattacacgatcatatacttacaaaaaaaaaaaaagcct

SEQ ID NO: 341002 - DNA, 1773 bp, Homo sapiens
attagtttaattcttatccagaaaagataaacacatggttccttgtctacaaagtattcgcctgtttcaatccaacctttgcctgtgtgccagtatgcattactataaagggcaagagactgttgaggggaccagtgtggatatctgcatcattaccttattgggaaaaaaaaaatctaattctacagtccgatgatgttactgccatctcctctgaaaattccaagctccacaggcttcaccaggcttttcaaaatgagagtttattttaatgattaaaaaccgctatttaagtagctcttgccaagccttttcattaccaggtctccatccctccccaagtatttctgcgagtctcatgtgctaagagatgtcttgagcagcctctgcagctttccgtgtttctgtggtcagctactgctgccctttcccgggaggcattccattctcctactgggtcctctcaagatgccaaagcttggtgctgggatttaggaacacatcctgttagatgtcagacagtgctgcttgtgctggggagcctacagaacttctgatgaaactaccatctggttttaccctctgtgccgtggatgcagacgtgtccttgggctacagagaggacatgatggagcaggaggccctatcccaaggaggtgttagaactgggtccactttgtactgcctctttcttcttaggtcacaatgagtgtcctctcagggcacaactcagatcttcaacccatggctcgctgtaggcctgccccgccaggtcctccagcttgccattcatgtttccatcctagccttggttgtgctggaactcaggctggagcctgacactttgcctatatgcaaagggaagaaataggacttacattgccaaggaatcacttcttaatgtttgccagcactaaaaacaacaaagtataggaatctttttcccccacagtctccacaaagctatcaataagtataattcgcatttacaagttttaggccttcaacagatgtaactccatccaaatgaatcaatatgtgccatcaacctaccttatagaggtgtttttcctgattacatgagcaaaagtagctacagaaagatgggtgtaaagaaaaggcaataaattctaggttatgaactctactgcttctggagctatttctgagatttttcagaacctacttttttataaataagtctaatttgagcattctgcaatactttttttcctatcaggaaaactaatgcagatagtattatggggacgtgtaggttttatagaaaaaaaaagtacatgtataattcaaaactcaactttgtatgtataggagtctgctggttgtttgcacagcctgatatgagcacataataaaagtccgtcattccccaaccccctccccctacacacacagcttattttgggaaactgccccttccctgtgtgatttgggaagagaaagtgataggaatcaagttgtcctctggcagcctcctggagagatggctgtgagctcttgctgcttaaacctctagtgccaccctcatttctgacctactgaatgctcagctgtttggcatttcctttgaatgacccagcatcttcccttttgttgtcggaaatcagaatcagtctctattgcttgtaacttaagaatctggatattctgtttattatattcttaaatggttatttggaaaatgtgctcatttataaaagttacagtgtctttttaaagtttgctgaagtaaatgaagcatatcgtcaagta

SEQ ID NO: 341003 - DNA, 601 bp, Homo sapiens
atctccgtgccgtgtccttgttcacttagcctgtgttgagtgtttgtctccatttccaaatgcaataaaacatctgggaaagactaaggtaggtgtgggcaggaagaagggaggaagttagacccagtggcttgagtgccctctgatgcctccttatcctcggctccacacaagccctcgccagtgtgagctccacagccatccacctggaggaggagtactcaaaaccagggtcaaatgccttgtactcgggggtctaccagtaagcctgtggccagccttccacttcatgaatcgtcacatttacatgagagatgtggagggagaggggtcagcctcctagctcctgtcctgtagcagttaagtcaagtcaggccaggctgtggtaaccaagccagtaccttctttaaagaacagttgtttctcattcatacagagtgtgttgtaggtgtgagtgattccctggggcagctgctcttcatggtgactcagctaattagactgcttttctactgggattgtgccatctcaacacaaggctgtcttggttgacttggtaggggaggaggagaagagtcatgcacgaggagttaaattcttt

SEQ ID NO: 341004 - DNA, 1395 bp, Homo sapiens
cagtctccccaggttgtagacgctgcggcccggcccggcgggtaaataacagatgcgggtgaaagatccaactaaagctttacctgagaaagccaaaagaagtaaaaggcctactgtacctcatgatgaagactcttcagatgatattgctgtaggtttaacttgccaacatgtaagtcatgctatcagcgtgaatcatgtaaagagagcaatagctgagaatctgtggtcagtttgctcagaatgtttaaaagaaagaagattctatgatgggcagctagtacttacttctgatatttggttgtgcctcaagtgtggcttccagggatgtggtaaaaactcagaaagccaacattcattgaagcactttaagagttccagaacagagccccattgtattataattaatctgagcacatggattatatggtgttatgaatgtgatgaaaaattatcaacgcattgtaataagaaggttttggctcagatagttgattttctccagaaacatgcttctaaaacacaaacaagtgcattttctagaatcatgaaactttgtgaagaaaaatgtgaaacagatgaaatacagaagggaggaaaatgcagaaatttatctgtaagaggaattacaaatttaggaaatacttgcttttttaatgcagtcatgcagaacttggcacagacttatactcttactgatctgatgaatgagatcaaagaaagtagtacaaaactcaagatttttccttcctcagactctcagctggacccattggtggtggaactttcaaggcctggaccactgacctcagccttgttcctgtttcttcacagcatgaaggagactgaaaaaggaccactttctcctaaagttctttttaatcagctttgtcagaagtgggtgcatctacatttaatataaataattatgagttacaaaatactaatgtattcatcatttaacatgaatagtcgtttttactgtaactttgctcttattgccctgactatgaagagaactaaaatttgttacagctctatgctttatgaaaattatatctcagtcctcagaagaagcagcttatcctcatatataaggaaatggagacacagaaattaaatggctcacctagtctgagtgaaaagctgagaatcaaatggagatctgtcctgacttggatgcctatgttgtaataccataaagtgagaaaaccatagagttgtaaaatctagaaagtaccgtaagataacatctaatctagctttcttattttaaaagatgagctgtgaggcaaatagagtttaagtgaatttctcaaggtattacagtatgtttaaaaaccaaatccttatgtgcctggaaataaacacataaaggatctgacttgaaaataa

SEQ ID NO: 341005 - DNA, 635 bp, Homo sapiens
tatacttcagcaaaaaaaacttttttatatgaaatgatttgtattaatttggcaaattaatattaaatttaacttactctattaattaattaattaattaattattgagacagagtctcacactgttgcccagccaggctggagtgcagtggcacgatctcagctcactgcagcctcccaggttcaagtgattcttgtgcctcagcctcccaagtagctgggactacatgtgcacaccaccatgcccggctaatttttgttattttttgtagagatagggttttgtcatgttggctgggctggtctcaaactcctgatgacctcaagtgatctacctgccttggtctcccaaagtgctggaattgcaggtgtgagccacagcgctgggcctgaatttaacttactctgttagaagacttatgttagaagtcacaagacttcagaaaggacaacatgttttctataaataaaagctaattttgcttcataagatatataggacagttaaattcaatttgagcatatgctttattctaatggtataaaacaaagcatcttacagagtttgaaaaggttaaagcattaattgtgttgctattcccctaaaaagcactggttattaaaatataaatgtg

SEQ ID NO: 341006 - DNA, 662 bp, Homo sapiens
  misc_feature (280)..(280): n is a, c, g, or t
tatacttcagcaaaaaaaacttttttatatgaaatgatttgtattaatttggcaaattaatattaaatttaacttactctattaattaattaattaattaattattgagacagagtctcacactgttgcccagccaggctggagtgcagtggcacgatctcagctcactgcagcctcccaggttcaagtgattcttgtgcctcagcctcccaagtagctgggactacatgtgcacaccaccatgcccggctaatttttgttattttttgtagagatacgntctcactacgttgcccaggctagtgagagccaagattcttaaactggggttcacccatgaacttcaggagggtccaaggaccaagtgaactgatatgcagaaagtgcacacatgtaaacatgtgcattattttcagaaggtccttagcctccaagttctccaggatttcttttcaagaacttccaacctagataaactgagactggtaacccttggttccgctcctaaaatttcatacacatacccagagtcatgtcaaatgaagatctttggacacactagcctgtgtatactatggtggtcccataagattataataccatatttctactgcacctttctatgtttatgatacgtttaggggaacatgcgcaccggtact

SEQ ID NO: 341007 - DNA, 1794 bp, Homo sapiens
cagtctccccaggttgtagacgctgcggcccggcccggcgggtaaataacagatgcgggtgaaagatccaactaaagctttacctgagaaagccaaaagaagtaaaaggcctactgtacctcatgatgaagactcttcagatgatattgctgtaggtttaacttgccaacatgtaagtcatgctatcagcgtgaatcatgtaaagagagcaatagctgagaatctgtggtcagtttgctcagaatgtttaaaagaaagaagattctatgatgggcagctagtacttacttctgatatttggttgtgcctcaagtgtggcttccagggatgtggtaaaaactcagaaagccaacattcattgaagcactttaagagttccagaacagagccccattgtattataattaatctgagcacatggattatatggtgttatgaatgtgatgaaaaattatcaacgcattgtaataagaaggttttggctcagatagttgattttctccagaaacatgcttctaaaacacaaacaagtgcattttctagaatcatgaaactttgtgaagaaaaatgtgaaacagatgaaatacagaagggaggaaaatgcagaaatttatctgtaagaggaattacaaatttaggaaatacttgcttttttaatgcagtcatgcagaacttggcacagacttatactcttactgatctgatgaatgagatcaaagaaagtagtacaaaactcaagatttttccttcctcagactctcagctggacccattggtggtggaactttcaaggcctggaccactgacctcagccttgttcctgtttcttcacagcatgaaggagactgaaaaaggaccactttctcctaaagttctttttaatcagctttgtcagaaggcacctcgatttaaagatttccagcaacaggacagtcaggagcttcttcattatcttctggatgcagtgaggacagaagaaacaaagcgaatacaagctagcattctaaaagcatttaacaacccaactactaaaactgctgatgatgaaactagaaaaaaagtcaaagatgtaactagacaaaatgtttaagtgctccaaagactcctgcaaataaaccgtttattgaagagagtgctgcatatggaaaagaaggtgtgaaaatgaacttcatagatcggatctttattggtgaattaactagcacggtcatgtgtgaagaatgtgcaaatatctccacggtgaaagatccattcattgatatttcacttcctataatagaagaaagggtttcaaaacctttactttggggaagaatgaataaatatagaagtttacgggagacagatcatgatcgatacagtggcaatgttactatagaaaatattcatcaacctagagctgccaagaagcattcttcatctaaagataagagatagggttttgtcatgttggctgggctggtctcaaactcctgatgacctcaagtgatctacctgccttggtctcccaaagtgctggaattgcaggtgtgagccacagcgctgggcctgaatttaacttactctgttagaagacttatgttagaagtcacaagacttcagaaaggacaacatgttttctataaataaaagctaattttgcttcataagatatataggacagttaaattcaatttgagcatatgctttattctaatggtataaaacaaagcatcttacagagtttgaaaaggttaaagcattaattgtgttgctattcccctaaaaagcactggttattaaaatataaatgtg

SEQ ID NO: 341008 - DNA, 358 bp, Homo sapiens
ggtttttattctcaaggaatttaaactcttaaacactttttattttgataatttgttaattttttgtatttcaagtcagtcaaaaattttaagatgaggacatccagaatttatttactaaagaggttttggtttctgtatgtggcatttacataggtttcaaaacctttactttggggaagaatgaataaatatagaagtttacgggagacagatcatgatcgatacagtggcaatgttactatagaaaatattcatcaacctagagctgccaagaagcattcttcatctaaagataaggtaagaccataagcatctgttagacgtctgttttttaacagtttattaacaaaagttt

SEQ ID NO: 341009 - DNA, 798 bp, Homo sapiens
cagtctccccaggttgtagacgctgcggcccggcccggcgggtaaataacagatgcgggtgaaagatccaactaaagctttacctgagaaagccaaaagaagtaaaaggcctactgtacctcatgatgaagactcttcagatgatattgctgtaggtttaacttgccaacatgtaagtcatgctatcagcgtgaatcatgtaaagagagcaatagctgagaatctgtggtcagtttgctcagaatgtttaaaagaaagaagattctatgatgggcagctagtacttacttctgatatttggttgtgcctcaagtgtggcttccagggatgtggtaaaaactcagaaagccaacattcattgaagcactttaagagttccagaacagagccccattgtattataattaatctgagcacatggattatatggtgttatgaatgtgatgaaaaattatcaacgcattgtaataagaaggttttggctcagatagttgattttctccagaaacatgcttctaaaacacaaacaaggccaggccccatcctgattcatctcttcagcataaactgtctaggggcccacagtgagtcagtttgttgatataaactgtcaaatgtggcctgagggacccatcatgaataacagacactcttgtcgctctggaaattccgaggatttagagggtacttcccaggaacctggggagaaaagccagccagatcctttattatataacagtaatgtattatgtattttgttattgtatactttgttacctaacaaataaataatacata

SEQ ID NO: 341010 - DNA, 1868 bp, Homo sapiens
ggtcgcagcggcggtatggtcgccgcagtttctcggtcttcgcttcggcgaccttgacccccttgtgggtgggcgaggctggaagagaggctccccaccccactcggcttcctgatccctgggggcgccgggcggtcaccgagggccgtgtgagcgccgctctgccggctccgggtccatgcggctgcgggagaagccctgggcgtcggggctggcctgggaggggcccgagtcccctggtgacctgggcgcgcggcggccccacacctttccgtccgcctcatcgcggcgcatttctcttcacatcctcggggtgtgtgtgtgttggtgaccggaggaagcctgtctaatgacttttctggaagcgtcgtgtattaggagctccggggccggactgcttgggtccgcatctccatccaccgcttactggctttgggacctctgcaagtcacttcacttctctttctcagtttcaagtgtaaaatgcggaaaataatagcaacttatctcctaagtaaataacagatgcgggtgaaagatccaactaaagctttacctgagaaagccaaaagaagtaaaaggcctactgtacctcatgatgaagactcttcagatgatattgctgtaggtttaacttgccaacatgtaagtcatgctatcagcgtgaatcatgtaaagagagcaatagctgagaatctgtggtcagtttgctcagaatgtttaaaagaaagaagattctatgatgggcagctagtacttacttctgatatttggttgtgcctcaagtgtggcttccagggatgtggtaaaaactcagaaagccaacattcattgaagcactttaagagttccagaacagagccccattgtattataattaatctgagcacatggattatatggtgttatgaatgtgatgaaaaattatcaacgcattgtaataagaaggttttggctcagatagttgattttctccagaaacatgcttctaaaacacaaacaagtgcattttctagaatcatgaaactttgtgaagaaaaatgtgaaacagatgaaatacagaagggaggaaaatgcagaaatttatctgtaagaggaattacaaatttaggaaatacttgcttttttaatgcagtcatgcagaacttggcacagacttatactcttactgatctgatgaatgagatcaaagaaagtagtacaaaactcaagatttttccttcctcagactctcagctggacccattggtggtggaactttcaaggcctggaccactgacctcagccttgttcctgtttcttcacagcatgaaggagactgaaaaaggaccactttctcctaaagttctttttaatcagctttgtcagaagtgggtgcatctacatttaatataaataattatgagttacaaaatactaatgtattcatcatttaacatgaatagtcgtttttactgtaactttgctcttattgccctgactatgaagagaactaaaatttgttacagctctatgctttatgaaaattatatctcagtcctcagaagaagcagcttatcctcatatataaggaaatggagacacagaaattaaatggctcacctagtctgagtgaaaagctgagaatcaaatggagatctgtcctgacttggatgcctatgttgtaataccataaagtgagaaaaccatagagttgtaaaatctagaaagtaccgtaagataacatctaatctagctttcttattttaaaagatgagctgtgaggcaaatagagtttaagtgaatttctcaaggtattacagtatgtttaaaaaccaaatccttatgtgcctggaaataaacacataaaggatctgacttgaaaataa

SEQ ID NO: 341011 - DNA, 456 bp, Homo sapiens
taatgtttgtatttttagtacagacagggtttcaccatgttggccaggctggtctcgaacgcttgacctcaggcgatccacccaccttggcctcccaaagtgttgggattacaggcgtgagccactgcgcctggccactttatctatttttacgtgttcaattcagtggcattaattaaattcacagtgcaggggtaagagttgcacttactttcttaaatttattcctgaggtaaattgatttttatatattgatcttttatcctgcaaaattgctgaactttttaattagttttagtagtttttttagtgaattcattagaatttttacataaaaaatcatataaattttatatataaaattatctctgtgagtacagatagttctgcttcttccttttcaacttggatacctttaatttctttttgttgtctacttgccctgcctagaacctt

SEQ ID NO: 341012 - DNA, 366 bp, Homo sapiens
atgacaggtaacttctcaagagaaaaaatggatgccagaagataatgagtcttcatctttaaaatgccaaaagaagctgggcatggtggctcacgccttgggaggctcaggcaggcagatcactggaggtcaggagttgaagaccagccccatcaacatggtgaaaccccatctctgctaaaaatacaaaaaaaaattagctgggcgtggtggtatgtgcctataatcacagctacccaggaggctaaggcaaaagaatcacttgaacccaggaggtggaggttgcagtgagcaagatcacgccactgcactccagcctgggtgacaaagcgagactctatctcaaaataaataaataaataaata

SEQ ID NO: 341013 - DNA, 98 bp, Homo sapiens
catggaactcaccagaatctttcatcatggaccagctgctttttacacttggataccagtaccctagatggtgggagagactggaaggatcgttcagg

SEQ ID NO: 341014 - DNA, 584 bp, Homo sapiens
tgtatgcagcatgtgctaaaacataaatcaataacaggcctgggatatgggccccagaagaacaccggcctttactgaagtggctatttcttgggcaggactttacaaatttatccttgtccccattccctgactcctctggagaaaggaaaacagcctccagggacttcaggaagctttcaggattacctgtggcttcatgctccagagaggggcacaggagagctattgtgtcctagaaattacctggcatgtgagctggcccggcccttctcctgtacagcaggcccagaactgatctgtgaaagtgtggatctagactacctctgtaaacagaaacctgaagactcagagttggagtcaacacatctggaaaatgacctccgacaaacaacagaaccaccaggtagtcagggatccttcccagtgaaatctgctacctttgggactgatctgcagaagaagcaagtcatggaaacatctggactgcaccatcccacatggacgatagagaaggggtggagattattagcacggtcgcaacttagaggcagggagaactacaaatctatccgtggcaaacc

SEQ ID NO: 341015 - DNA, 122 bp, Homo sapiens
gtcccacattaaatgcatatagagcaaccaaccaaccaaataaacaaataccccatctggaaactattaccctgcaagctatcaataacatgctttgagacttgaacagtcatcatgaggat

SEQ ID NO: 341016 - DNA, 514 bp, Homo sapiens
attgttgtgagtgtgcagaacctgccggtgcgacgtccagtccgtggcgttgaaagacaggatcttcgctcgttatgaaagacactaaagtggatgatacaagaactaaaaaacaaaaacacaaagtatcctgctaaagtggaagtgaaataaaggcattttcacataaattaaaactgaatttgggccgggcgcggtgcctcacgcctgtaatcccagcactttgggaggccgaggcgggcagatcacgaggtcaggagattgagaccatcctggataacatggtgaaaccctgtctctactaaaaatacaaaaaaattagccgggcatggtgtggtggctaatgcctgtaatcccagcctttgggaggctgaggtgggtgggatcacttagaccaggagttcaagatcagcctggccaacatggtgaaactccatctccactaaaaatacaaaaattagctgggtgtggtggtgcatgcctgcattcccagctacttggggaggttaaggca

SEQ ID NO: 341017 - DNA, 85 bp, Homo sapiens
tctggagttatgttgacaaacatgacttgaatgagaaggaagtatttcaagaataatatgacaactgtgtgactacaatgaggag

SEQ ID NO: 341018 - DNA, 445 bp, Homo sapiens
attaagaacatagtaaaaggaatagaccaaatagatatacaaagatcataagtaaaaaaaaattagaaaaccccagccccccttccaagtgactccgtgccttgagtgtgtctgcgtgtttacacccgtccctctgctggccgcccccgtgcgagcggcacccctgccctgccctccacagaattgggttccaagggctgttccagacaactgccaacgtcactgagggccctgccccagcggccctggccccaggctctattaacctaaaatgtagctccctagcgctaacctaggaaccgccgctgcctgctggggggccacgcccctcatgcccttgtcccaggcccggggccttcagcgttgaacacttccttgcttttttcacatgttttatggaattgttcacctggtttgaaataataaaatgtagaaagaaaaaaaa

SEQ ID NO: 341019 - DNA, 870 bp, Homo sapiens
gccccgccgtcggtgcgcggcggtagggaaggcgcctcccgcagtcgctcggaactgccgacccgagtgcttcccgcagagggctggtggtgggagcggagtgggtcgggcggggccgagccgggccgtgggccgtgtgggggccgggcggcggccgggccggcggacggcgggatgggctgcaccgtgagcgccgaggacaaggcggcggccgagcgctctaagatgatcgacaagaacctgcgggaggacggagagaaggcggcgcgggaggtgaagttgctgctgttgggtgctggggagtcagggaagagcaccatcgtcaagcagatgaagatcatccacgaggatggctactccgaggaggaatgccggcagtaccgggcggttgtctacagcaacaccatccagtccatcatggccattgtcaaagccatgggcaacctgcagatcgactttgccgacccctccagagcggtatgtgccctccgccccaccctctcccacctcccaaaaggtttcggggtggctggttgtggtggctcatgcctataaatcccagcactttgggacgccgaggcgggtggatcacctgaggtcaggaccagcctggccaacttggtgaaaccgcgtctctactaaaaatacaaaaattagccgagcatggtggcacgtgcctgtaatcccagctacttgggaggctgaagcaggagaattgcttgaacccgggaggcagaggatgcagtgagccaagatcgccccattgcactctagccttggtgacagagctagactccgtcacagaaaaaagtaaacaacaacaacaaaaaggttttagggcaagtctcatcctagggaatccaagaatac

SEQ ID NO: 341020 - DNA, 487 bp, Homo sapiens
agaccccccaggacagtggggagccatggtgggcagcagagcttgtgggaggcaaaggcctgcagagagtctgccatggggcacaggtgctctaggttaccttgaccactgtggccctgccagctgcattcctggtagctcaactgcccaccaggcccagctgcctccatctcacggtgcagctggtgggaaggttagttctgcctcctgggctacaggtgtctgggcatttgttctgtgcctgtggagcccctctgggcctgccccctgaccacctgtgccctctgttccaggtgctggggagtcagggaagagcaccatcgtcaagcagatgaagtaagtgctgtattccagaggcagtgctcaaactccagcttcccctcttcaccctctgggcctgcactgcccccgactacaggcccagccagtcttagccaggcccagaatcttctgagaagcagaaggaccctcaggtcccagtgggtca

SEQ ID NO: 341021 - DNA, 2252 bp, Homo sapiens
gccccgccgtcggtgcgcggcggtagggaaggcgcctcccgcagtcgctcggaactgccgacccgagtgcttcccgcagagggctggtggtgggagcggagtgggtcgggcggggccgagccgggccgtgggccgtgtgggggccgggcggcggccgggccggcggacggcgggatgggctgcaccgtgagcgccgaggacaaggcggcggccgagcgctctaagatgatcgacaagaacctgcgggaggacggagagaaggcggcgcgggaggtgaagttgctgctgttgggtgctggggagtcagggaagagcaccatcgtcaagcagatgaagatcatccacgaggatggctactccgaggaggaatgccggcagtaccgggcggttgtctacagcaacaccatccagtccatcatggccattgtcaaagccatgggcaacctgcagatcgactttgccgacccctccagagcggacgacgccaggcagctatttgcactgtcctgcaccgccgaggagcaaggcgtgctccctgatgacctgtccggcgtcatccggaggctctgggctgaccatggtgtgcaggcctgctttggccgctcaagggaataccagctcaacgactcagctgcctactacctgaacgacctggagcgtattgcacagagtgactacatccccacacagcaagatgtgctacggacccgcgtaaagaccacggggatcgtggagacacacttcaccttcaaggacctacacttcaagatgtttgatgtgggtggtcagcggtctgagcggaagaagtggatccactgctttgagggcgtcacagccatcatcttctgcgtagccttgagcgcctatgacttggtgctagctgaggacgaggagatgaaccgcatgcatgagagcatgaagctattcgatagcatctgcaacaacaagtggttcacagacacgtccatcatcctcttcctcaacaagaaggacctgtttgaggagaagatcacacacagtcccctgaccatctgcttccctgagtacacaggggccaacaaatatgatgaggcagccagctacatccagagtaagtttgaggacctgaataagcgcaaagacaccaaggagatctacacgcacttcacgtgcgccaccgacaccaagaacgtgcagttcgtgtttgacgccgtcaccgatgtcatcatcaagaacaacctgaaggactgcggcctcttctgaggggcagcggggcctggcgggatgggccaccgccgactttgtaccccccaacccctgaggaagatgggggcaagaagatcacgctccccgcctgttcccccgccgcttttctcctctttcctctctttgttctcagctccccctgtcccctcagctccagacgtaggggaggggttgccacaggcctccctgtttgaagcctgcccttgtctgagatgctggtaatggccatggtacccccttctgggcatctgttctggtttttaaccattgtcttgttctgtgatgaggggaggggggcacatgctgagtctcccaaggctgcgtctggaggggcccctgcttctccagcctggacccccagctttgcccaacaccagcccctgccccagcccaagtccaaatgtttacagggagcctcctgcccagtcccccaaccccagccgctcggaggccccaaaggaaaaagcacaagaagcgtgagacgccaccattcctggaaaccacagtccacctgctcattctcgtagctttttaaaaaaatgaaagtaaaggaaaaaaaaaaaactgcaaatctagaaaactttttagagaaaaactatttaaaactgtcagatcctgaccagcaagcccccccccagccccccttccaagtgactccgtgccttgagtgtgtctgcgtgtttacacccgtccctctgctggccgcccccgtgcgagcggcacccctgccctgccctccacagaattgggttccaagggctgttccagacaactgccaacgtcactgagggccctgccccagcggccctggccccaggctctattaacctaaaatgtagctccctagcgctaacctaggaaccgccgctgcctgctggggggccacgcccctcatgcccttgtcccaggcccggggccttcagcgttgaacacttccttgcttttttcacatgttttatggaattgttcacctggtttgaaataataaaatgtagaaagaaaaaaaa

SEQ ID NO: 341022 - DNA, 2831 bp, Homo sapiens
gccccgccgtcggtgcgcggcggtagggaaggcgcctcccgcagtcgctcggaactgccgacccgagtgcttcccgcagagggctggtggtgggagcggagtgggtcgggcggggccgagccgggccgtgggccgtgtgggggccgggcggcggccgggccggcggacggcgggatgggctgcaccgtgagcgccgaggacaaggcggcggccgagcgctctaagatgatcgacaagaacctgcgggaggacggagagaaggcggcgcgggaggtgaagttgctgctgttgggtgctggggagtcagggaagagcaccatcgtcaagcagatgaagatcatccacgaggatggctactccgaggaggaatgccggcagtaccgggcggttgtctacagcaacaccatccagtccatcatggccattgtcaaagccatgggcaacctgcagatcgactttgccgacccctccagagcggacgacgccaggcagctatttgcactgtcctgcaccgccgaggagcaaggcgtgctccctgatgacctgtccggcgtcatccggaggctctgggctgaccatggtgtgcaggcctgctttggccgctcaagggaataccagctcaacgactcagctgcctactacctgaacgacctggagcgtattgcacagagtgactacatccccacacagcaagatgtgctacggacccgcgtaaagaccacggggatcgtggagacacacttcaccttcaaggacctacacttcaagatgtttgatgtgggtggtcagcggtctgagcggaagaagtggatccactgctttgagggcgtcacagccatcatcttctgcgtagccttgagcgcctatgacttggtgctagctgaggacgaggagatgaaccgcatgcatgagagcatgaagctattcgatagcatctgcaacaacaagtggttcacagacacgtccatcatcctcttcctcaacaagaaggacctgtttgaggagaagatcacacacagtcccctgaccatctgcttccctgagtacacaggggccaacaaatatgatgaggcagccagctacatccagagtaagtttgaggacctgaataagcgcaaagacaccaaggagatctacacgcacttcacgtgcgccaccgacaccaagaacgtgcagttcgtgtttgacgccgtcaccgatgtcatcatcaagaacaacctgaaggactgcggcctcttctgaggggcagcggggcctggcgggatgggccaccgccgactttgtaccccccaacccctgaggaagatgggggcaagaagatcacgctccccgcctgttcccccgccgcttttctcctctttcctctctttgttctcagctccccctgtcccctcagctccagacgtaggggaggggttgccacaggcctccctgtttgaagcctgcccttgtctgagatgctggtaatggccatggtacccccttctgggcatctgttctggtttttaaccattgtcttgttctgtgatgaggggaggggggcacatgctgagtctcccaaggctgcgtctggaggggcccctgcttctccagcctggacccccagctttgcccaacaccagcccctgccccagcccaagtccaaatgtttacagggagcctcctgcccagtcccccaaccccagccgctcggaggccccaaaggaaaaagcacaagaagcgtgagacgccaccattcctggaaaccacagtccacctgctcattctcgtagctttttaaaaaaatgaaagtaaaggaaaaaaaaaaaactgcaaatctagaaaactttttagagaaaaactatttaaaactgtcagatcctgaccagcaagcccccccccagccccccttccaagtgactccgtgccttgagtgtgtctgcgtgtttacacccgtccctctgctggccgcccccgtgcgagcggcacccctgccctgccctccacagaattgggttccaagggctgttccagacaactgccaacgtcactgagggccctgccccagcggccctggccccaggctctattaacctaaaatgtagctccctagcgctaacctaggaaccgccgctgcctgctggggggccacgcccctcatgcccttgtcccaggcccggggccttcagcgttgaacacttccttgcttttttcacatgttttatggaattgttcacctggtttgaaataataaaatgtagaaagaaaaaaaaaaaaaaaaaaaaaaaaaaaaaaaaaaaaaaaaaaaaaaaaaaaaaaaaaaacaaaaaaaaaggaagggggggggcgcgcgtcgagaagtatatccgccggggggggcccaattgctgcgcgcacccaccgtttttgtgtgcaaacaagggggcccccacaagaggagagacgtcatataatctgagacggaggcggacgcaggcggcgttcaaacaacagcaggtgagagcgggggacaaaacagcgcgcccacgggggagatctcctggggaggaggaagaacacccactacgacgggcgggagggggggagaacaaatatgtgtggtgggagacaacaaattctccccaagaaagagaaatatataataaggctcgcgccttgggagggggagaatgatcaaataacaaacatttatgacagagagagtggtctatctagtgtggtgtggataacaccaacagagaggcgtgagattattatgtatgtgaggtagatggtagtagaaaaatattgtttggtctgaccaacggtgagagattgtattttaataattgacgaaaacagtatatttttac

SEQ ID NO: 341023 - DNA, 2149 bp, Homo sapiens
gccccgccgtcggtgcgcggcggtagggaaggcgcctcccgcagtcgctcggaactgccgacccgagtgcttcccgcagagggctggtggtgggagcggagtgggtcgggcggggccgagccgggccgtgggccgtgtgggggccgggcggcggccgggccggcggacggcgggatgggctgcaccgtgagcgccgaggacaaggcggcggccgagcgctctaagatgatcgacaagaacctgcgggaggacggagagaaggcggcgcgggaggtgaagttgctgctgttgggtgctggggagtcagggaagagcaccatcgtcaagcagatgaagatcatccacgaggatggctactccgaggaggaatgccggcagtaccgggcggttgtctacagcaacaccatccagtccatcatggccattgtcaaagccatgggcaacctgcagatcgactttgccgacccctccagagcggacgacgccaggcagctatttgcactgtcctgcaccgccgaggagcaaggcgtgctccctgatgacctgtccggcgtcatccggaggctctgggctgaccatggtgtgcaggcctgctttggccgctcaagggaataccagctcaacgactcagctgcctactacctgaacgacctggagcgtattgcacagagtgactacatccccacacagcaagatgtgctacggacccgcgtaaagaccacggggatcgtggagacacacttcaccttcaaggacctacacttcaagatgtttgatgtgggtggtcagcggtctgagcggaagaagtggatccactgctttgagggcgtcacagccatcatcttctgcgtagccttgagcgcctatgacttggtgctagctgaggacgaggagatgaaccgcatgcatgagagcatgaagctattcgatagcatctgcaacaacaagtggttcacagacacgtccatcatcctcttcctcaacaagaaggacctgtttgaggagaagatcacacacagtcccctgaccatctgcttccctgagtacacaggggccaacaaatatgatgaggcagccagctacatccagagtaagtttgaggacctgaataagcgcaaagacaccaaggagatctacacgcacttcacgtgcgccaccgacaccaagaacgtgcagttcgtgtttgacgccgtcaccgatgtcatcatcaagaacaacctgaaggactgcggcctcttctgaggggcagcggggcctggcgggatgggccaccgccgactttgtaccccccaacccctgaggaagatgggggcaagaagatcacgctccccgcctgttcccccgccgcttttctcctctttcctctctttgttctcagctccccctgtcccctcagctccagacgtaggggaggggttgccacaggcctccctgtttgaagcctgcccttgtctgagatgctggtaatggccatggtacccccttctgggcatctgttctggtttttaaccattgtcttgttctgtgatgaggggaggggggcacatgctgagtctcccaaggctgcgtctggaggggcccctgcttctccagcctggacccccagctttgcccaacaccagcccctgccccagcccaagtccaaatgtttacagggagcctcctgcccagtcccccaaccccagccgctcggaggccccaaaggaaaaagcacaagaagcgtgagacgccaccattcctggaaaccacagtccacctgctcattctcgtagctttttaaaaaaatgaaagtaaaggaaaaaaaaaaaactgcaaatctagaaaactttttagagaaaaactatttaaaactgtcagatcctgaccagcaagcccccctccacagaattgggttccaagggctgttccagacaactgccaacgtcactgagggccctgccccagcggccctggccccaggctctattaacctaaaatgtagctccctagcgctaacctaggaaccgccgctgcctgctggggggccacgcccctcatgcccttgtcccaggcccggggccttcagcgttgaacacttccttgcttttttcacatgttttatggaattgttcacctggtttgaaataataaaatgtagaaagaaaaaaaa

SEQ ID NO: 341024 - DNA, 2330 bp, Homo sapiens
gccccgccgtcggtgcgcggcggtagggaaggcgcctcccgcagtcgctcggaactgccgacccgagtgcttcccgcagagggctggtggtgggagcggagtgggtcgggcggggccgagccgggccgtgggccgtgtgggggccgggcggcggccgggccggcggacggcgggatgggctgcaccgtgagcgccgaggacaaggcggcggccgagcgctctaagatgatcgacaagaacctgcgggaggacggagagaaggcggcgcgggaggtgaagttgctgctgttgggtgctggggagtcagggaagagcaccatcgtcaagcagatgaagatcatccacgaggatggctactccgaggaggaatgccggcagtaccgggcggttgtctacagcaacaccatccagtccatcatggccattgtcaaagccatgggcaacctgcagatcgactttgccgacccctccagagcggacgacgccaggcagctatttgcactgtcctgcaccgccgaggagcaaggcgtgctccctgatgacctgtccggcgtcatccggaggctctgggctgaccatggtgtgcaggcctgctttggccgctcaagggaataccagctcaacgactcagctgcctactacctgaacgacctggagcgtattgcacagagtgactacatccccacacagcaagatgtgctacggacccgcgtaaagaccacggggatcgtggagacacacttcaccttcaaggacctacacttcaagatgtttgatgtgggtggtcagcggtctgagcggaagaagtggatccactgctttgagggcgtcacagccatcatcttctgcgtagccttgagcgcctatgacttggtgctagctgaggacgaggagatgaaccgcatgcatgagagcatgaagctattcgatagcatctgcaacaacaagtggttcacagacacgtccatcatcctcttcctcaacaagaaggacctgtttgaggagaagatcacacacagtcccctgaccatctgcttccctgagtacacaggggccaacaaatatgatgaggcagccagctacatccagagtaagtttgaggacctgaataagcgcaaagacaccaaggagatctacacgcacttcacgtgcgccaccgacaccaagaacgtgcagttcgtgtttgacgccgtcaccgatgtcatcatcaagaacaacctgaaggactgcggcctcttctgaggggcagcggggcctggcgggatgggccaccgccgactttgtaccccccaacccctgaggaagatgggggcaagaagatcacgctccccgcctgttcccccgccgcttttctcctctttcctctctttgttctcagctccccctgtcccctcagctccagacgtaggggaggggttgccacaggcctccctgtttgaagcctgcccttgtctgagatgctggtaatggccatggtacccccttctgggcatctgttctggtttttaaccattgtcttgttctgtgatgaggggaggggggcacatgctgagtctcccaaggctgcgtctggaggggcccctgcttctccagcctggacccccagctttgcccaacaccagcccctgccccagcccaagtccaaatgtttacagggagcctcctgcccagtcccccaaccccagccgctcggaggccccaaaggaaaaagcacaagaagcgtgagacgccaccattcctggaaaccacagtccacctgctcattctcgtagctttttaaaaaaatgaaagtaaaggaaaaaaaaaaaactgcaaatctagaaaactttttagagaaaaactatttaaaactgtcagatcctgaccagcaagcccccctccacagaattgggttccaagggctgttccagacaactgccaacgtcactgagggccctgccccagcggccctggccccaggctctattaacctaaaatgtagctccctagcgctaacctaggaaccgccgctgcctgctggggggccacgcccctcatgcccttgtcccaggcccggggccttcagcgttgaacacttccttgcttttttcacatgttttatggaattgttcacctggtttgaaataataaaatgtagaaagaaaaaaaactcgcgccgattttttttctgaccaaaacatttaattaacaaaaaaatattacaatagctgagaaaataatcttgataacaattaacagaaattacaagtgggagtcagggtagaaaaaaatgcaaaggccttggtccctaagaaaccaacactacatctgagctggccttaaccccagcc

SEQ ID NO: 341025 - DNA, 1895 bp, Homo sapiens
gccccgccgtcggtgcgcggcggtagggaaggcgcctcccgcagtcgctcggaactgccgacccgagtgcttcccgcagagggctggtggtgggagcggagtgggtcgggcggggccgagccgggccgtgggccgtgtgggggccgggcggcggccgggccggcggacggcgggatgggctgcaccgtgagcgccgaggacaaggcggcggccgagcgctctaagatgatcgacaagaacctgcgggaggacggagagaaggcggcgcgggaggtgaagttgctgctgttgggtgctggggagtcagggaagagcaccatcgtcaagcagatgaagatcatccacgaggatggctactccgaggaggaatgccggcagtaccgggcggttgtctacagcaacaccatccagtccatcatggccattgtcaaagccatgggcaacctgcagatcgactttgccgacccctccagagcggacgacgccaggcagctatttgcactgtcctgcaccgccgaggagcaaggcgtgctccctgatgacctgtccggcgtcatccggaggctctgggctgaccatggtgtgcaggcctgctttggccgctcaagggaataccagctcaacgactcagctgcctactacctgaacgacctggagcgtattgcacagagtgactacatccccacacagcaagatgtgctacggacccgcgtaaagaccacggggatcgtggagacacacttcaccttcaaggacctacacttcaagatgtttgatgtgggtggtcagcggtctgagcggaagaagtggatccactgctttgagggcgtcacagccatcatcttctgcgtagccttgagcgcctatgacttggtgctagctgaggacgaggagatgaaccgcatgcatgagagcatgaagctattcgatagcatctgcaacaacaagtggttcacagacacgtccatcatcctcttcctcaacaagaaggacctgtttgaggagaagatcacacacagtcccctgaccatctgcttccctgagtacacaggggccaacaaatatgatgaggcagccagctacatccagagtaagtttgaggacctgaataagcgcaaagacaccaaggagatctacacgcacttcacgtgcgccaccgacaccaagaacgtgcagttcgtgtttgacgccgtcaccgatgtcatcatcaagaacaacctgaaggactgcggcctcttctgaggggcagcggggcctggcgggatgggccaccgccgactttgtaccccccaacccctgaggaagatgggggcaagaagatcacgctccccgcctgttcccccgccgcttttctcctctttcctctctttgttctcagctccccctgtcccctcagctccagacgtaggggaggggttgccacaggcctccctgtttgaagcctgcccttgtctgagatgctggtaatggccatggtacccccttctgggcatctgttctggtttttaaccattgtcttgttctgtgatgaggggaggggggcacatgctgagtctcccaaggctgcgtctggaggggcccctgcttctccagcctggacccccagctttgcccaacaccagcccctgccccagcccaagtccaaatgtttacagggagcctcctgcccagtcccccaaccccagccgctcggaggccccaaaggaaaaagcacaagaagcgtgagacgccaccattcctggaaaccacagtccacctgctcattctcgtagctttttaaaaaaatgagcaggcgaggcaccagcttgttcttgcctttcatcttctccttcaccaggaagaagggcccgccacttgtccagagggccacgattggggatgtacttgaccccaca

SEQ ID NO: 341026 - DNA, 2160 bp, Homo sapiens
gccccgccgtcggtgcgcggcggtagggaaggcgcctcccgcagtcgctcggaactgccgacccgagtgcttcccgcagagggctggtggtgggagcggagtgggtcgggcggggccgagccgggccgtgggccgtgtgggggccgggcggcggccgggccggcggacggcgggatgggctgcaccgtgagcgccgaggacaaggcggcggccgagcgctctaagatgatcgacaagaacctgcgggaggacggagagaaggcggcgcgggaggtgaagttgctgctgttgggtgctggggagtcagggaagagcaccatcgtcaagcagatgaagatcatccacgaggatggctactccgaggaggaatgccggcagtaccgggcggttgtctacagcaacaccatccagtccatcatggccattgtcaaagccatgggcaacctgcagatcgactttgccgacccctccagagcggacgacgccaggcagctatttgcactgtcctgcaccgccgaggagcaaggcgtgctccctgatgacctgtccggcgtcatccggaggctctgggctgaccatggtgtgcaggcctgctttggccgctcaagggaataccagctcaacgactcagctgcctactacctgaacgacctggagcgtattgcacagagtgactacatccccacacagcaagatgtgctacggacccgcgtaaagaccacggggatcgtggagacacacttcaccttcaaggacctacacttcaagatgtttgatgtgggtggtcagcggtctgagcggaagaagtggatccactgctttgagggcgtcacagccatcatcttctgcgtagccttgagcgcctatgacttggtgctagctgaggacgaggagatgaaccgcatgcatgagagcatgaagctattcgatagcatctgcaacaacaagtggttcacagacacgtccatcatcctcttcctcaacaagaaggacctgtttgaggagaagatcacacacagtcccctgaccatctgcttccctgagtacacaggggccaacaaatatgatgaggcagccagctacatccagagtaagtttgaggacctgaataagcgcaaagacaccaaggagatctacacgcacttcacgtgcgccaccgacaccaagaacgtgcagttcgtgtttgacgccgtcaccgatgtcatcatcaagaacaacctgaaggactgcggcctcttctgaggggcagcggggcctggcgggatgggccaccgccgactttgtaccccccaacccctgaggaagatgggggcaagaagatcacgctccccgcctgttcccccgccgcttttctcctctttcctctctttgttctcagctccccctgtcccctcagctccagacgtaggggaggggttgccacaggcctccctgtttgaagcctgcccttgtctgagatgctggtaatggccatggtacccccttctgggcatctgttctggtttttaaccattgtcttgttctgtgatgaggggaggggggcacatgctgagtctcccaaggctgcgtctggaggggcccccccaaccccagccgctcggaggccccaaaggaaaaagcacaagaagcgtgagacgccaccattcctggaaaccacagtccacctgctcattctcgtagctttttaaaaaaatgaaagtaaaggaaaaaaaaaaaactgcaaatctagaaaactttttagagaaaaactatttaaaactgtcagatcctgaccagcaagcccccccccagccccccttccaagtgactccgtgccttgagtgtgtctgcgtgtttacacccgtccctctgctggccgcccccgtgcgagcggcacccctgccctgccctccacagaattgggttccaagggctgttccagacaactgccaacgtcactgagggccctgccccagcggccctggccccaggctctattaacctaaaatgtagctccctagcgctaacctaggaaccgccgctgcctgctggggggccacgcccctcatgcccttgtcccaggcccggggccttcagcgttgaacacttccttgcttttttcacatgttttatggaattgttcacctggtttgaaataataaaatgtagaaagaaaaaaaa

SEQ ID NO: 341027 - DNA, 2191 bp, Homo sapiens
gccccgccgtcggtgcgcggcggtagggaaggcgcctcccgcagtcgctcggaactgccgacccgagtgcttcccgcagagggctggtggtgggagcggagtgggtcgggcggggccgagccgggccgtgggccgtgtgggggccgggcggcggccgggccggcggacggcgggatgggctgcaccgtgagcgccgaggacaaggcggcggccgagcgctctaagatgatcgacaagaacctgcgggaggacggagagaaggcggcgcgggaggtgaagttgctgctgttgggtgctggggagtcagggaagagcaccatcgtcaagcagatgaagatcatccacgaggatggctactccgaggaggaatgccggcagtaccgggcggttgtctacagcaacaccatccagtccatcatggccattgtcaaagccatgggcaacctgcagatcgactttgccgacccctccagagcggacgacgccaggcagctatttgcactgtcctgcaccgccgaggagcaaggcgtgctccctgatgacctgtccggcgtcatccggaggctctgggctgaccatggtgtgcaggcctgctttggccgctcaagggaataccagctcaacgactcagctgcctactacctgaacgacctggagcgtattgcacagagtgactacatccccacacagcaagatgtgctacggacccgcgtaaagaccacggggatcgtggagacacacttcaccttcaaggacctacacttcaagatgtttgatgtgggtggtcagcggtctgagcggaagaagtggatccactgctttgagggcgtcacagccatcatcttctgcgtagccttgagcgcctatgacttggtgctagctgaggacgaggagatgaaccgcatgcatgagagcatgaagctattcgatagcatctgcaacaacaagtggttcacagacacgtccatcatcctcttcctcaacaagaaggacctgtttgaggagaagatcacacacagtcccctgaccatctgcttccctgagtacacaggggccaacaaatatgatgaggcagccagctacatccagagtaagtttgaggacctgaataagcgcaaagacaccaaggagatctacacgcacttcacgtgcgccaccgacaccaagaacgtgcagttcgtgtttgacgccgtcaccgatgtcatcatcaagaacaacctgaaggactgcggcctcttctgaggggcagcggggcctggcgggatgggccaccgccgactttgtaccccccaacccctgaggaagatgggggcaagaagatcacgctccccgcctgttcccccgccgcttttctcctctttcctctctttgttctcagctccccctgtcccctcagctccagacgtaggggaggggttgccacaggcctccctgtttgaagcctgcccttgtctgagatgctggtaatggccatggtacccccttctgggcatctgttctggtttttaaccattgtcttgttctgtgatgaggggaggggggcacatgctgagtctcccaaggctgcgtctggaggggcccctgcttctccagcctggacccccagctttgcccaacaccagcccctgccccagcccaagtccaaatgtttacagggagcctcctgcccagtcccccaaccccagccgctcggaggccccaaaggaaaaagcacaagaagcgtgagacgccaccattcctggaaaccattctgtggagggcagggcaggggtgccgctcgcacgggggcggccagcagagggacgggtgtaaacacgcagacacactcaaggcacggagtcacttggaaggggggctgggggggggcttgctggtcaggatctgacagttttaaatagtttttctctaaaaagttttctctccacagaattgggttccaagggctgttccagacaactgccaacgtcactgagggccctgccccagcggccctggccccaggctctattaacctaaaatgtagctccctagcgctaacctaggaaccgccgctgcctgctggggggccacgcccctcatgcccttgtcccaggcccggggccttcagcgttgaacacttccttgcttttttcacatgttttatggaattgttcacctggtttgaaataataaaatgtagaaagaaaaaaaa

SEQ ID NO: 341028 - DNA, 1802 bp, Homo sapiens
gccccgccgtcggtgcgcggcggtagggaaggcgcctcccgcagtcgctcggaactgccgacccgagtgcttcccgcagagggctggtggtgggagcggagtgggtcgggcggggccgagccgggccgtgggccgtgtgggggccgggcggcggccgggccggcggacggcgggatgggctgcaccgtgagcgccgaggacaaggcggcggccgagcgctctaagatgatcgacaagaacctgcgggaggacggagagaaggcggcgcgggaggtgaagttgctgctgttgggtgctggggagtcagggaagagcaccatcgtcaagcagatgaagatcatccacgaggatggctactccgaggaggaatgccggcagtaccgggcggttgtctacagcaacaccatccagtccatcatggccattgtcaaagccatgggcaacctgcagatcgactttgccgacccctccagagcggacgacgccaggcagctatttgcactgtcctgcaccgccgaggagcaaggcgtgctccctgatgacctgtccggcgtcatccggaggctctgggctgaccatggtgtgcaggcctgctttggccgctcaagggaataccagctcaacgactcagctgcctactacctgaacgacctggagcgtattgcacagagtgactacatccccacacagcaagatgtgctacggacccgcgtaaagaccacggggatcgtggagacacacttcaccttcaaggacctacacttcaagatgtttgatgtgggtggtcagcggtctgagcggaagaagtggatccactgctttgagggcgtcacagccatcatcttctgcgtagccttgagcgcctatgacttggtgctagctgaggacgaggagatgaaccgcatgcatgagagcatgaagctattcgatagcatctgcaacaacaagtggttcacagacacgtccatcatcctcttcctcaacaagaaggacctgtttgaggagaagatcacacacagtcccctgaccatctgcttccctgagtacacaggggccaacaaatatgatgaggcagccagctacatccagagtaagtttgaggacctgaataagcgcaaagacaccaaggagatctacacgcacttcacgtgcgccaccgacaccaagaacgtgcagttcgtgtttgacgccgtcaccgatgtcatcatcaagaacaacctgaaggactgcggcctcttctgaggggcagcggggcctggcgggatgggccaccgccgactttgtaccccccaacccctgaggaagatgggggcaagaagatcacgctccccgcctgttcccccgccgcttttctcctctttcctctctttgttctcagctccccctgtcccctcagctccagacgtaggggaggggttgccacaggcctccctgtttgaagcctgcccttgtctgagatgctggtaatggccatggtacccccttctgggcatctgttctggtttttaaccattgtcttgttctgtgatgaggggaggggggcacatgctgagtctcccaaggctgcgtctggaggggcccctgcttctccagcctggacccccagctttgcccaacaccagcccctgccccagcccaagtccaaatgtttacagggagcctcctgcccagtcccccaaccccagccgctcggaggccccaaaggaaaaagcacaagaagcgtgagacgccaccattcctggaaaccatcatcttcgcagctttcatatggggcggcggggtgggaggaggcggggggggaa

SEQ ID NO: 341029 - DNA, 2417 bp, Homo sapiens
ccgagtagctgggactacaggcgcccgctaccgcgcccggctaattttttgtatttttaatagagacggggtttcaccgtgttagccaggatggtctcgatctcctgacctcgtgatccgcccgccttggcctcccagagtgctgggatgacaggcgtgagcctctgagagcaaattttacccagttcctctctatcctcccgatgactctgaaatcaaactcagcaagtcatccgagcccccacggcgcagcggccctaggctggcatgggcgatgcggagctactccgccctcaggaagcaggcgaggtgcccagcgggagaatcacccacatcaccgtctaatctctgctgtgaagtggaagcgcgagaaggagggagcgtctcatgacggagggtgtgaagacgctaggctggacgaagcagaaaggcgggtgtcactggggacgttctgagggtgctggggagtcagggaagagcaccatcgtcaagcagatgaagatcatccacgaggatggctactccgaggaggaatgccggcagtaccgggcggttgtctacagcaacaccatccagtccatcatggccattgtcaaagccatgggcaacctgcagatcgactttgccgacccctccagagcggacgacgccaggcagctatttgcactgtcctgcaccgccgaggagcaaggcgtgctccctgatgacctgtccggcgtcatccggaggctctgggctgaccatggtgtgcaggcctgctttggccgctcaagggaataccagctcaacgactcagctgcctactacctgaacgacctggagcgtattgcacagagtgactacatccccacacagcaagatgtgctacggacccgcgtaaagaccacggggatcgtggagacacacttcaccttcaaggacctacacttcaagatgtttgatgtgggtggtcagcggtctgagcggaagaagtggatccactgctttgagggcgtcacagccatcatcttctgcgtagccttgagcgcctatgacttggtgctagctgaggacgaggagatgaaccgcatgcatgagagcatgaagctattcgatagcatctgcaacaacaagtggttcacagacacgtccatcatcctcttcctcaacaagaaggacctgtttgaggagaagatcacacacagtcccctgaccatctgcttccctgagtacacaggggccaacaaatatgatgaggcagccagctacatccagagtaagtttgaggacctgaataagcgcaaagacaccaaggagatctacacgcacttcacgtgcgccaccgacaccaagaacgtgcagttcgtgtttgacgccgtcaccgatgtcatcatcaagaacaacctgaaggactgcggcctcttctgaggggcagcggggcctggcgggatgggccaccgccgactttgtaccccccaacccctgaggaagatgggggcaagaagatcacgctccccgcctgttcccccgccgcttttctcctctttcctctctttgttctcagctccccctgtcccctcagctccagacgtaggggaggggttgccacaggcctccctgtttgaagcctgcccttgtctgagatgctggtaatggccatggtacccccttctgggcatctgttctggtttttaaccattgtcttgttctgtgatgaggggaggggggcacatgctgagtctcccaaggctgcgtctggaggggcccctgcttctccagcctggacccccagctttgcccaacaccagcccctgccccagcccaagtccaaatgtttacagggagcctcctgcccagtcccccaaccccagccgctcggaggccccaaaggaaaaagcacaagaagcgtgagacgccaccattcctggaaaccacagtccacctgctcattctcgtagctttttaaaaaaatgaaagtaaaggaaaaaaaaaaaactgcaaatctagaaaactttttagagaaaaactatttaaaactgtcagatcctgaccagcaagcccccccccagccccccttccaagtgactccgtgccttgagtgtgtctgcgtgtttacacccgtccctctgctggccgcccccgtgcgagcggcacccctgccctgccctccacagaattgggttccaagggctgttccagacaactgccaacgtcactgagggccctgccccagcggccctggccccaggctctattaacctaaaatgtagctccctagcgctaacctaggaaccgccgctgcctgctggggggccacgcccctcatgcccttgtcccaggcccggggccttcagcgttgaacacttccttgcttttttcacatgttttatggaattgttcacctggtttgaaataataaaatgtagaaagaaaaaaaa

SEQ ID NO: 341030 - DNA, 2092 bp, Homo sapiens
tttaatttcatacggggcgaggtgtttccttataaatgactgttcctgggactttacatttatagggcggggccgagccgggccgtgggccgtgcggcggccgagcgctctaagatgatcgacaagaacctggtgctggggagtcagggaagagcaccatcgtcaagcagatgaagatcatccacgaggatggctactccgaggaggaatgccggcagtaccgggcggttgtctacagcaacaccatccagtccatcatggccattgtcaaagccatgggcaacctgcagatcgactttgccgacccctccagagcggacgacgccaggcagctatttgcactgtcctgcaccgccgaggagcaaggcgtgctccctgatgacctgtccggcgtcatccggaggctctgggctgaccatggtgtgcaggcctgctttggccgctcaagggaataccagctcaacgactcagctgcctactacctgaacgacctggagcgtattgcacagagtgactacatccccacacagcaagatgtgctacggacccgcgtaaagaccacggggatcgtggagacacacttcaccttcaaggacctacacttcaagatgtttgatgtgggtggtcagcggtctgagcggaagaagtggatccactgctttgagggcgtcacagccatcatcttctgcgtagccttgagcgcctatgacttggtgctagctgaggacgaggagatgaaccgcatgcatgagagcatgaagctattcgatagcatctgcaacaacaagtggttcacagacacgtccatcatcctcttcctcaacaagaaggacctgtttgaggagaagatcacacacagtcccctgaccatctgcttccctgagtacacaggggccaacaaatatgatgaggcagccagctacatccagagtaagtttgaggacctgaataagcgcaaagacaccaaggagatctacacgcacttcacgtgcgccaccgacaccaagaacgtgcagttcgtgtttgacgccgtcaccgatgtcatcatcaagaacaacctgaaggactgcggcctcttctgaggggcagcggggcctggcgggatgggccaccgccgactttgtaccccccaacccctgaggaagatgggggcaagaagatcacgctccccgcctgttcccccgccgcttttctcctctttcctctctttgttctcagctccccctgtcccctcagctccagacgtaggggaggggttgccacaggcctccctgtttgaagcctgcccttgtctgagatgctggtaatggccatggtacccccttctgggcatctgttctggtttttaaccattgtcttgttctgtgatgaggggaggggggcacatgctgagtctcccaaggctgcgtctggaggggcccctgcttctccagcctggacccccagctttgcccaacaccagcccctgccccagcccaagtccaaatgtttacagggagcctcctgcccagtcccccaaccccagccgctcggaggccccaaaggaaaaagcacaagaagcgtgagacgccaccattcctggaaaccacagtccacctgctcattctcgtagctttttaaaaaaatgaaagtaaaggaaaaaaaaaaaactgcaaatctagaaaactttttagagaaaaactatttaaaactgtcagatcctgaccagcaagcccccccccagccccccttccaagtgactccgtgccttgagtgtgtctgcgtgtttacacccgtccctctgctggccgcccccgtgcgagcggcacccctgccctgccctccacagaattgggttccaagggctgttccagacaactgccaacgtcactgagggccctgccccagcggccctggccccaggctctattaacctaaaatgtagctccctagcgctaacctaggaaccgccgctgcctgctggggggccacgcccctcatgcccttgtcccaggcccggggccttcagcgttgaacacttccttgcttttttcacatgttttatggaattgttcacctggtttgaaataataaaatgtagaaagaaaaaaaa

SEQ ID NO: 341031 - DNA, 1797 bp, Homo sapiens
gccccgccgtcggtgcgcggcggtagggaaggcgcctcccgcagtcgctcggaactgccgacccgagtgcttcccgcagagggctggtggtgggagcggagtgggtcgggcggggccgagccgggccgtgggccgtgtgggggccgggcggcggccgggccggcggacggcgggatgggctgcaccgtgagcgccgaggacaaggcggcggccgagcgctctaagatgatcgacaagaacctgcgggaggacggagagaaggcggcgcgggaggtgaagttgctgctgttgggtgctggggagtcagggaagagcaccatcgtcaagcagatgaagatcatccacgaggatggctactccgaggaggaatgccggcagtaccgggcggttgtctacagcaacaccatccagtccatcatggccattgtcaaagccatgggcaacctgcagatcgactttgccgacccctccagagcggacgacgccaggcagctatttgcactgtcctgcaccgccgaggagcaaggcgtgctccctgatgacctgtccggcgtcatccggaggctctgggctgaccatggtgtgcaggcctgctttggccgctcaagggaataccagctcaacgactcagctgcctactacctgaacgacctggagcgtattgcacagagtgactacatccccacacagcaagatgtgctacggacccgcgtaaagaccacggggatcgtggagacacacttcaccttcaaggacctacacttcaagatgtttgatgtgggtggtcagcggtctgagcggaagaagtggatccactgctttgagggcgtcacagccatcatcttctgcgtagccttgagcgcctatgacttggtgctagctgaggacgaggagatgaaccgcatgcatgagagcatgaagctattcgatagcatctgcaacaacaagtggttcacagacacgtccatcatcctcttcctcaacaagaaggacctgtttgaggagaagatcacacacagtcccctgaccatctgcttccctgagtacacaggggccaacaaatatgatgaggcagccagctacatccagagtaagtttgaggacctgaataagcgcaaagacaccaaggagatctacacgcacttcacgtgcgccaccgacaccaagaacgtgcagttcgtgtttgacgccgtcaccgatgtcatcatcaagaacaacctgaaggactgcggcctcttctgaggggcagcggggcctggcgggatgggccaccgccgactttgtaccccccaacccctgaggaagatgggggcaagaagatcacgctccccgcctgttcccccgccgcttttctcctctttcctctctttgttctcagctccccctgtcccctcagctccagacgtaggggaggggttgccacaggcctccctgtttgaagcctgcccttgtctgagatgctggtaatggccatggtacccccttctgggcatctgttctggtttttaaccattgtcttgttctgtgatgaggggaggggggcacatgctgagtctcccaaggctgcgtctggaggggcccctgcttctccagcctggacccccagctttgcccaacaccagcccctgccccagcccaagtccaaatgtttacagggagcctcctgcccagtcgtcctcctacaggcggtcgcaggtcccaagggcgacggtgcgggtggggtcagtgtcccccattctagtatgcctctgtgcccctgctcgttatagtaagtttttaaacttataaaagtaaaga

SEQ ID NO: 341032 - DNA, 1937 bp, Homo sapiens
tcctggtccctggctatcaggatcatccacgaggatggctactccgaggaggaatgccggcagtaccgggcggttgtctacagcaacaccatccagtccatcatggccattgtcaaagccatgggcaacctgcagatcgactttgccgacccctccagagcggacgacgccaggcagctatttgcactgtcctgcaccgccgaggagcaaggcgtgctccctgatgacctgtccggcgtcatccggaggctctgggctgaccatggtgtgcaggcctgctttggccgctcaagggaataccagctcaacgactcagctgcctactacctgaacgacctggagcgtattgcacagagtgactacatccccacacagcaagatgtgctacggacccgcgtaaagaccacggggatcgtggagacacacttcaccttcaaggacctacacttcaagatgtttgatgtgggtggtcagcggtctgagcggaagaagtggatccactgctttgagggcgtcacagccatcatcttctgcgtagccttgagcgcctatgacttggtgctagctgaggacgaggagatgaaccgcatgcatgagagcatgaagctattcgatagcatctgcaacaacaagtggttcacagacacgtccatcatcctcttcctcaacaagaaggacctgtttgaggagaagatcacacacagtcccctgaccatctgcttccctgagtacacaggggccaacaaatatgatgaggcagccagctacatccagagtaagtttgaggacctgaataagcgcaaagacaccaaggagatctacacgcacttcacgtgcgccaccgacaccaagaacgtgcagttcgtgtttgacgccgtcaccgatgtcatcatcaagaacaacctgaaggactgcggcctcttctgaggggcagcggggcctggcgggatgggccaccgccgactttgtaccccccaacccctgaggaagatgggggcaagaagatcacgctccccgcctgttcccccgccgcttttctcctctttcctctctttgttctcagctccccctgtcccctcagctccagacgtaggggaggggttgccacaggcctccctgtttgaagcctgcccttgtctgagatgctggtaatggccatggtacccccttctgggcatctgttctggtttttaaccattgtcttgttctgtgatgaggggaggggggcacatgctgagtctcccaaggctgcgtctggaggggcccctgcttctccagcctggacccccagctttgcccaacaccagcccctgccccagcccaagtccaaatgtttacagggagcctcctgcccagtcccccaaccccagccgctcggaggccccaaaggaaaaagcacaagaagcgtgagacgccaccattcctggaaaccacagtccacctgctcattctcgtagctttttaaaaaaatgaaagtaaaggaaaaaaaaaaaactgcaaatctagaaaactttttagagaaaaactatttaaaactgtcagatcctgaccagcaagcccccccccagccccccttccaagtgactccgtgccttgagtgtgtctgcgtgtttacacccgtccctctgctggccgcccccgtgcgagcggcacccctgccctgccctccacagaattgggttccaagggctgttccagacaactgccaacgtcactgagggccctgccccagcggccctggccccaggctctattaacctaaaatgtagctccctagcgctaacctaggaaccgccgctgcctgctggggggccacgcccctcatgcccttgtcccaggcccggggccttcagcgttgaacacttccttgcttttttcacatgttttatggaattgttcacctggtttgaaataataaaatgtagaaagaaaaaaaa

SEQ ID NO: 341033 - DNA, 2314 bp, Homo sapiens
gccccgccgtcggtgcgcggcggtagggaaggcgcctcccgcagtcgctcggaactgccgacccgagtgcttcccgcagagggctggtggtgggagcggagtgggtcgggcggggccgagccgggccgtgggccgtgtgggggccgggcggcggccgggccggcggacggcgggatgggctgcaccgtgagcgccgaggacaaggcggcggccgagcgctctaagatgatcgacaagaacctgcgggaggacggagagaaggcggcgcgggaggtgaagttgctgctgttggctggggagtcagggaagatgcaccatcgtcaaagcagattaagatccattccacaagattgcgttatctcgagagagagagatagtcccggggctatccgcgcgggttgttcgtactagcaagacaaccagtcacatcgctagtctcatcgatcgatcagtttgtacgacacaatggatgggagcatagcattgctagatctgacgtttagcccgatcacctccagaagctggaccgacgcccgtgggacgacgccaggcagctatttgcactgtcctgcaccgccgaggagcaaggcgtgctccctgatgacctgtccggcgtcatccggaggctctgggctgaccatggtgtgcaggcctgctttggccgctcaagggaataccagctcaacgactcagctgcctactacctgaacgacctggagcgtattgcacagagtgactacatccccacacagcaagatgtgctacggacccgcgtaaagaccacggggatcgtggagacacacttcaccttcaaggacctacacttcaagatgtttgatgtgggtggtcagcggtctgagcggaagaagtggatccactgctttgagggcgtcacagccatcatcttctgcgtagccttgagcgcctatgacttggtgctagctgaggacgaggagatgaaccgcatgcatgagagcatgaagctattcgatagcatctgcaacaacaagtggttcacagacacgtccatcatcctcttcctcaacaagaaggacctgtttgaggagaagatcacacacagtcccctgaccatctgcttccctgagtacacaggggccaacaaatatgatgaggcagccagctacatccagagtaagtttgaggacctgaataagcgcaaagacaccaaggagatctacacgcacttcacgtgcgccaccgacaccaagaacgtgcagttcgtgtttgacgccgtcaccgatgtcatcatcaagaacaacctgaaggactgcggcctcttctgaggggcagcggggcctggcgggatgggccaccgccgactttgtaccccccaacccctgaggaagatgggggcaagaagatcacgctccccgcctgttcccccgccgcttttctcctctttcctctctttgttctcagctccccctgtcccctcagctccagacgtaggggaggggttgccacaggcctccctgtttgaagcctgcccttgtctgagatgctggtaatggccatggtacccccttctgggcatctgttctggtttttaaccattgtcttgttctgtgatgaggggaggggggcacatgctgagtctcccaaggctgcgtctggaggggcccctgcttctccagcctggacccccagctttgcccaacaccagcccctgccccagcccaagtccaaatgtttacagggagcctcctgcccagtcccccaaccccagccgctcggaggccccaaaggaaaaagcacaagaagcgtgagacgccaccattcctggaaaccacagtccacctgctcattctcgtagctttttaaaaaaatgaaagtaaaggaaaaaaaaaaaactgcaaatctagaaaactttttagagaaaaactatttaaaactgtcagatcctgaccagcaagcccccccccagccccccttccaagtgactccgtgccttgagtgtgtctgcgtgtttacacccgtccctctgctggccgcccccgtgcgagcggcacccctgccctgccctccacagaattgggttccaagggctgttccagacaactgccaacgtcactgagggccctgccccagcggccctggccccaggctctattaacctaaaatgtagctccctagcgctaacctaggaaccgccgctgcctgctggggggccacgcccctcatgcccttgtcccaggcccggggccttcagcgttgaacacttccttgcttttttcacatgttttatggaattgttcacctggtttgaaataataaaatgtagaaagaaaaaaaa

SEQ ID NO: 341034 - DNA, 1834 bp, Homo sapiens
cccgggctgcaggaattcggcaccagctgcagatcgtctttgccgacccctccagagcggacgacgccaggcagctatttgcactgtcctgcaccgccgaggagcaaggcgtgctccctgatgacctgtccggcgtcatccggaggctctgggctgaccatggtgtgcaggcctgctttggccgctcaagggaataccagctcaacgactcagctgcctactacctgaacgacctggagcgtattgcacagagtgactacatccccacacagcaagatgtgctacggacccgcgtaaagaccacggggatcgtggagacacacttcaccttcaaggacctacacttcaagatgtttgatgtgggtggtcagcggtctgagcggaagaagtggatccactgctttgagggcgtcacagccatcatcttctgcgtagccttgagcgcctatgacttggtgctagctgaggacgaggagatgaaccgcatgcatgagagcatgaagctattcgatagcatctgcaacaacaagtggttcacagacacgtccatcatcctcttcctcaacaagaaggacctgtttgaggagaagatcacacacagtcccctgaccatctgcttccctgagtacacaggggccaacaaatatgatgaggcagccagctacatccagagtaagtttgaggacctgaataagcgcaaagacaccaaggagatctacacgcacttcacgtgcgccaccgacaccaagaacgtgcagttcgtgtttgacgccgtcaccgatgtcatcatcaagaacaacctgaaggactgcggcctcttctgaggggcagcggggcctggcgggatgggccaccgccgactttgtaccccccaacccctgaggaagatgggggcaagaagatcacgctccccgcctgttcccccgccgcttttctcctctttcctctctttgttctcagctccccctgtcccctcagctccagacgtaggggaggggttgccacaggcctccctgtttgaagcctgcccttgtctgagatgctggtaatggccatggtacccccttctgggcatctgttctggtttttaaccattgtcttgttctgtgatgaggggaggggggcacatgctgagtctcccaaggctgcgtctggaggggcccctgcttctccagcctggacccccagctttgcccaacaccagcccctgccccagcccaagtccaaatgtttacagggagcctcctgcccagtcccccaaccccagccgctcggaggccccaaaggaaaaagcacaagaagcgtgagacgccaccattcctggaaaccacagtccacctgctcattctcgtagctttttaaaaaaatgaaagtaaaggaaaaaaaaaaaactgcaaatctagaaaactttttagagaaaaactatttaaaactgtcagatcctgaccagcaagcccccccccagccccccttccaagtgactccgtgccttgagtgtgtctgcgtgtttacacccgtccctctgctggccgcccccgtgcgagcggcacccctgccctgccctccacagaattgggttccaagggctgttccagacaactgccaacgtcactgagggccctgccccagcggccctggccccaggctctattaacctaaaatgtagctccctagcgctaacctaggaaccgccgctgcctgctggggggccacgcccctcatgcccttgtcccaggcccggggccttcagcgttgaacacttccttgcttttttcacatgttttatggaattgttcacctggtttgaaataataaaatgtagaaagaaaaaaaa

SEQ ID NO: 341035 - DNA, 2091 bp, Homo sapiens
gccccgccgtcggtgcgcggcggtagggaaggcgcctcccgcagtcgctcggaactgccgacccgagtgcttcccgcagagggctggtggtgggagcggagtgggtcgggcggggccgagccgggccgtgggccgtgtgggggccgggcggcggccgggccggcggacggcgggatgggctgcaccgtgagcgccgaggacaaggcggcggccgagcgctctaagatgatcgacaagaacctgcgggaggacggagagaaggcggcgcgggaggtgaagttgctgctgttgggtgctggggagtcagggaagagcaccatcgtcaagcagatgaagatcatccacgaggatggctactccgaggaggaatgccggcagtaccgggcggttgtctacagcaacaccatccagtccatcatggccattgtcaaagccatgggcaacctgcagatcgactttgccgacccctccagagcgctacctgaacgacctggagcgtattgcacagagtgactacatccccacacagcaagatgtgctacggacccgcgtaaagaccacggggatcgtggagacacacttcaccttcaaggacctacacttcaagatgtttgatgtgggtggtcagcggtctgagcggaagaagtggatccactgctttgagggcgtcacagccatcatcttctgcgtagccttgagcgcctatgacttggtgctagctgaggacgaggagatgaaccgcatgcatgagagcatgaagctattcgatagcatctgcaacaacaagtggttcacagacacgtccatcatcctcttcctcaacaagaaggacctgtttgaggagaagatcacacacagtcccctgaccatctgcttccctgagtacacaggggccaacaaatatgatgaggcagccagctacatccagagtaagtttgaggacctgaataagcgcaaagacaccaaggagatctacacgcacttcacgtgcgccaccgacaccaagaacgtgcagttcgtgtttgacgccgtcaccgatgtcatcatcaagaacaacctgaaggactgcggcctcttctgaggggcagcggggcctggcgggatgggccaccgccgactttgtaccccccaacccctgaggaagatgggggcaagaagatcacgctccccgcctgttcccccgccgcttttctcctctttcctctctttgttctcagctccccctgtcccctcagctccagacgtaggggaggggttgccacaggcctccctgtttgaagcctgcccttgtctgagatgctggtaatggccatggtacccccttctgggcatctgttctggtttttaaccattgtcttgttctgtgatgaggggaggggggcacatgctgagtctcccaaggctgcgtctggaggggcccctgcttctccagcctggacccccagctttgcccaacaccagcccctgccccagcccaagtccaaatgtttacagggagcctcctgcccagtcccccaaccccagccgctcggaggccccaaaggaaaaagcacaagaagcgtgagacgccaccattcctggaaaccacagtccacctgctcattctcgtagctttttaaaaaaatgaaagtaaaggaaaaaaaaaaaactgcaaatctagaaaactttttagagaaaaactatttaaaactgtcagatcctgaccagcaagcccccccccagccccccttccaagtgactccgtgccttgagtgtgtctgcgtgtttacacccgtccctctgctggccgcccccgtgcgagcggcacccctgccctgccctccacagaattgggttccaagggctgttccagacaactgccaacgtcactgagggccctgccccagcggccctggccccaggctctattaacctaaaatgtagctccctagcgctaacctaggaaccgccgctgcctgctggggggccacgcccctcatgcccttgtcccaggcccggggccttcagcgttgaacacttccttgcttttttcacatgttttatggaattgttcacctggtttgaaataataaaatgtagaaagaaaaaaaa

SEQ ID NO: 341036 - DNA, 1353 bp, Homo sapiens
gccccgccgtcggtgcgcggcggtagggaaggcgcctcccgcagtcgctcggaactgccgacccgagtgcttcccgcagagggctggtggtgggagcggagtgggtcgggcggggccgagccgggccgtgggccgtgtgggggccgggcggcggccgggccggcggacggcgggatgggctgcaccgtgagcgccgaggacaaggcggcggccgagcgctctaagatgatcgacaagaacctgcgggaggacggagagaaggcggcgcgggaggtgaagttgctgctgttgggtgctggggagtcagggaagagcaccatcgtcaagcagatgaagatcatccacgaggatggctactccgaggaggaatgccggcagtaccgggcggttgtctacagcaacaccatccagtccatcatggccattgtcaaagccatgggcaacctgcagatcgactttgccgacccctccagagcggacgacgccaggcagctatttgcactgtcctgcaccgccgaggagcaaggcgtgctccctgatgacctgtccggcgtcatccggaggctctgggctgaccatggtgtgcaggcctgctttggccgctcaagggaataccagctcaacgactcagctgcctactacctgaacgacctggagcgtattgcacagagtgactacatccccacacagcaagatgtgctacggacccgcgtaaagaccacggggatcgtggagacacacttcaccttcaaggacctacacttcaagatgtttgatgtgggtggtcagcggtctgagcggaagaagtggatccactgctttgagggcgtcacagccatcatcttctgcgtagccttgagcgcctatgacttggtgctagctgaggacgaggagatgaaccgcatgcatgagagcatgaagctattcgatagcatctgcaacaacaagtggttcacagacacgtccatcatcctcttcctcaacaagaaggacctgtttgaggagaagatcacacacagtcccctgaccatctgcttccctgagtacacaggggccaacaaatatgatgaggcagccagctacatccagagtaagtttgaggacctgaataagcgcaaagacaccaaggagatctacacgcacttcacgtgcgccaccgacaccaagaacgtgcagttcgtgtttgacgccgtcaccgatgtcatcatcaagaacaacctgaaggactgcggcctcttctgaggggcagcggggcctggcgggatggtgagccagaggggctgtggcagggtgctggggaagaactaagcgggcctggagccccagcagggggttctgggggtgggtaggggg

SEQ ID NO: 341037 - DNA, 1590 bp, Homo sapiens
aagaggatcacaagctttggtcagcacgcaagatgtgctacggacccgcgtaaagaccacggggatcgtggagacacacttcaccttcaaggacctacacttcaagatgtttgatgtgggtggtcagcggtctgagcggaagaagtggatccactgctttgagggcgtcacagccatcatcttctgcgtagccttgagcgcctatgacttggtgctagctgaggacgaggagatgaaccgcatgcatgagagcatgaagctattcgatagcatctgcaacaacaagtggttcacagacacgtccatcatcctcttcctcaacaagaaggacctgtttgaggagaagatcacacacagtcccctgaccatctgcttccctgagtacacaggggccaacaaatatgatgaggcagccagctacatccagagtaagtttgaggacctgaataagcgcaaagacaccaaggagatctacacgcacttcacgtgcgccaccgacaccaagaacgtgcagttcgtgtttgacgccgtcaccgatgtcatcatcaagaacaacctgaaggactgcggcctcttctgaggggcagcggggcctggcgggatgggccaccgccgactttgtaccccccaacccctgaggaagatgggggcaagaagatcacgctccccgcctgttcccccgccgcttttctcctctttcctctctttgttctcagctccccctgtcccctcagctccagacgtaggggaggggttgccacaggcctccctgtttgaagcctgcccttgtctgagatgctggtaatggccatggtacccccttctgggcatctgttctggtttttaaccattgtcttgttctgtgatgaggggaggggggcacatgctgagtctcccaaggctgcgtctggaggggcccctgcttctccagcctggacccccagctttgcccaacaccagcccctgccccagcccaagtccaaatgtttacagggagcctcctgcccagtcccccaaccccagccgctcggaggccccaaaggaaaaagcacaagaagcgtgagacgccaccattcctggaaaccacagtccacctgctcattctcgtagctttttaaaaaaatgaaagtaaaggaaaaaaaaaaaactgcaaatctagaaaactttttagagaaaaactatttaaaactgtcagatcctgaccagcaagcccccccccagccccccttccaagtgactccgtgccttgagtgtgtctgcgtgtttacacccgtccctctgctggccgcccccgtgcgagcggcacccctgccctgccctccacagaattgggttccaagggctgttccagacaactgccaacgtcactgagggccctgccccagcggccctggccccaggctctattaacctaaaatgtagctccctagcgctaacctaggaaccgccgctgcctgctggggggccacgcccctcatgcccttgtcccaggcccggggccttcagcgttgaacacttccttgcttttttcacatgttttatggaattgttcacctggtttgaaataataaaatgtagaaagaaaaaaaa

SEQ ID NO: 341038 - DNA, 1333 bp, Homo sapiens
gccccgccgtcggtgcgcggcggtagggaaggcgcctcccgcagtcgctcggaactgccgacccgagtgcttcccgcagagggctggtggtgggagcggagtgggtcgggcggggccgagccgggccgtgggccgtgtgggggccgggcggcggccgggccggcggacggcgggatgggctgcaccgtgagcgccgaggacaaggcggcggccgagcgctctaagatgatcgacaagaacctgcgggaggacggagagaaggcggcgcgggaggtgaagttgctgctgttgggtgctggggagtcagggaagagcaccatcgtcaagcagatgaagatcatccacgaggatggctactccgaggaggaatgccggcagtaccgggcggttgtctacagcaacaccatccagtccatcatggccattgtcaaagccatgggcaacctgcagatcgactttgccgacccctccagagcggacgacgccaggcagctatttgcactgtcctgcaccgccgaggagcaaggcgtgctccctgatgacctgtccggcgtcatccggaggctctgggctgaccatggtgtgcaggcctgctttggccgctcaagggaataccagctcaacgactcagctgcctactacctgaacgacctggagcgtattgcacagagtgactacatccccacacagcaagatgtgctacggacccgcgtaaagaccacggggatcgtggagacacacttcaccttcaaggacctacacttcaagatgtttgatgtgggtggtcagcggtctgagcggaagaagtggatccactgctttgagggcgtcacagccatcatcttctgcgtagccttgagcgcctatgacttggtgctagctgaggacgaggagatgaaccgcatgcatgagagcatgaagctattcgatagcatctgcaacaacaagtggttcacagacacgtccatcatcctcttcctcaacaagaaggacctgtttgaggagaagatcacacgtccctctgctggccgcccccgtgcgagcggcacccctgccctgccctccacagaattgggttccaagggctgttccagacaactgccaacgtcactgagggccctgccccagcggccctggccccaggctctattaacctaaaatgtagctccctagcgctaacctaggaaccgccgctgcctgctggggggccacgcccctcatgcccttgtcccaggcccggggccttcagcgttgaacacttccttgcttttttcacatgttttatggaattgttcacctggtttgaaataataaaatgtagaaagaaaaaaaa

SEQ ID NO: 341039 - DNA, 1187 bp, Homo sapiens
gccccgccgtcggtgcgcggcggtagggaaggcgcctcccgcagtcgctcggaactgccgacccgagtgcttcccgcagagggctggtggtgggagcggagtgggtcgggcggggccgagccgggccgtgggccgtgtgggggccgggcggcggccgggccggcggacggcgggatgggctgcaccgtgagcgccgaggacaaggcggcggccgagcgctctaagatgatcgacaagaacctgcgggaggacggagagaaggcggcgcgggaggtgaagttgctgctgttgggtgctggggagtcagggaagagcaccatcgtcaagcagatgaagatcatccacgaggatggctactccgaggaggaatgccggcagtaccgggcggttgtctacagcaacaccatccagtccatcatggccattgtcaaagccatgggcaacctgcagatcgactttgccgacccctccagagcggacgacgccaggcagctatttgcactgtcctgcaccgccgaggagcaaggcgtgctccctgatgacctgtccggcgtcatccggaggctctgggctgaccatggtgtgcaggcctgctttggccgctcaagggaataccagctcaacgactcagctgcctactacctgaacgacctggagcgtattgcacagagtgactacatccccacacagcaagatgtgctacggacccgcgtaaagaccacggggatcgtggagacacacttcaccttcaaggacctacacttcaagatgtttgatgtgggtggtcagcggtctgagcggaagaagtggatccactgctttgagggcgtcacagccatcatcttctgcgtagccttgagcgcctatgacttggtgctagctgaggacgaggagatgaaccgcatgcatgagagcatgaagctattcgatagcatctgcaacaacaagtggttcacagacacgtccatcatcctcttcctcaacaagaaggacctgtttgaggagaagatcacactaagatgggtcagatggacgtgcgctgctgtccaacctgcacctcatccgagcctgacttgatggtctgcatcaatggccagtgatgtactcgtcaaatgtcattggacagcatgaaccttgaacagtcgggtctagacacatagtccactcctggctaacaggcgttatac

SEQ ID NO: 341040 - DNA, 1559 bp, Homo sapiens
gccccgccgtcggtgcgcggcggtagggaaggcgcctcccgcagtcgctcggaactgccgacccgagtgcttcccgcagagggctggtggtgggagcggagtgggtcgggcggggccgagccgggccgtgggccgtgtgggggccgggcggcggccgggccggcggacggcgggatgggctgcaccgtgagcgccgaggacaagaaccgcatgcatgagagcatgaagctattcgatagcatctgcaacaacaagtggttcacagacacgtccatcatcctcttcctcaacaagaaggacctgtttgaggagaagatcacacacagtcccctgaccatctgcttccctgagtacacaggggccaacaaatatgatgaggcagccagctacatccagagtaagtttgaggacctgaataagcgcaaagacaccaaggagatctacacgcacttcacgtgcgccaccgacaccaagaacgtgcagttcgtgtttgacgccgtcaccgatgtcatcatcaagaacaacctgaaggactgcggcctcttctgaggggcagcggggcctggcgggatgggccaccgccgactttgtaccccccaacccctgaggaagatgggggcaagaagatcacgctccccgcctgttcccccgccgcttttctcctctttcctctctttgttctcagctccccctgtcccctcagctccagacgtaggggaggggttgccacaggcctccctgtttgaagcctgcccttgtctgagatgctggtaatggccatggtacccccttctgggcatctgttctggtttttaaccattgtcttgttctgtgatgaggggaggggggcacatgctgagtctcccaaggctgcgtctggaggggcccctgcttctccagcctggacccccagctttgcccaacaccagcccctgccccagcccaagtccaaatgtttacagggagcctcctgcccagtcccccaaccccagccgctcggaggccccaaaggaaaaagcacaagaagcgtgagacgccaccattcctggaaaccacagtccacctgctcattctcgtagctttttaaaaaaatgaaagtaaaggaaaaaaaaaaaactgcaaatctagaaaactttttagagaaaaactatttaaaactgtcagatcctgaccagcaagcccccccccagccccccttccaagtgactccgtgccttgagtgtgtctgcgtgtttacacccgtccctctgctggccgcccccgtgcgagcggcacccctgccctgccctccacagaattgggttccaagggctgttccagacaactgccaacgtcactgagggccctgccccagcggccctggccccaggctctattaacctaaaatgtagctccctagcgctaacctaggaaccgccgctgcctgctggggggccacgcccctcatgcccttgtcccaggcccggggccttcagcgttgaacacttccttgcttttttcacatgttttatggaattgttcacctggtttgaaataataaaatgtagaaagaaaaaaaa

SEQ ID NO: 341041 - DNA, 1541 bp, Homo sapiens
gagggggaggggcaataggtgaccagggacaagggaggagaaggcccaggtgtgaatcaggaggtcaagtgagtgaggtgcagggcatggaggaggtcatacaagcaggcctggcccagtggtccagacagaagggcctggccttgccctgggacagaaccagaggccatcctgatgttccctggagaaatctcacctcctcacccaccaggccattggcccagcctgccggaagctgcatgccagcggagcccagccctgctgcccactaccaccagctccatgtgcacctccagctcttgccctctgacttgtctgagcgtcccgggcttaggctggccccactggccctggtggaggtggggatgactctcccagtgccacagactcccctcccccacgtaacccagcaacagaaactggctcctgggcggcaactgtgtccctggtaacaaatgggtaggaaaaatagagaagggtcattgtctagggaggcgggagagaggcacgccctggctgcttcccgatccatgctctgctttcccccacctccagggccaccgccgactttgtaccccccaacccctgaggaagatgggggcaagaagatcacgctccccgcctgttcccccgccgcttttctcctctttcctctctttgttctcagctccccctgtcccctcagctccagacgtaggggaggggttgccacaggcctccctgtttgaagcctgcccttgtctgagatgctggtaatggccatggtacccccttctgggcatctgttctggtttttaaccattgtcttgttctgtgatgaggggaggggggcacatgctgagtctcccaaggctgcgtctggaggggcccctgcttctccagcctggacccccagctttgcccaacaccagcccctgccccagcccaagtccaaatgtttacagggagcctcctgcccagtcccccaaccccagccgctcggaggccccaaaggaaaaagcacaagaagcgtgagacgccaccattcctggaaaccacagtccacctgctcattctcgtagctttttaaaaaaatgaaagtaaaggaaaaaaaaaaaactgcaaatctagaaaactttttagagaaaaactatttaaaactgtcagatcctgaccagcaagcccccccccagccccccttccaagtgactccgtgccttgagtgtgtctgcgtgtttacacccgtccctctgctggccgcccccgtgcgagcggcacccctgccctgccctccacagaattgggttccaagggctgttccagacaactgccaacgtcactgagggccctgccccagcggccctggccccaggctctattaacctaaaatgtagctccctagcgctaacctaggaaccgccgctgcctgctggggggccacgcccctcatgcccttgtcccaggcccggggccttcagcgttgaacacttccttgcttttttcacatgttttatggaattgttcacctggtttgaaataataaaatgtagaaagaaaaaaaa

SEQ ID NO: 341042 - DNA, 1028 bp, Homo sapiens
cccttcaatggctccgggacccatgatggggactgacttgaagaccaaagatgctgtgttccatggtcctccctgaggaagatgggggcaagaagatcacgctccccgcctgttcccccgccgcttttctcctctttcctctctttgttctcagctccccctgtcccctcagctccagacgtaggggaggggttgccacaggcctccctgtttgaagcctgcccttgtctgagatgctggtaatggccatggtacccccttctgggcatctgttctggtttttaaccattgtcttgttctgtgatgaggggaggggggcacatgctgagtctcccaaggctgcgtctggaggggcccctgcttctccagcctggacccccagctttgcccaacaccagcccctgccccagcccaagtccaaatgtttacagggagcctcctgcccagtcccccaaccccagccgctcggaggccccaaaggaaaaagcacaagaagcgtgagacgccaccattcctggaaaccacagtccacctgctcattctcgtagctttttaaaaaaatgaaagtaaaggaaaaaaaaaaaactgcaaatctagaaaactttttagagaaaaactatttaaaactgtcagatcctgaccagcaagcccccccccagccccccttccaagtgactccgtgccttgagtgtgtctgcgtgtttacacccgtccctctgctggccgcccccgtgcgagcggcacccctgccctgccctccacagaattgggttccaagggctgttccagacaactgccaacgtcactgagggccctgccccagcggccctggccccaggctctattaacctaaaatgtagctccctagcgctaacctaggaaccgccgctgcctgctggggggccacgcccctcatgcccttgtcccaggcccggggccttcagcgttgaacacttccttgcttttttcacatgttttatggaattgttcacctggtttgaaataataaaatgtagaaagaaaaaaaa

SEQ ID NO: 341043 - DNA, 919 bp, Homo sapiens
gccccgccgtcggtgcgcggcggtagggaaggcgcctcccgcagtcgctcggaactgccgacccgagtgcttcccgcagagggctggtggtgggagcggagtgggtcgggcggggccgagccgggccgtgggccgtgtgggggccgggcggcggccgggccggcggacggcgggatgggctgcaccgtgagcgccgaggacaaggcggcggccgagcgctctaagatgatcgacaagaacctgcgggaggacggagagaaggcggcgcgggaggtgaagttgctgctgttggctgccccagcccaagtccaaatgtttacagggagcctcctgcccagtcccccaaccccagccgctcggaggccccaaaggaaaaagcacaagaagcgtgagacgccaccattcctggaaaccacagtccacctgctcattctcgtagctttttaaaaaaatgaaagtaaaggaaaaaaaaaaaactgcaaatctagaaaactttttagagaaaaactatttaaaactgtcagatcctgaccagcaagcccccccccagccccccttccaagtgactccgtgccttgagtgtgtctgcgtgtttacacccgtccctctgctggccgcccccgtgcgagcggcacccctgccctgccctccacagaattgggttccaagggctgttccagacaactgccaacgtcactgagggccctgccccagcggccctggccccaggctctattaacctaaaatgtagctccctagcgctaacctaggaaccgccgctgcctgctggggggccacgcccctcatgcccttgtcccaggcccggggccttcagcgttgaacacttccttgcttttttcacatgttttatggaattgttcacctggtttgaaataataaaatgtagaaagaaaaaaaa

SEQ ID NO: 341044 - DNA, 828 bp, Homo sapiens
gccccgccgtcggtgcgcggcggtagggaaggcgcctcccgcagtcgctcggaactgccgacccgagtgcttcccgcagagggctggtggtgggagcggagtgggtcgggcggggccgagccgggccgtgggccgtgtgggggccgggcggcggccgggccggcggacggcgggatgggctgcaccgtgagcgccgaggacaaggcggcggccgagcgctctaagatgatcgacaagaacctgcgggaggacggagagaaggcggcgcgggaggtgaagttgctgctgttgggtgctggggagtcagggaagagcaccatcgtcaagcagatgaagatcatccacgaggatggctactccgaggaggaatgccggcagtaccgggcggttgtctacagcaacaccatccagtccatcatggccattgtcaaagccatgggcaacctgcagatcgactttgccgacccctccagagcggacgacgccaggcagctatttgcactgtcctgcaccgccgaggagcaaggcgtgctccctgatgacctgtccggcgtcatccggaggctctgggctgaccatggtgtgcaggcctgctttggccgctcaagggaataccagctcaacgactcagctgcctactacctgaacgacctggagcgtattgcacagagtgactacatccccacacaatggctgtgacgccctcaaagcagtggatccacttcttccgctcagaccgctgaccacccacatcaaacatcttgaagtgtaggtccttgaaggtgaagtgtgtcttcacgatccccgtgtctatacgcggtcctatca

SEQ ID NO: 341045 - DNA, 415 bp, Homo sapiens
aattataaatatactacgtaaattcattaaaggagtaaatatgtgaatagaaaaaattatacttgaataaaaacaggaaaaagtagcggatataagttcgaataatgaacagaagaatgtaatgaataagaccatctatcatcctccacagaattgggttccaagggctgttccagacaactgccaacgtcactgagggccctgccccagcggccctggccccaggctctattaacctaaaatgtagctccctagcgctaacctaggaaccgccgctgcctgctggggggccacgcccctcatgcccttgtcccaggcccggggccttcagcgttgaacacttccttgcttttttcacatgttttatggaattgttcacctggtttgaaataataaaatgtagaaagaaaaaaaa

SEQ ID NO: 341046 - DNA, 480 bp, Homo sapiens
gccccgccgtcggtgcgcggcggtagggaaggcgcctcccgcagtcgctcggaactgccgacccgagtgcttcccgcagagggctggtggtgggagcggagtgggtcgggcggggccgagccgggccgtgggccgtgtgggggccgggcggcggccgggccggcggacggcgggatgggctgcaccgtgagcgccgaggacaaggcggcggccgagcgctctaagatgatcgacaagaacctgcgggaggacggagagaaggcggcgcgggaggtgaagttgctgctgttgggtgctggggagtcagggaagagcaccatcgtcaagcagatgaagatcatccacgaggatggctactccgaggaggaatgccggcagtaccgggcggttgtctacagcaattcgccaggggggggtcaacactcaacggctgaagtttcactccatgtcatcataagctgcttttgacaccaatgataa

SEQ ID NO: 341047 - DNA, 345 bp, Homo sapiens
gccccgccgtcggtgcgcggcggtagggaaggcgcctcccgcagtcgctcggaactgccgacccgagtgcttcccgcagagggctggtggtgggagcggagtgggtcgggcggggccgagccgggccgtgggccgtgtgggggccgggcggcggccgggccggcggacggcgggatgggctgcaccgtgagcgccgaggacaaggcggcggccgagcgctctaagatgatcgacaagaacctgcgggaggacggagagaaggcggcgcgggaggtgaagttgctgctgttggctggggagtcagggaagagcacctgctcattctcgagctttttaagaaatggg

SEQ ID NO: 341048 - DNA, 417 bp, Homo sapiens
caattcatttagtagcaggcacaggggcagctccggcacggctttctcaggcctatgccggagcctcgagggctggagagcgggaagacaggcagtgctcggggagttgcagcaggacgtcaccaggagggcgaagcggccacgggaggggggccccgggacattgcgcagcaaggaggctgcaggggctcggcctgagggccctgccccagcggccctggccccaggctctattaacctaaaatgtagctccctagcgctaacctaggaaccgccgctgcctgctggggggccacgcccctcatgcccttgtcccaggcccggggccttcagcgttgaacacttccttgcttttttcacatgttttatggaattgttcacctggtttgaaataataaaatgtagaaagaaaaaaaa

SEQ ID NO: 341049 - DNA, 2571 bp, Homo sapiens
gccccgccgtcggtgcgcggcggtagggaaggcgcctcccgcagtcgctcggaactgccgacccgagtgcttcccgcagagggctggtggtgggagcggagtgggtcgggcggggccgagccgggccgtgggccgtgtgggggccgggcggcggccgggccggcggacggcgggatgggctgcaccgtgagcgccgaggacaaggcggcggccgagcgctctaagatgatcgacaagaacctgcgggaggacggagagaaggcggcgcgggaggtgaagttgctgctgttgggtgctggggagtcagggaagagcaccatcgtcaagcagatgaagatcatccacgaggatggctactccgaggaggaatgccggcagtaccgggcggttgtctacagcaacaccatccagtccatcatggccattgtcaaagccatgggcaacctgcagatcgactttgccgacccctccagagcggacgacgccaggcagctatttgcactgtcctgcaccgccgaggagcaaggcgtgctccctgatgacctgtccggcgtcatccggaggctctgggctgaccatggtgtgcaggcctgctttggccgctcaagggaataccagctcaacgactcagctgcctactacctgaacgacctggagcgtattgcacagagtgactacatccccacacagcaagatgtgctacggacccgcgtaaagaccacggggatcgtggagacacacttcaccttcaaggacctacacttcaagatgtttgatgtgggtggtcagcggtctgagcggaagaagtggatccactgctttgagggcgtcacagccatcatcttctgcgtagccttgagcgcctatgacttggtgctagctgaggacgaggagatgaaccgcatgcatgagagcatgaagctattcgatagcatctgcaacaacaagtggttcacagacacgtccatcatcctcttcctcaacaagaaggacctgtttgaggagaagatcacacacagtcccctgaccatctgcttccctgagtacacaggggccaacaaatatgatgaggcagccagctacatccagagtaagtttgaggacctgaataagcgcaaagacaccaaggagatctacacgcacttcacgtgcgccaccgacaccaagaacgtgcagttcgtgtttgacgccgtcaccgatgtcatcatcaagaacaacctgaaggactgcggcctcttctgaggggcagcggggcctggcgggatgggccaccgccgactttgtaccccccaacccctgaggaagatgggggcaagaagatcacgctccccgcctgttcccccgccgcttttctcctctttcctctctttgttctcagctccccctgtcccctcagctccagacgtaggggaggggttgccacaggcctccctgtttgaagcctgcccttgtctgagatgctggtaatggccatggtacccccttctgggcatctgttctggtttttaaccattgtcttgttctgtgatgaggggaggggggcacatgctgagtctcccaaggctgcgtctggaggggcccctgcttctccagcctggacccccagctttgcccaacaccagcccctgccccagcccaagtccaaatgtttacagggagcctcctgcccagtcccccaaccccagccgctcggaggccccaaaggaaaaagcacaagaagcgtgagacgccaccattcctggaaaccacagtccacctgctcattctcgtagctttttaaaaaaatgaaagtaaaggaaaaaaaaaaaactgcaaatctagaaaactttttagagaaaaactatttaaaactgtcagatcctgaccagcaagcccccccccagccccccttccaagtgactccgtgccttgagtgtgtctgcgtgtttacacccgtccctctgctggccgcccccgtgcgagcggcacccctgccctgccctccacagaattgggttccaagggctgttccagacaactgccaacgtcactgagggccctgccccagcggccctggccccaggctctattaacctaaaatgtagctccctagcgctaacctaggaaccgccgctgcctgctggggggccacgcccctcatgcccttgtcccaggcccggggccttcagcgttgaacacttccttgcttttttcacatgttttatggaattgttcacctggtttgaaataataaaatgtagaaagaaaaaaaaaaataccgagaactgatgggtattctctcccaggggcagaggcctgggctaaggtgtgccaaggtgatggtggtcctaacctcagtcctcaacctgagtcagggccctgactcagctttccgggccgtcctggagccccacgctctgagcttcatttctcccacctggactaggcagcatacatgtggggcccgtgtgtccccgcccttccagtactctgcagccttgggtctcgggcagctgggcaggcttctaagggagctgttgtaaggtgctcttccacacctggagcaggaggggtggccggcctctctagcgc

SEQ ID NO: 341050 - DNA, 1845 bp, Homo sapiens
  misc_feature (1803)..(1803): n is a, c, g, or t
gccccgccgtcggtgcgcggcggtagggaaggcgcctcccgcagtcgctcggaactgccgacccgagtgcttcccgcagagggctggtggtgggagcggagtgggtcgggcggggccgagccgggccgtgggccgtgtgggggccgggcggcggccgggccggcggacggcgggatgggctgcaccgtgagcgccgaggacaaggcggcggccgagcgctctaagatgatcgacaagaacctgcgggaggacggagagaaggcggcgcgggaggtgaagttgctgctgttgggtgctggggagtcagggaagagcaccatcgtcaagcagatgaagatcatccacgaggatggctactccgaggaggaatgccggcagtaccgggcggttgtctacagcaacaccatccagtccatcatggccattgtcaaagccatgggcaacctgcagatcgactttgccgacccctccagagcggacgacgccaggcagctatttgcactgtcctgcaccgccgaggagcaaggcgtgctccctgatgacctgtccggcgtcatccggaggctctgggctgaccatggtgtgcaggcctgctttggccgctcaagggaataccagctcaacgactcagctgcctactacctgaacgacctggagcgtattgcacagagtgactacatccccacacagcaagatgtgctacggacccgcgtaaagaccacggggatcgtggagacacacttcaccttcaaggacctacacttcaagatgtttgatgtgggtggtcagcggtctgagcggaagaagtggatccactgctttgagggcgtcacagccatcatcttctgcgtagccttgagcgcctatgacttggtgctagctgaggacgaggagatgaaccgcatgcatgagagcatgaagctattcgatagcatctgcaacaacaagtggttcacagacacgtccatcatcctcttcctcaacaagaaggacctgtttgaggagaagatcacacacagtcccctgaccatctgcttccctgagtacacaggggccaacaaatatgatgaggcagccagctacatccagagtaagtttgaggacctgaataagcgcaaagacaccaaggagatctacacgcacttcacgtgcgccaccgacaccaagaacgtgcagttcgtgtttgacgccgtcaccgatgtcatcatcaagaacaacctgaaggactgcggcctcttctgaggggcagcggggcctggcgggatgggccaccgccgactttgtaccccccaacccctgaggaagatgggggcaagaagatcacgctccccgcctgttcccccgccgcttttctcctctttcctctctttgttctcagctccccctgtcccctcagctccagacgtaggggaggggttgccacaggcctccctgtttgaagcctgcccttgtctgagatgctggtaatggccatggtacccccttctgggcatctgttctggtttttaaccattgtcttgttctgtgatgaggggaggggggcacatgctgagtctcccaaggctgcgtctggaggggcccctgcttctccagcctggacccccagctttgcccaacaccagcccctgccccagcccaagtccaaatgtttacagggagcctcctgcccagtcccccaaccccagccgctcggaggccccaaaggaaaaagcacaagaagcgtgagacgccaccattcctggaaaccacagtccacctgctcattctcgtagctttttaaaaaaatgaccaactgcactcccngtccaaagcgaaacattgaaccactttatcaattacacgaat

SEQ ID NO: 341051 - DNA, 2209 bp, Homo sapiens
tttaatttcatacggggcgaggtgtttccttataaatgactgttcctgggactttacatttatagggcggggccgagccgggccgtgggccgtgtgggggccgggcggcggccgggccggcggacggcgggatgggctgcaccgtgagcgccgaggacaaggcggcggccgagcgctctaagatgatcgacaagaacctgcgggaggacggagagaaggcggcgcgggaggtgaagttgctgctgttgggtgctggggagtcagggaagagcaccatcgtcaagcagatgaagatcatccacgaggatggctactccgaggaggaatgccggcagtaccgggcggttgtctacagcaacaccatccagtccatcatggccattgtcaaagccatgggcaacctgcagatcgactttgccgacccctccagagcggacgacgccaggcagctatttgcactgtcctgcaccgccgaggagcaaggcgtgctccctgatgacctgtccggcgtcatccggaggctctgggctgaccatggtgtgcaggcctgctttggccgctcaagggaataccagctcaacgactcagctgcctactacctgaacgacctggagcgtattgcacagagtgactacatccccacacagcaagatgtgctacggacccgcgtaaagaccacggggatcgtggagacacacttcaccttcaaggacctacacttcaagatgtttgatgtgggtggtcagcggtctgagcggaagaagtggatccactgctttgagggcgtcacagccatcatcttctgcgtagccttgagcgcctatgacttggtgctagctgaggacgaggagatgaaccgcatgcatgagagcatgaagctattcgatagcatctgcaacaacaagtggttcacagacacgtccatcatcctcttcctcaacaagaaggacctgtttgaggagaagatcacacacagtcccctgaccatctgcttccctgagtacacaggggccaacaaatatgatgaggcagccagctacatccagagtaagtttgaggacctgaataagcgcaaagacaccaaggagatctacacgcacttcacgtgcgccaccgacaccaagaacgtgcagttcgtgtttgacgccgtcaccgatgtcatcatcaagaacaacctgaaggactgcggcctcttctgaggggcagcggggcctggcgggatgggccaccgccgactttgtaccccccaacccctgaggaagatgggggcaagaagatcacgctccccgcctgttcccccgccgcttttctcctctttcctctctttgttctcagctccccctgtcccctcagctccagacgtaggggaggggttgccacaggcctccctgtttgaagcctgcccttgtctgagatgctggtaatggccatggtacccccttctgggcatctgttctggtttttaaccattgtcttgttctgtgatgaggggaggggggcacatgctgagtctcccaaggctgcgtctggaggggcccctgcttctccagcctggacccccagctttgcccaacaccagcccctgccccagcccaagtccaaatgtttacagggagcctcctgcccagtcccccaaccccagccgctcggaggccccaaaggaaaaagcacaagaagcgtgagacgccaccattcctggaaaccacagtccacctgctcattctcgtagctttttaaaaaaatgaaagtaaaggaaaaaaaaaaaactgcaaatctagaaaactttttagagaaaaactatttaaaactgtcagatcctgaccagcaagcccccccccagccccccttccaagtgactccgtgccttgagtgtgtctgcgtgtttacacccgtccctctgctggccgcccccgtgcgagcggcacccctgccctgccctccacagaattgggttccaagggctgttccagacaactgccaacgtcactgagggccctgccccagcggccctggccccaggctctattaacctaaaatgtagctccctagcgctaacctaggaaccgccgctgcctgctggggggccacgcccctcatgcccttgtcccaggcccggggccttcagcgttgaacacttccttgcttttttcacatgttttatggaattgttcacctggtttgaaataataaaatgtagaaagaaaaaaaa

SEQ ID NO: 341052 - DNA, 2159 bp, Homo sapiens
ctcgccgttgacgtggcttcttggggtggctgggcctgcgggcgcttctcctgtcgtgtgcctgcagctgagcctgtgccagacctgacttagaaccgctgggaggtttgggcggcggccgagcgctctaagatgatcgacaagaacctgcgggaggacggagagaaggcggcgcgggaggtgaagttgctgctgttgggtgctggggagtcagggaagagcaccatcgtcaagcagatgaagatcatccacgaggatggctactccgaggaggaatgccggcagtaccgggcggttgtctacagcaacaccatccagtccatcatggccattgtcaaagccatgggcaacctgcagatcgactttgccgacccctccagagcggacgacgccaggcagctatttgcactgtcctgcaccgccgaggagcaaggcgtgctccctgatgacctgtccggcgtcatccggaggctctgggctgaccatggtgtgcaggcctgctttggccgctcaagggaataccagctcaacgactcagctgcctactacctgaacgacctggagcgtattgcacagagtgactacatccccacacagcaagatgtgctacggacccgcgtaaagaccacggggatcgtggagacacacttcaccttcaaggacctacacttcaagatgtttgatgtgggtggtcagcggtctgagcggaagaagtggatccactgctttgagggcgtcacagccatcatcttctgcgtagccttgagcgcctatgacttggtgctagctgaggacgaggagatgaaccgcatgcatgagagcatgaagctattcgatagcatctgcaacaacaagtggttcacagacacgtccatcatcctcttcctcaacaagaaggacctgtttgaggagaagatcacacacagtcccctgaccatctgcttccctgagtacacaggggccaacaaatatgatgaggcagccagctacatccagagtaagtttgaggacctgaataagcgcaaagacaccaaggagatctacacgcacttcacgtgcgccaccgacaccaagaacgtgcagttcgtgtttgacgccgtcaccgatgtcatcatcaagaacaacctgaaggactgcggcctcttctgaggggcagcggggcctggcgggatgggccaccgccgactttgtaccccccaacccctgaggaagatgggggcaagaagatcacgctccccgcctgttcccccgccgcttttctcctctttcctctctttgttctcagctccccctgtcccctcagctccagacgtaggggaggggttgccacaggcctccctgtttgaagcctgcccttgtctgagatgctggtaatggccatggtacccccttctgggcatctgttctggtttttaaccattgtcttgttctgtgatgaggggaggggggcacatgctgagtctcccaaggctgcgtctggaggggcccctgcttctccagcctggacccccagctttgcccaacaccagcccctgccccagcccaagtccaaatgtttacagggagcctcctgcccagtcccccaaccccagccgctcggaggccccaaaggaaaaagcacaagaagcgtgagacgccaccattcctggaaaccacagtccacctgctcattctcgtagctttttaaaaaaatgaaagtaaaggaaaaaaaaaaaactgcaaatctagaaaactttttagagaaaaactatttaaaactgtcagatcctgaccagcaagcccccccccagccccccttccaagtgactccgtgccttgagtgtgtctgcgtgtttacacccgtccctctgctggccgcccccgtgcgagcggcacccctgccctgccctccacagaattgggttccaagggctgttccagacaactgccaacgtcactgagggccctgccccagcggccctggccccaggctctattaacctaaaatgtagctccctagcgctaacctaggaaccgccgctgcctgctggggggccacgcccctcatgcccttgtcccaggcccggggccttcagcgttgaacacttccttgcttttttcacatgttttatggaattgttcacctggtttgaaataataaaatgtagaaagaaaaaaaa

SEQ ID NO: 341053 - DNA, 2045 bp, Homo sapiens
ccggaatcgtcgtggtggtgcggacatcgtcgtggtcgtgcggaatcgtcgtggtcgtgtgtggtggtgaagttgctgctgttgggtgctggggagtcagggaagagcaccatcgtcaagcagatgaagatcatccacgaggatggctactccgaggaggaatgccggcagtaccgggcggttgtctacagcaacaccatccagtccatcatggccattgtcaaagccatgggcaacctgcagatcgactttgccgacccctccagagcggacgacgccaggcagctatttgcactgtcctgcaccgccgaggagcaaggcgtgctccctgatgacctgtccggcgtcatccggaggctctgggctgaccatggtgtgcaggcctgctttggccgctcaagggaataccagctcaacgactcagctgcctactacctgaacgacctggagcgtattgcacagagtgactacatccccacacagcaagatgtgctacggacccgcgtaaagaccacggggatcgtggagacacacttcaccttcaaggacctacacttcaagatgtttgatgtgggtggtcagcggtctgagcggaagaagtggatccactgctttgagggcgtcacagccatcatcttctgcgtagccttgagcgcctatgacttggtgctagctgaggacgaggagatgaaccgcatgcatgagagcatgaagctattcgatagcatctgcaacaacaagtggttcacagacacgtccatcatcctcttcctcaacaagaaggacctgtttgaggagaagatcacacacagtcccctgaccatctgcttccctgagtacacaggggccaacaaatatgatgaggcagccagctacatccagagtaagtttgaggacctgaataagcgcaaagacaccaaggagatctacacgcacttcacgtgcgccaccgacaccaagaacgtgcagttcgtgtttgacgccgtcaccgatgtcatcatcaagaacaacctgaaggactgcggcctcttctgaggggcagcggggcctggcgggatgggccaccgccgactttgtaccccccaacccctgaggaagatgggggcaagaagatcacgctccccgcctgttcccccgccgcttttctcctctttcctctctttgttctcagctccccctgtcccctcagctccagacgtaggggaggggttgccacaggcctccctgtttgaagcctgcccttgtctgagatgctggtaatggccatggtacccccttctgggcatctgttctggtttttaaccattgtcttgttctgtgatgaggggaggggggcacatgctgagtctcccaaggctgcgtctggaggggcccctgcttctccagcctggacccccagctttgcccaacaccagcccctgccccagcccaagtccaaatgtttacagggagcctcctgcccagtcccccaaccccagccgctcggaggccccaaaggaaaaagcacaagaagcgtgagacgccaccattcctggaaaccacagtccacctgctcattctcgtagctttttaaaaaaatgaaagtaaaggaaaaaaaaaaaactgcaaatctagaaaactttttagagaaaaactatttaaaactgtcagatcctgaccagcaagcccccccccagccccccttccaagtgactccgtgccttgagtgtgtctgcgtgtttacacccgtccctctgctggccgcccccgtgcgagcggcacccctgccctgccctccacagaattgggttccaagggctgttccagacaactgccaacgtcactgagggccctgccccagcggccctggccccaggctctattaacctaaaatgtagctccctagcgctaacctaggaaccgccgctgcctgctggggggccacgcccctcatgcccttgtcccaggcccggggccttcagcgttgaacacttccttgcttttttcacatgttttatggaattgttcacctggtttgaaataataaaatgtagaaagaaaaaaaa

SEQ ID NO: 341054 - DNA, 2541 bp, Homo sapiens
ccgagtagctgggactacaggcgcccgctaccgcgcccggctaattttttgtatttttaatagagacggggtttcaccgtgttagccaggatggtctcgatctcctgacctcgtgatccgcccgccttggcctcccagagtgctgggatgacaggcgtgagcctctgagagcaaattttacccagttcctctctatcctcccgatgactctgaaatcaaactcagcaagtcatccgagcccccacggcgcagcggccctaggctggcatgggcgatgcggagctactccgccctcaggaagcaggcgaggtgcccagcgggagaatcacccacatcaccgtctaatctctgctgtgaagtggaagcgcgagaaggagggagcgtctcatgacggagggtgtgaagacgctaggctggacgaagcagaaaggcgggtgtcactggggacgttctgagggcccctggttgctaaggctcagtgtggggagaagaagggctgctaccctgttggatggagtatgcagggcatcttcctgccagctctgcccagggcaccatattggcatgcaccagctgcacaggtgctggggagtcagggaagagcaccatcgtcaagcagatgaagatcatccacgaggatggctactccgaggaggaatgccggcagtaccgggcggttgtctacagcaacaccatccagtccatcatggccattgtcaaagccatgggcaacctgcagatcgactttgccgacccctccagagcggacgacgccaggcagctatttgcactgtcctgcaccgccgaggagcaaggcgtgctccctgatgacctgtccggcgtcatccggaggctctgggctgaccatggtgtgcaggcctgctttggccgctcaagggaataccagctcaacgactcagctgcctactacctgaacgacctggagcgtattgcacagagtgactacatccccacacagcaagatgtgctacggacccgcgtaaagaccacggggatcgtggagacacacttcaccttcaaggacctacacttcaagatgtttgatgtgggtggtcagcggtctgagcggaagaagtggatccactgctttgagggcgtcacagccatcatcttctgcgtagccttgagcgcctatgacttggtgctagctgaggacgaggagatgaaccgcatgcatgagagcatgaagctattcgatagcatctgcaacaacaagtggttcacagacacgtccatcatcctcttcctcaacaagaaggacctgtttgaggagaagatcacacacagtcccctgaccatctgcttccctgagtacacaggggccaacaaatatgatgaggcagccagctacatccagagtaagtttgaggacctgaataagcgcaaagacaccaaggagatctacacgcacttcacgtgcgccaccgacaccaagaacgtgcagttcgtgtttgacgccgtcaccgatgtcatcatcaagaacaacctgaaggactgcggcctcttctgaggggcagcggggcctggcgggatgggccaccgccgactttgtaccccccaacccctgaggaagatgggggcaagaagatcacgctccccgcctgttcccccgccgcttttctcctctttcctctctttgttctcagctccccctgtcccctcagctccagacgtaggggaggggttgccacaggcctccctgtttgaagcctgcccttgtctgagatgctggtaatggccatggtacccccttctgggcatctgttctggtttttaaccattgtcttgttctgtgatgaggggaggggggcacatgctgagtctcccaaggctgcgtctggaggggcccctgcttctccagcctggacccccagctttgcccaacaccagcccctgccccagcccaagtccaaatgtttacagggagcctcctgcccagtcccccaaccccagccgctcggaggccccaaaggaaaaagcacaagaagcgtgagacgccaccattcctggaaaccacagtccacctgctcattctcgtagctttttaaaaaaatgaaagtaaaggaaaaaaaaaaaactgcaaatctagaaaactttttagagaaaaactatttaaaactgtcagatcctgaccagcaagcccccccccagccccccttccaagtgactccgtgccttgagtgtgtctgcgtgtttacacccgtccctctgctggccgcccccgtgcgagcggcacccctgccctgccctccacagaattgggttccaagggctgttccagacaactgccaacgtcactgagggccctgccccagcggccctggccccaggctctattaacctaaaatgtagctccctagcgctaacctaggaaccgccgctgcctgctggggggccacgcccctcatgcccttgtcccaggcccggggccttcagcgttgaacacttccttgcttttttcacatgttttatggaattgttcacctggtttgaaataataaaatgtagaaagaaaaaaaa

SEQ ID NO: 341055 - DNA, 2253 bp, Homo sapiens
agaccccccaggacagtggggagccatggtgggcagcagagcttgtgggaggcaaaggcctgcagagagtctgccatggggcacaggtgctctaggttaccttgaccactgtggccctgccagctgcattcctggtagctcaactgcccaccaggcccagctgcctccatctcacggtgcagctggtgggaaggttagttctgcctcctgggctacaggtgtctgggcatttgttctgtgcctgtggagcccctctgggcctgccccctgaccacctgtgccctctgttccaggtgctggggagtcagggaagagcaccatcgtcaagcagatgaagatcatccacgaggatggctactccgaggaggaatgccggcagtaccgggcggttgtctacagcaacaccatccagtccatcatggccattgtcaaagccatgggcaacctgcagatcgactttgccgacccctccagagcggacgacgccaggcagctatttgcactgtcctgcaccgccgaggagcaaggcgtgctccctgatgacctgtccggcgtcatccggaggctctgggctgaccatggtgtgcaggcctgctttggccgctcaagggaataccagctcaacgactcagctgcctactacctgaacgacctggagcgtattgcacagagtgactacatccccacacagcaagatgtgctacggacccgcgtaaagaccacggggatcgtggagacacacttcaccttcaaggacctacacttcaagatgtttgatgtgggtggtcagcggtctgagcggaagaagtggatccactgctttgagggcgtcacagccatcatcttctgcgtagccttgagcgcctatgacttggtgctagctgaggacgaggagatgaaccgcatgcatgagagcatgaagctattcgatagcatctgcaacaacaagtggttcacagacacgtccatcatcctcttcctcaacaagaaggacctgtttgaggagaagatcacacacagtcccctgaccatctgcttccctgagtacacaggggccaacaaatatgatgaggcagccagctacatccagagtaagtttgaggacctgaataagcgcaaagacaccaaggagatctacacgcacttcacgtgcgccaccgacaccaagaacgtgcagttcgtgtttgacgccgtcaccgatgtcatcatcaagaacaacctgaaggactgcggcctcttctgaggggcagcggggcctggcgggatgggccaccgccgactttgtaccccccaacccctgaggaagatgggggcaagaagatcacgctccccgcctgttcccccgccgcttttctcctctttcctctctttgttctcagctccccctgtcccctcagctccagacgtaggggaggggttgccacaggcctccctgtttgaagcctgcccttgtctgagatgctggtaatggccatggtacccccttctgggcatctgttctggtttttaaccattgtcttgttctgtgatgaggggaggggggcacatgctgagtctcccaaggctgcgtctggaggggcccctgcttctccagcctggacccccagctttgcccaacaccagcccctgccccagcccaagtccaaatgtttacagggagcctcctgcccagtcccccaaccccagccgctcggaggccccaaaggaaaaagcacaagaagcgtgagacgccaccattcctggaaaccacagtccacctgctcattctcgtagctttttaaaaaaatgaaagtaaaggaaaaaaaaaaaactgcaaatctagaaaactttttagagaaaaactatttaaaactgtcagatcctgaccagcaagcccccccccagccccccttccaagtgactccgtgccttgagtgtgtctgcgtgtttacacccgtccctctgctggccgcccccgtgcgagcggcacccctgccctgccctccacagaattgggttccaagggctgttccagacaactgccaacgtcactgagggccctgccccagcggccctggccccaggctctattaacctaaaatgtagctccctagcgctaacctaggaaccgccgctgcctgctggggggccacgcccctcatgcccttgtcccaggcccggggccttcagcgttgaacacttccttgcttttttcacatgttttatggaattgttcacctggtttgaaataataaaatgtagaaagaaaaaaaa

SEQ ID NO: 341056 - DNA, 1961 bp, Homo sapiens
gtgaggcgacctagaggatcccccaccatcgtcaagcagatgaagatcatccacgaggatggctactccgaggaggaatgccggcagtaccgggcggttgtctacagcaacaccatccagtccatcatggccattgtcaaagccatgggcaacctgcagatcgactttgccgacccctccagagcggacgacgccaggcagctatttgcactgtcctgcaccgccgaggagcaaggcgtgctccctgatgacctgtccggcgtcatccggaggctctgggctgaccatggtgtgcaggcctgctttggccgctcaagggaataccagctcaacgactcagctgcctactacctgaacgacctggagcgtattgcacagagtgactacatccccacacagcaagatgtgctacggacccgcgtaaagaccacggggatcgtggagacacacttcaccttcaaggacctacacttcaagatgtttgatgtgggtggtcagcggtctgagcggaagaagtggatccactgctttgagggcgtcacagccatcatcttctgcgtagccttgagcgcctatgacttggtgctagctgaggacgaggagatgaaccgcatgcatgagagcatgaagctattcgatagcatctgcaacaacaagtggttcacagacacgtccatcatcctcttcctcaacaagaaggacctgtttgaggagaagatcacacacagtcccctgaccatctgcttccctgagtacacaggggccaacaaatatgatgaggcagccagctacatccagagtaagtttgaggacctgaataagcgcaaagacaccaaggagatctacacgcacttcacgtgcgccaccgacaccaagaacgtgcagttcgtgtttgacgccgtcaccgatgtcatcatcaagaacaacctgaaggactgcggcctcttctgaggggcagcggggcctggcgggatgggccaccgccgactttgtaccccccaacccctgaggaagatgggggcaagaagatcacgctccccgcctgttcccccgccgcttttctcctctttcctctctttgttctcagctccccctgtcccctcagctccagacgtaggggaggggttgccacaggcctccctgtttgaagcctgcccttgtctgagatgctggtaatggccatggtacccccttctgggcatctgttctggtttttaaccattgtcttgttctgtgatgaggggaggggggcacatgctgagtctcccaaggctgcgtctggaggggcccctgcttctccagcctggacccccagctttgcccaacaccagcccctgccccagcccaagtccaaatgtttacagggagcctcctgcccagtcccccaaccccagccgctcggaggccccaaaggaaaaagcacaagaagcgtgagacgccaccattcctggaaaccacagtccacctgctcattctcgtagctttttaaaaaaatgaaagtaaaggaaaaaaaaaaaactgcaaatctagaaaactttttagagaaaaactatttaaaactgtcagatcctgaccagcaagcccccccccagccccccttccaagtgactccgtgccttgagtgtgtctgcgtgtttacacccgtccctctgctggccgcccccgtgcgagcggcacccctgccctgccctccacagaattgggttccaagggctgttccagacaactgccaacgtcactgagggccctgccccagcggccctggccccaggctctattaacctaaaatgtagctccctagcgctaacctaggaaccgccgctgcctgctggggggccacgcccctcatgcccttgtcccaggcccggggccttcagcgttgaacacttccttgcttttttcacatgttttatggaattgttcacctggtttgaaataataaaatgtagaaagaaaaaaaa

SEQ ID NO: 341057 - DNA, 1625 bp, Homo sapiens
gccccgccgtcggtgcgcggcggtagggaaggcgcctcccgcagtcgctcggaactgccgacccgagtgcttcccgcagagggctggtggtgggagcggagtgggtcgggcggggccgagccgggccgtgggccgtgtgggggccgggcggcggccgggccggcggacggcgggatgggctgcaccgtgagcgccgaggacaaggcggcggccgagcgctctaagatgatcgacaagaacctgcgggaggacggagagaaggcggcgcgggaggtgaagttgctgctgttgggtgctggggagtcagggaagagcaccatcgtcaagcagatgaagatcatccacgaggatggctactccgaggaggaatgccggcagtaccgggcggttgtctacagcaacaccatccagtccatcatggccattgtcaaagccatgggcaacctgcagatcgactttgccgacccctccagagcggacgacgccaggcagctatttgcactgtcctgcaccgccgaggagcaaggcgtgctccctgatgacctgtccggcgtcatccggaggctctgggctgaccatggtgtgcaggcctgctttggccgctcaagggaataccagctcaacgactcagctgcctactacctgaacgacctggagcgtattgcacagagtgactacatccccacacagcaagatgtgctacggacccgcgtaaagaccacggggatcgtggagacacacttcaccttcaaggacctacacttcaagatgtttgatgtgggtggtcagcggtctgagcggaagaagtggatccactgctttgagggcgtcacagccatcatcttctgcgtagccttgagcgcctatgacttggtgctagctgaggacgaggagatgaaccgcatgcatgagagcatgaagctattcgatagcatctgcaacaacaagtggttcacagacacgtccatcatcctcttcctcaacaagaaggacctgtttgaggagaagatcacacacagtcccctgaccatctgcttccctgagtacacaggggccaacaaatatgatgaggcagccagctacatccagagtaagtttgaggacctgaataagcgcaaagacaccaaggagatctacacgcacttcacgtgcgccaccgacaccaagaacgtgcagttcgtgtttgacgccgtcaccgatgtcatcatcaagaacaacctgaaggactgcggcctcttctgaggggcagcggggcctggcgggatgggccaccgccgactttgtaccccccaacccctgaggaagatgggggcaagaagatcacgctccccgcctgttcccccgccgcttttctcctctttcctctctttgttctcagctccccctgtcccctcagctccagacgtaggggaggggttgccacaggcctccctgtttgaagcctgcccttgtctgagatgctggtaatggccatggtacccccttctgggcatctgttctggtttttaaccattgtcttgtcccaggcccggggccttcagcgttgaacacttccttgcttttttcacatgttttatggaattgttcacctggtttgaaataataaaatgtagaaagaaaaaaaa

SEQ ID NO: 341058 - DNA, 1575 bp, Homo sapiens
  misc_feature (1461)..(1461): n is a, c, g, or t
  misc_feature (1475)..(1475): n is a, c, g, or t
  misc_feature (1543)..(1543): n is a, c, g, or t
gccccgccgtcggtgcgcggcggtagggaaggcgcctcccgcagtcgctcggaactgccgacccgagtgcttcccgcagagggctggtggtgggagcggagtgggtcgggcggggccgagccgggccgtgggccgtgtgggggccgggcggcggccgggccggcggacggcgggatgggctgcaccgtgagcgccgaggacaaggcggcggccgagcgctctaagatgatcgacaagaacctgcgggaggacggagagaaggcggcgcgggaggtgaagttgctgctgttgggtgctggggagtcagggaagagcaccatcgtcaagcagatgaagatcatccacgaggatggctactccgaggaggaatgccggcagtaccgggcggttgtctacagcaacaccatccagtccatcatggccattgtcaaagccatgggcaacctgcagatcgactttgccgacccctccagagcggacgacgccaggcagctatttgcactgtcctgcaccgccgaggagcaaggcgtgctccctgatgacctgtccggcgtcatccggaggctctgggctgaccatggtgtgcaggcctgctttggccgctcaagggaataccagctcaacgactcagctgcctactacctgaacgacctggagcgtattgcacagagtgactacatccccacacagcaagatgtgctacggacccgcgtaaagaccacggggatcgtggagacacacttcaccttcaaggacctacacttcaagatgtttgatgtgggtggtcagcggtctgagcggaagaagtggatccactgctttgagggcgtcacagccatcatcttctgcgtagccttgagcgcctatgacttggtgctagctgaggacgaggagatgaaccgcatgcatgagagcatgaagctattcgatagcatctgcaacaacaagtggttcacagacacgtccatcatcctcttcctcaacaagaaggacctgtttgaggagaagatcacacacagtcccctgaccatctgcttccctgagtacacaggggccaacaaatatgatgaggcagccagctacatccagagtaagtttgaggacctgaataagcgcaaagacaccaaggagatctacacgcacttcacgtgcgccaccgacaccaagaacgtgcagttcgtgtttgacgccgtcaccgatgtcatcatcaagaacaacctgaaggactgcggcctcttctgaggggcagcggggcctggcgggatgggccaccgccgactttgtaccccccaacccctgaggaagatgggggcaagaagatcacgctccccgcctgttcccccgccgcttttctcctctttcctctctttgttctcagctccccctgtcccctcagctcgcaaaagggccactccccagagggcagcagatactgagatactctcctgtagtcaagtactngcatgcaggaattncagataagcagtgctactttctttcaaaattttcaagggtaaccaaaaataaggctttcttgcaatgnaattgtcctggacttcccatacacactacaag

SEQ ID NO: 341059 - DNA, 1671 bp, Homo sapiens
aggaatgacactagaagaatgaggcctaagtaaccagctcaacgactcagctgcctactacctgaacgacctggagcgtattgcacagagtgactacatccccacacagcaagatgtgctacggacccgcgtaaagaccacggggatcgtggagacacacttcaccttcaaggacctacacttcaagatgtttgatgtgggtggtcagcggtctgagcggaagaagtggatccactgctttgagggcgtcacagccatcatcttctgcgtagccttgagcgcctatgacttggtgctagctgaggacgaggagatgaaccgcatgcatgagagcatgaagctattcgatagcatctgcaacaacaagtggttcacagacacgtccatcatcctcttcctcaacaagaaggacctgtttgaggagaagatcacacacagtcccctgaccatctgcttccctgagtacacaggggccaacaaatatgatgaggcagccagctacatccagagtaagtttgaggacctgaataagcgcaaagacaccaaggagatctacacgcacttcacgtgcgccaccgacaccaagaacgtgcagttcgtgtttgacgccgtcaccgatgtcatcatcaagaacaacctgaaggactgcggcctcttctgaggggcagcggggcctggcgggatgggccaccgccgactttgtaccccccaacccctgaggaagatgggggcaagaagatcacgctccccgcctgttcccccgccgcttttctcctctttcctctctttgttctcagctccccctgtcccctcagctccagacgtaggggaggggttgccacaggcctccctgtttgaagcctgcccttgtctgagatgctggtaatggccatggtacccccttctgggcatctgttctggtttttaaccattgtcttgttctgtgatgaggggaggggggcacatgctgagtctcccaaggctgcgtctggaggggcccctgcttctccagcctggacccccagctttgcccaacaccagcccctgccccagcccaagtccaaatgtttacagggagcctcctgcccagtcccccaaccccagccgctcggaggccccaaaggaaaaagcacaagaagcgtgagacgccaccattcctggaaaccacagtccacctgctcattctcgtagctttttaaaaaaatgaaagtaaaggaaaaaaaaaaaactgcaaatctagaaaactttttagagaaaaactatttaaaactgtcagatcctgaccagcaagcccccccccagccccccttccaagtgactccgtgccttgagtgtgtctgcgtgtttacacccgtccctctgctggccgcccccgtgcgagcggcacccctgccctgccctccacagaattgggttccaagggctgttccagacaactgccaacgtcactgagggccctgccccagcggccctggccccaggctctattaacctaaaatgtagctccctagcgctaacctaggaaccgccgctgcctgctggggggccacgcccctcatgcccttgtcccaggcccggggccttcagcgttgaacacttccttgcttttttcacatgttttatggaattgttcacctggtttgaaataataaaatgtagaaagaaaaaaaa

SEQ ID NO: 341060 - DNA, 1123 bp, Homo sapiens
  misc_feature (1100)..(1100): n is a, c, g, or t
  misc_feature (1121)..(1121): n is a, c, g, or t
gccccgccgtcggtgcgcggcggtagggaaggcgcctcccgcagtcgctcggaactgccgacccgagtgcttcccgcagagggctggtggtgggagcggagtgggtcgggcggggccgagccgggccgtgggccgtgtgggggccgggcggcggccgggccggcggacggcgggatgggctgcaccgtgagcgccgaggacaaggcggcggccgagcgctctaagatgatcgacaagaacctgcgggaggacggagagaaggcggcgcgggaggtgaagttgctgctgttgggtgctggggagtcagggaagagcaccatcgtcaagcagatgaagatcatccacgaggatggctactccgaggaggaatgccggcagtaccgggcggttgtctacagcaacaccatccagtccatcatggccattgtcaaagccatgggcaacctgcagatcgactttgccgacccctccagagcggacgacgccaggcagctatttgcactgtcctgcaccgccgaggagcaaggcgtgctccctgatgacctgtccggcgtcatccggaggctctgggctgaccatggtgtgcaggcctgctttggccgctcaagggaataccagctcaacgactcagctgcctactacctgaacgacctggagcgtattgcacagagtgactacatccccacacagcaagatgtgctacggacccgcgtaaagaccacggggatcgtggagacacacttcaccttcaaggacctacacttcaagatgtttgatgtgggtggtcagcggtctgagcggaagaagtggatccactgctttgagggcgtcacagccatcatcttctgcgtagccttgagcgcctatgacttggtgctagctgaggacgaggagatgaaccgcatgcatgagagcatgaagctattcgatagcatctgcaacaacaagtggttcacagacacgtccatcatcctcttcctcaacaagaaggacctgtttgaggagaagatcacacacagtcccctgaccatctgcttccctgagtacacaggggccaacaaatatgatgaggcagccagctacatccagagtatggttgnactagtcggggatcctctagntc

SEQ ID NO: 341061 - DNA, 1040 bp, Homo sapiens
gccccgccgtcggtgcgcggcggtagggaaggcgcctcccgcagtcgctcggaactgccgacccgagtgcttcccgcagagggctggtggtgggagcggagtgggtcgggcggggccgagccgggccgtgggccgtgtgggggccgggcggcggccgggccggcggacggcgggatgggctgcaccgtgagcgccgaggacaaggcggcggccgagcgctctaagatgatcgacaagaacctgcgggaggacggagagaaggcggcgcgggaggtgaagttgctgctgttgggtgctggggagtcagggaagagcaccatcgtcaagcagatgaagatcatccacgaggatggctactccgaggaggaatgccggcagtaccgggcggttgtctacagcaacaccatccagtccatcatggccattgtcaaagccatgggcaacctgcagatcgactttgccgacccctccagagcggacgacgccaggcagctatttgcactgtcctgcaccgccgaggagcaaggcgtgctccctgatgacctgtccggcgtcatccggaggctctgggctgaccatggtgtgcaggcctgctttggccgctcaagggaataccagctcaacgactcagctgcctactacctgaacgacctggagcgtattgcacagagtgactacatccccacacagcaagatgtgctacggacccgcgtaaagaccacggggatcgtggagacacacttcaccttcaaggacctacacttcaagatgtttgatgtgggtggtcagcggtctgagcggaagaagtggatccactgctttgagggcgtcacagccatcatcttctgcgtagccttgagcgcctatgacttggtgctagctgaggacgaggagatgaaccgcatgcatgagagcatgaagctattcgatagcatctgcaacaacaagtggttcacagacacgtccatcatcctcttcctcaacaagaaggacctgtttgaggagaagatcacacgtagcactgggatcctctaggttca

SEQ ID NO: 341062 - DNA, 1451 bp, Homo sapiens
ttgcaggccccccactcagatcaagggaagcaccagacatctcttttggggagcccaggtcatcagggatcttgcaaggcaagttccggtgagctgccccgatgaactctagttttccgtctccttcagcaggtttggcaatctccggtctgccaaagccagacttctcatcttctagttggtctgtctccgcttggagtgtatcaagtcagcgccccttccccgggacaagcaagcttgcatgtaccgggggccaacaaatatgatgaggcagccagctacatccagagtaagtttgaggacctgaataagcgcaaagacaccaaggagatctacacgcacttcacgtgcgccaccgacaccaagaacgtgcagttcgtgtttgacgccgtcaccgatgtcatcatcaagaacaacctgaaggactgcggcctcttctgaggggcagcggggcctggcgggatgggccaccgccgactttgtaccccccaacccctgaggaagatgggggcaagaagatcacgctccccgcctgttcccccgccgcttttctcctctttcctctctttgttctcagctccccctgtcccctcagctccagacgtaggggaggggttgccacaggcctccctgtttgaagcctgcccttgtctgagatgctggtaatggccatggtacccccttctgggcatctgttctggtttttaaccattgtcttgttctgtgatgaggggaggggggcacatgctgagtctcccaaggctgcgtctggaggggcccctgcttctccagcctggacccccagctttgcccaacaccagcccctgccccagcccaagtccaaatgtttacagggagcctcctgcccagtcccccaaccccagccgctcggaggccccaaaggaaaaagcacaagaagcgtgagacgccaccattcctggaaaccacagtccacctgctcattctcgtagctttttaaaaaaatgaaagtaaaggaaaaaaaaaaaactgcaaatctagaaaactttttagagaaaaactatttaaaactgtcagatcctgaccagcaagcccccccccagccccccttccaagtgactccgtgccttgagtgtgtctgcgtgtttacacccgtccctctgctggccgcccccgtgcgagcggcacccctgccctgccctccacagaattgggttccaagggctgttccagacaactgccaacgtcactgagggccctgccccagcggccctggccccaggctctattaacctaaaatgtagctccctagcgctaacctaggaaccgccgctgcctgctggggggccacgcccctcatgcccttgtcccaggcccggggccttcagcgttgaacacttccttgcttttttcacatgttttatggaattgttcacctggtttgaaataataaaatgtagaaagaaaaaaaa

SEQ ID NO: 341063 - DNA, 1363 bp, Homo sapiens
cgtatctggaaaaggggcagcggcctggcgtatgccattggcccagcctgccggaagctgcatgccagcggagcccagccctgctgcccactaccaccagctccatgtgcacctccagctcttgccctctgacttgtctgagcgtcccgggcttaggctggccccactggccctggtggaggtggggatgactctcccagtgccacagactcccctcccccacgtaacccagcaacagaaactggctcctgggcggcaactgtgtccctggtaacaaatgggtaggaaaaatagagaagggtcattgtctagggaggcgggagagaggcacgccctggctgcttcccgatccatgctctgctttcccccacctccagggccaccgccgactttgtaccccccaacccctgaggaagatgggggcaagaagatcacgctccccgcctgttcccccgccgcttttctcctctttcctctctttgttctcagctccccctgtcccctcagctccagacgtaggggaggggttgccacaggcctccctgtttgaagcctgcccttgtctgagatgctggtaatggccatggtacccccttctgggcatctgttctggtttttaaccattgtcttgttctgtgatgaggggaggggggcacatgctgagtctcccaaggctgcgtctggaggggcccctgcttctccagcctggacccccagctttgcccaacaccagcccctgccccagcccaagtccaaatgtttacagggagcctcctgcccagtcccccaaccccagccgctcggaggccccaaaggaaaaagcacaagaagcgtgagacgccaccattcctggaaaccacagtccacctgctcattctcgtagctttttaaaaaaatgaaagtaaaggaaaaaaaaaaaactgcaaatctagaaaactttttagagaaaaactatttaaaactgtcagatcctgaccagcaagcccccccccagccccccttccaagtgactccgtgccttgagtgtgtctgcgtgtttacacccgtccctctgctggccgcccccgtgcgagcggcacccctgccctgccctccacagaattgggttccaagggctgttccagacaactgccaacgtcactgagggccctgccccagcggccctggccccaggctctattaacctaaaatgtagctccctagcgctaacctaggaaccgccgctgcctgctggggggccacgcccctcatgcccttgtcccaggcccggggccttcagcgttgaacacttccttgcttttttcacatgttttatggaattgttcacctggtttgaaataataaaatgtagaaagaaaaaaaa

SEQ ID NO: 341064 - DNA, 1098 bp, Homo sapiens
cggggatagaacactaggcccacctgggcattgtaagagtatgccaataggctccactactggggtctttcatcctttggaggcttgagaatgccaccctggagcaatccctctgtctcgaactctcatggcgccacccttgccgctgaaagtctcacttgtatggtttccgaggcctttccagccaccttccgcttctcgccttcactgttccccttgatgtagtttgcacccaatacgggctgcttgatctcacagtctttcatgagattaaatggcatcatgaaggactcgcagtctgagatgctggtaatggccatggtacccccttctgggcatctgttctggtttttaaccattgtcttgttctgtgatgaggggaggggggcacatgctgagtctcccaaggctgcgtctggaggggcccctgcttctccagcctggacccccagctttgcccaacaccagcccctgccccagcccaagtccaaatgtttacagggagcctcctgcccagtcccccaaccccagccgctcggaggccccaaaggaaaaagcacaagaagcgtgagacgccaccattcctggaaaccacagtccacctgctcattctcgtagctttttaaaaaaatgaaagtaaaggaaaaaaaaaaaactgcaaatctagaaaactttttagagaaaaactatttaaaactgtcagatcctgaccagcaagcccccccccagccccccttccaagtgactccgtgccttgagtgtgtctgcgtgtttacacccgtccctctgctggccgcccccgtgcgagcggcacccctgccctgccctccacagaattgggttccaagggctgttccagacaactgccaacgtcactgagggccctgccccagcggccctggccccaggctctattaacctaaaatgtagctccctagcgctaacctaggaaccgccgctgcctgctggggggccacgcccctcatgcccttgtcccaggcccggggccttcagcgttgaacacttccttgcttttttcacatgttttatggaattgttcacctggtttgaaataataaaatgtagaaagaaaaaaaa

SEQ ID NO: 341065 - DNA, 800 bp, Homo sapiens
gccccgccgtcggtgcgcggcggtagggaaggcgcctcccgcagtcgctcggaactgccgacccgagtgcttcccgcagagggctggtggtgggagcggagtgggtcgggcggggccgagccgggccgtgggccgtgtgggggccgggcggcggccgggccggcggacggcgggatgggctgcaccgtgagcgccgaggacaaggcggcggccgagcgctctaagatgatcgacaagaacctgcgggaggacggagagaaggcggcgcgggaggtgaagttgctgctgttgggtgctggggagtcagggaagagcaccatcgtcaagcagatgaagatcatccacgaggatggctactccgaggaggaatgccggcagtaccgggcggttgtctacagcaacaccatccagtccatcatggccattgtcaaagccatgggcaacctgcagatcgactttgccgacccctccagagcggacgacgccaggcagctatttgcactgtcctgcaccgccgaggagcaaggcgtgctccctgatgacctgtccggcgtcatccggaggctctgggctgaccatggtgtgcaggcctgctttggccgctcaagggaataccagctcaacgactcagctgcctattgacgatggtgctcttacctgactccccagcacccaacagcagcaacttcacctcccgcgccgccttctctccgtcctcccgcagcttcttgtcgatcatcttagtgcgctcgggcagagcccagtgcggtcggcgctcacgagcagcaatcgcttctccg

SEQ ID NO: 341066 - DNA, 588 bp, Homo sapiens
gccccgccgtcggtgcgcggcggtagggaaggcgcctcccgcagtcgctcggaactgccgacccgagtgcttcccgcagagggctggtggtgggagcggagtgggtcgggcggggccgagccgggccgtgggccgtgtgggggccgggcggcggccgggccggcggacggcgggatgggctgcaccgtgagcgccgaggacaaggcggcggccgagcgctctaagatgatcgacaagaacctgcgggaggacggagagaaggcggcgcgggaggtgaagttgctgctgttgggggtgaggccgcgtcccgcactgggatccttgattcccagctcgaatccccagacaaggactttgacctcccagactagggcttcaaactcccagacccgggctgtctgggaccccacacctgggccaggaccagggttgaaaactctagattggactagacctttgatcctgcccagactctagaccagacccctgtctcatcccagaccccagacctccaaatccagtcaacagtgccccaacacccgcggtccagtgccctgcttggccatccccccttgctaactagcttca

SEQ ID NO: 341067 - DNA, 421 bp, Homo sapiens
taaggcctgtgctttagtgctttgactcccagccccttgcacagtgtgggtgcttagaagtacatgaatgaaagaagtagacccagaaagaaaagaaaatggatcaggtttccagttgctgcagagtctgctttttttcggagtttggccttcattgtttggcctcaagtcagtttttagaatgtcagatatatccacctttaaatgcaagccccagatttattccaaaccccagtataaatggttattggtttctcgcagttgttgatgtgtgtttttttgaaaaacattcacatgcttgttcttcgatcattgagagtaaaccgaatcctctgagtctgaacaaaaacttaatttttgcctgaggagagaagcactgggtttaaaagacagagagaaagccaaaaagaaaaagaaccca

SEQ ID NO: 341068 - DNA, 588 bp, Homo sapiens
tgcaggagctccagtggcttctgcaaatgagggcttggcaattatcagtggacggacacagagtgtccagcaccaggccatgggccttcctgcttcctgagtttcacaagtaggatgcacatgaggggtgcaacccatacctctgttgaaggaaggctgtagtactttccaggacacagcctggacgaatgatgccaaactttctatgcacagataagtcaaccacagttgagccaaggtaacactcagggatctggctatccctagtttgtcccccatcaatgaccaaggacaactgaggccagaggtcttataactccatggcattcagagaactgtcctgggagctgaggttggcactagtgagagcaagaggatgctcatacatcttggccaagtcttgcataaaggcataatcaggaatccggataccttgtaagaggagtaaaggggtttaggtcgttgttgagctcctctgaacgttccatcaccagggacactggtcctggcactaggtctttcaggagctcctggggtgctactctcatacagccagtaacttggccttcctgcagcccttgagacggt

SEQ ID NO: 341069 - DNA, 127 bp, Homo sapiens
cttcacaggcactgaccattcagatgctaacacacacacacacacacacattcatcttccccaaattcatcttgaccccaatactgacccccaaagaccctaactctccagacccaattccagacat

SEQ ID NO: 341070 - DNA, 86 bp, Homo sapiens
gaactgaaaatctcatctgctgcagtatgagtgcaaacataaaaaggtaaaaacactttagaaaactgctatttttttcttttctt

SEQ ID NO: 341071 - DNA, 313 bp, Homo sapiens
acaccatcactgtaccagccatgggtgccgcaaccccagcaaccccatggaaccggagttccccaggtagtggccagtgtcaggccatgtgtcctttcctcaaattaaaaggacctcgctagcctgagcttgagaggataaaatggcaagaaaggacttctgttgcccaaagtgcagtgacttgatttcatgtaaattgccatagctaccttctcaccaaggctgatcttccctcagtttgagaagtccttgtgtttgggtgggttgtatggtagggggggtgtgtgtgtgtgtgtgtgtgtgtgtgtgtgtg

SEQ ID NO: 341072 - DNA, 283 bp, Homo sapiens
ctccatagataggctttatgagatctgtgaattcattctaattgcatgcaatttttttgtatatactcattctagagagttaatcacatttttataaggatccatgacctccaagagattaagatccacaatcacaagatgttatgagctccaaggcagctaatgaaatcaaagtggaaagacctgctattgacagcagcacctgatgggctcaaacctggtagcatgaggtagtggcagaagaacatcacagcaaatgacagcaggaaggtgctttgtgcta

SEQ ID NO: 341073 - DNA, 621 bp, Homo sapiens
catggggacagaaagatggaactgaggccatgagtaattatacctgaagaattttgtccttgtgccagctctgatcatgtgcatgtgtgcaaacatgtgcatgtatgtgtgaaatcactatggcaggtccccgggtaagcatagccagaacacttacatggttgagaaatggtcttgcctcttggcccaatcatcgtttcaactaaactttccaacttaatgaaactgcttctccagcacccctgccactatgggttttcagtggcccacggtctagtagattgattcttgccctagttcctggtctaatatgcccaggcagctatttaacatattaaagatggccttgctgtcttagactagatctccacatctgggacttcctctgttgacctgaagtttcttctagtgtctgcccagaatcttgggattcactgttaccctgaatcttacataatatttggtttgttggcttgatttgatattcagctttgttttaagtaattgcagactaatcaagactgtggaaagataaaacatttaataagttatattgccttggattttaagatcagtcagaaagatatgagaaaaaagatagggtaccaatataataaattt

SEQ ID NO: 341074 - DNA, 192 bp, Homo sapiens
caattctatttcctaattattttctctatccctactatgcctggttagtttaactttacaccctacctccagtgattttttttctaaatctgttcttcacatgactttcagagtgatctagctaaagcagcttctcaaccttagctctcaggacagttgtgttgggcacgggacagctggagcctgcgcctg

SEQ ID NO: 341075 - DNA, 610 bp, Homo sapiens
ctgtgggcttcatacgtctgtagactgcatacacctgtgggcttcatacacctgcgggctgcatacacctgtaggttgcatacacctgtgggcttcatacatctgtgggcttcatacgtctgtagactgcatacacctgtgggcttcatacacctgcgggctgcatacacctgtgggttgcatgcacctgtggactgcatgcacctgtggactgcatacacctgtggattgcatacacctgtgggctgcatacacttgtggactgcatgcttgctggtagaaggattttattaagtagcttttattatctttatttcctgactataaaatcttgttttaggtagaccactgtgtaacgtttggaaaaagctcaaaaggagaagcaaaatttccataactgcttgaccaggaagtgtcctgggagatggtaaactgccttaaaggagtcagacccatcctccctgcttccctggtcacagcctgccaagaaaagtcctatttcaggagtgattaccctgcaccaggcatgggtctaagtgtgtcatgtacattatttgacaaatatttacggagttaccatcaggtgtcaggcactgttctagaccctgtg

SEQ ID NO: 341076 - DNA, 499 bp, Homo sapiens
agcttgtaaaaatatttccctcagggttttttcctagtctgtttgtttcacagctgtcttaaggaaaaaagtaggataaggtatagctattaatgttctataggaacttacaagtgtctggctagtgatccgtcctataaatacccgtctacacatgctcaactttaccattaaaatatagaaaacattaaagtactattcataccacagtcctacctggaagaatggtatctgtctacctgagtgggatgcctattattattttgttccaacatagtaacatatatgaagaatgattgccatttgaaacaaattcgtttttttttttcttttttttcttttgagatggggtcttgctctgtcacgcaggctggagtgcagtggtgtgatctcggctcactgcaacctctgcctcccgggttcaagcgattctcctgcctcagcctcctggagtagctgggattacaggcacgcgccaccacggccggctaatttttgt

SEQ ID NO: 341077 - DNA, 524 bp, Homo sapiens
actttgcttaaatgtggttgtggattccacttcctctgcacagatatgttttgtacatttatagaaactctatttttatacaaatcaggaacaccagagttctctgatgaccaaattttcattatcaaatttaatcacaaaatattcattattgaaattaattaaaatgtattatcaaaattaatcaaattcgatttcttaacctgacctccaagaacactgcaggaaatgctaccattgtcacaactaatttgccaacggaaattaaaaagaaaaaattctaagaagctgattttgaagttacagtaaaaattagtgttgcaaaaaaagaaaacaagcacttacatttcattgaactagagactgaagaacaatcacatggtgggccagactgttcttctggtaggaacgatattaaagtataccaactattacaccaaaaatatgctcagtggccagtctggataactcttcacatctgtgctgggctctctggatttgctacttcaccatgagcccaccct

SEQ ID NO: 341078 - DNA, 245 bp, Homo sapiens
attaaactaaaagattccccaagtaggcactgtcctaagataattgtattctacttaagtttattgtggtatgtggcagtgctctataattaacatatatatatatttaaccagcccttacaggtgatagttttaggatagaactttcaatttcttaagttttctttgtatctttgaatccttacgttaaggatgatcagtaagaaatttccttcaggagttgtgatgaggaacgtacatttatt

SEQ ID NO: 341079 - DNA, 137 bp, Homo sapiens
tggcagtatcgtagccaatgaggtctatccgaggcgcgattattgctaattgaaaacttttcccaataccccgccgtgacgacttgcaatatagtcggcactggcaatttttgacagtctctacggagactgaattt

SEQ ID NO: 341080 - DNA, 353 bp, Homo sapiens
gagatgttcaggaagcaattggagagacaggtctggaggtcagcactactagaggcagagatttggaaaatatctgccaaaagcgtaagtgtcacaggagttcatgaactgtagattcagaaaaagtttaaggaagaaccttgtaaataccatatgtcagaggtaattggagaatatggaattaaaaaaacaaaacaaacaaacaaagccaggagcaatgactcacacctataatctcagcgttttgggaggctgaggcaggcagatcacctaagatcaagagtttgagaccagcctggccaacatggcaaagcccagtctctaccaaaaatagaaaaaaattaggtgggcat

SEQ ID NO: 341081 - DNA, 586 bp, Homo sapiens
ttgggaatactagtattcccaatacagtatttcagccctatgcttggaagccaatttgaacagcaaaatcaccaaggaaaaatacaaaaatgagcggaaaaaaaggcactaaaaaggttgtgaaaaggacacttgtttacagtatgaaacaagaagacagagcctcacacattgccaggtggcaacatgaatgttgggcaactcaaatttttctccactctgcacatgtccacaagtgacccaaaaagtactttgtattgattttgtgtttataaatacatgctagtgaagaggcaaatttacaaatatagaatctgcaaataatgaggtttgactgcatatatttataaattataaacattgattgttttctaatgaaaataagatttcccccaaatgtcaattttattattaccatcatacatcacctaatgacagagacatgttctgagaagtgcgtctttagatgttttcatcattgtgtagacatcatagtgaacttatacaaaccaccccgatggtagagaccactacaccacctaggctatctgctataacctgttgctcctaggctacacacctgtac

SEQ ID NO: 341082 - DNA, 179 bp, Homo sapiens
aataaaacctttccaacagacagacataaagggatgtcaaattcagtttataggccaggtaaatgttaattgctaaaggtctgtaatgattcaaactttatagctgtgttggaaagaccaatactgcatattgcatattaatttaaatttgcggtgtcctccacattggcattagcttg

SEQ ID NO: 341083 - DNA, 317 bp, Homo sapiens
attgcaccactgcactccagcctgggtgacagagtgagaccctgtctcactcaaacaaacaaacaaacaaaaccttcgctttccctgcgtagagttcctatttttccattcattttgagagggctcacccttcctcctggagcacggtggcgcagctgctctgaagatcttgtggatcctccaccaggaaggatcccaggttggtgtgtgttgctcatttcccagctggagaggctgagggttcctatttcttcctatgctgagtacggacgtcgagttgtcctctggtctgtttgaatattgtcgtaacactccag

SEQ ID NO: 341084 - DNA, 306 bp, Homo sapiens
gcctgcaaactacaaactcgagtgaggaggtgggaaaaggatgcctagcaagagaggcggggtagggagtgggggacaatttttttttttttaaggaatctgtctttcaaaaaagccccaaccacaaaaccatatgtatattcgattccagggcctggagaagacaggccaggaaagcaactgtctgttgaaatggaactgaaggagccacttatgtgttaacttgtctgaaaaacagaaggggatcctggcctgcaactccctctctctaaaatcagcagttaggtgcaaatcaatgaggaggct

SEQ ID NO: 341085 - DNA, 376 bp, Homo sapiens
tttgagcctctgcgcccggcattcttttttaaaagataaaaaagtctggctgcagaggaaccttatacctgaaatgttttgctgtctgaattcactccagagtgaaatgacttgaagtacaagttttgtgactgctccgagaatttttgtgtcagaggcttctccttctgccattttttgaacatttacctagaattacaaaaaaatcattccacatttcacagtatggtgctaggaatctgaccaggtccagttcataattttaaactttagagttttaaaaacatgtatgcttatcatgctgtaagcaaatgggaccccaggagtaaggggtaactttctgtttttcctcattaggtttcaactttctgtgctg

SEQ ID NO: 341086 - DNA, 617 bp, Homo sapiens
ccactaatttttgtatttttaatagagacggtgttccaccgtgttggccgggctggtctctaactcctgacctcgggtgatccgcccgccttggcctcccaaagtgctgggattacaagcgtgagccaccgtgcccagcgccccatgttttctttccttggtatatctctcattgcacctcctctcctctctctctcacttccgtccagccacatcagcctcctagctgatctctacttctccatgctagttcccaccccagagtcttggcacccgctgttcctcctgtctggaaccttcttcccccagatctctatgtgtatcctccgcttttcctccttcaggtctctgttcatgtgcctgatcctttgaggtgccctccttaactcagggagatacgtctccttccaggccctcaccaacctactactactgctcccaatgggagccacatcatgtccagcctaggacgctaaatttgacccagggctcagatgggagcagaacaggcctcccctaaaacattcctttttttccttttcttttttttcttttctttttttttgggggggaacccgatatatcccagtctcggccatctacaggggggcccacca

SEQ ID NO: 341087 - DNA, 423 bp, Homo sapiens
ctatatacataaatttgacaacttagatgaaatgtatcactttttagaaaaatacagttacaacttacccaatatgaaacagataatttaaatagcccgatactattaaggaaaatgactttgtaatattttattttatattacattatttttaaaagacagcgtcctcattatgttgtccaagctggagtacagtggctatgcacaagtgctatcatggcacactgcagtcttgaactcctggcctcaagccatcctctcacttcagcttctcaagtagtggggactataggcctatgccaccatgtccagctactttgcaattttaaaactcccccaaaagaagtcttcaggtggccaggcatggtggctcacatctgtaatcccagcactttgggaggccaaggtgggtggatcacctga

SEQ ID NO: 341088 - DNA, 339 bp, Homo sapiens
taaaaagaaaatttaaggttaatactaaaaacggacttcttttatctatgctatgtcaagttaaagagtaaaaatagcaacaactacaaaaagactatccttttgacagatgacttaagctttttttttttaattaaaaaaaaaaaaggtagctaatataattggagtgtgcctgtgtcccaggaataactttaatgtcaggtgtcctccatagcactctgatgagtcaggtatcatcaataagtatattggtataatataacattcgggagatctttgaccctggagtctgacttaagagccgatggttaccactttacacaattccagaggccaaca

SEQ ID NO: 341089 - DNA, 1270 bp, Homo sapiens
gctgtattaggatttaaaaacggaacggtgaaggtgacagcagtcggttggagctgagcatcccccaaagttcacaagtgtggccgaggacttatgattgcacattgttgttttttttagtagtcattccaaatatgagatgcgttgttacaggaagtcccttgccatcctaaaagccaccccacttctctctaaggagaatggcccagtcctctcccaagtccacacaggggaggtgatagcattgctttcgtgtaaattatgtaatgcaaaatttttttaatcttcgccttaatacttttttattttgttttattttgaatgatgagccttcgtgcccccccttccccctttttggtcccccaggcctaagttcagagccaggcctggccctgaacttaggtgtgcctgtagcagagatccctcagggaaggggaaggaggatggtgcgggaagaagctcaaggtgagaaggcagagaaagggggcctagaaaccctttgttcatcctgatgagattcaggatttgagtagaggagggacaagatctgggaatacacactcaggatccttcttgatgacagccttccaatgctttaagggaacagttccaaagtcagagccatggccatctagtgaaaggtaccaagagacagcttttagttcagtgtatggcagctttagaattcaagtcgcccaagcaatggtctgtgctgcttcatgagtttagtgtccctggatttgcgcttaaaaaccaccagggtccatttcaacgtgaacattcagtgagtcttcccccttgttctacaagtgtttcctgacattggtcctgacttcggtggggtcgcagatggggaagagcagagcaggcgcgtggaggtgcaggggatgctaggagaggaagtggaggctggttcatggagacacaggggagcagtgtgagttcctagaagaacttcctagaagttcccatggttcagaaaagtgagggggcctgccacggagagactgagcattgggcatgaagagggcatgggtcatgagatcatggaggaaaggcctggggtaggctagagatctttcaagaagcagcaaaggatgaatggaagaattgccaagggcagagcttagagcggagtgaccaaggtgaccatcagagtcttgtgaggtgtgccccccgggtgggaaaaggaaagcttttgtttcctagggaccacaggtacctgagagaaagatagaggactgtctggcatagaaatggggaggggagg

SEQ ID NO: 341090 - DNA, 245 bp, Homo sapiens
caacataaaaagatttaccagaccaagaatatataggtagtatgtcaggatttcaatccaaatatactcaactccaaagctagtgtcttccctactttaccatgctgccttcctggtgaaggaggtttcagtggctgctttttgggagataccctgtagactatctaggacatagtaagaaattaaatccattatagggattagaaagagggcttattgttatactaattgacagtgacccaaaa

SEQ ID NO: 341091 - DNA, 296 bp, Homo sapiens
tggatggatggatggaatgggtatacaagcaagtaggtgaataaaagtttaggtggatgaaagagtggacagatgagtgaatggctagtagatgtttgagaggtggatgaatgaatggatgagtgattggaaaggtaagagggtggatggaagggagggttgatgaataagtggacagaagatgaagtacagaggtggatggacacacgaagggggatggacacacgaagggggatggacacacgaagggggatggacacacgaagggggatggacacacgaagggggatggacac

SEQ ID NO: 341092 - DNA, 106 bp, Homo sapiens
catggcagtgacataagaaatttgggaagaccatggctttcttgaaagcaggaaccaagtcttttattccagagttaactttatgcctggaaaataatgagatgct

SEQ ID NO: 341093 - DNA, 298 bp, Homo sapiens
ggagatggcatttaactccgtcacccaggctggactgcagtggtaccatcatagcttactgcagtcttaaactcctgggctcaggatatccccctgcctcagcctcctgtatttgctagcatttttttgaggatttttaaactttgttttcataagggtcattgcctgtagttttcctatggtgtctttttcttcctttagtgtcatggtaatgttggcctcatagaaggagttgggaagactcccctcctcttttattttttggaagagtttgagaaggagttatgttaattcttct

SEQ ID NO: 341094 - DNA, 275 bp, Homo sapiens
actgaccccaaaattcatatggaaactaaagggactaggagtagataaacagccttgaaaaggacaaagtcagaggactcacactcccgaattcaaaacttattacaaaactacgtaatggcatcagactaaacatatcaatggaatagaactgagtccagaaataaagccttaaatttatggtcaagaggctttttaaaatgtatttattttttcagagacagggtttcgctatgttgcccaggctggaccccaagtcctgagctcaagcgacc

SEQ ID NO: 341095 - DNA, 184 bp, Homo sapiens
ggagacataacaaagatctaagataatctataatgctagaaagaaaaggtgtaaatgccttgaaaacaaatcctaaaacaaagactaaagaaaagaaacaaagaatttttggaagaagaagctggaatgacatcatctttgtttctgaagctatagaaactggaaggggcctgtaaaagaaaaa

SEQ ID NO: 341096 - DNA, 584 bp, Homo sapiens
actcataccaagagaaagggaaggaagaagtttccagctagttagttaagcaatttctcaacacatttatggaagcatgtggaatctttcaagaaaggggttacgatcacaaaagttcgatttgaggagtattctccaagacaactgagaagcaagcccttagtcatgcccaggtggggagcaggtctccaacctctcatttcctgatccagcccctttcccagccacatttctggcctcttccctttctctgtggtcatcagcccagccctctccactatcaatagaaaagcccgagagccctcagagagcctggaatgtgctcccaccgctgtgatgtcatcccacatcatccatgtgctgaaatcagggactggagtcggcccccaggaatgtcatggccatgggctttgagacactcttcttatgggcctttcacccaatccagaccttgcctgctcttcagagctgcttgaaggattttgctacagaactatggacatttaagaaatgtctaaccttgtgtcagtttatatttgtagaacgcttcataaggtgcttttccatatgttatctcatctgat

SEQ ID NO: 341097 - DNA, 461 bp, Homo sapiens
aatgactaattcagtgttactgctttgttttattatttttcttcctttttggcagaaggatgggcaatggggaattctctatacagaagctgccttctaattgctaggactcccttatggatggtacatgtggataaaagagaagctgggtggtgcctgtgtggtccttccttactgtccattgtctcatggagccccgtctcctcccccacccagcttctgcaggatcatgcatgggaatgtgtgagatcagcccctgggaacagggggcttctctagagggagttccctgtgtgtctgcagactgtcatgggtcctcagcacctccactcccctgccaccccttgaacatggagtgacttgtcccagggatcaggtatatctgtgagcccagagggagcaccatgatccaatctagcctccccgctccacacccttcaccctttgtggatgagctctgt

SEQ ID NO: 341098 - DNA, 922 bp, Homo sapiens
gttgggcggtacttggacagcggttcttgagctctcgcggttgccggtagattgttgccagttgccagttgccagtcgtttttcggaaagctggcagcggctttttcaccgggttctgcttgaggccgagccaaagagtggctgtgactcgggagacggagtggaacacccggctgggcaggcccggacagctcccgcgacccagcaccgcaggatcagaccgtgcctctgcggggagaggctggagaggaagagtccggcctgggagccgtcagagcagccctgcagaacggggtgggggctgctgtagatagacccttacgcccagagaactgctgggaggctgtggcgcgaggcgggactcaaatgctggaggaaggagtactgccttccccaggccctgcccttccccaagaggaaaacacaggagaggaaggaatggctgctggtctcctcatagctgggccccggggatccacattcttcagcagtgtgacggtagcttttgcacaggaaaggtggaggtgcctcgtgtctactccacgggacaggttcaaggaggggataccaggaaagtccaggagccttgtcctactaggacttccagtttcccagcctggcatgaactcccagttggaacaaagggaaggcgcatggatgctggagggcgaagacctgcgaagtccctctccaggctggaagattatatctgggatcaccaccagagcaaagcctttctgaagcttcattcccagaaccatgtgttagatgcccctggggattcgaccgggacgtgacctgagagaggttcatctgggaccagcctctccggaaaggtgccggaacgagactcgaattggaacccgggagttgaatggagacctgacccgagaacctttgtggggggcgtccaggtctctcg

SEQ ID NO: 341099 - DNA, 551 bp, Homo sapiens
caaagacttttccagctcccccaaaactgccaacgttaaccacccctatcaccctagatcctaaggccactggcaagatgaaatgtgcttgttttttcagggatccacattcttcagcagtgtgacggtagcttttgcacaggaaaggtggaggtgcctcgtgtctactccacgggacaggttcaaggaggggataccaggaaagtccaggagccttgtcctactaggacttccagtttcccagcctggcatgaactcccagttggaacaaagggaaggcgcatggatgctggagggcgaagacctgcgaagtccctctccaggctggaagattatatctgggatcaccaccagagcaaagcctttctgaagcttcattcccagaaccatgtgttagatgcccctggggattcgaccgggacgtgacctgagagaggttcatctgggaccagcctctccggaaaggtgccggaacgagactcgaattggaacccgggagttgaatggagacctgacccgagaacctttgtggggggcgtccaggtctctcg

SEQ ID NO: 341100 - DNA, 108 bp, Homo sapiens
cctctctcctttttccctttcctcctttctcattctttcttccttcctttcttgttcctccctcccttccttctttccttcttttcccataagtaggactgaaggaag

SEQ ID NO: 341101 - DNA, 290 bp, Homo sapiens
aaaaaacacattttttggttgggggagaccaacctcaggaaattaattctctgtactctagctgtcacattcacaattaattagcttaaagttccttgaaagaacatttatgctattgtggcttgatttgcttgaaatagtagaaatctgtgggacttcaggagggtgtggtggtataaaacccttggctttcacaactggtttttctctttccttgaggataactgacattaaatacgctgaacaactgtggtcttcaaagaagtttttagagaacctgatccttaagt

SEQ ID NO: 341102 - DNA, 106 bp, Homo sapiens
atctcctctgaccaggcttcaaggctgacattcaccagggttccctgccacccctgccttcacattgatcttctcatcctttatacttcccctgagctacctgatg

SEQ ID NO: 341103 - DNA, 372 bp, Homo sapiens
ggtactagatacattttctgtatagaatgtgcacactgattataaagtttgtccaaacttccatctttaagaagaaaggcacgtaggccattactttaatactttacatttcttaaaagtttagacctaaaatagcaacaaacctggaagttacacacagcccaaagcaataattaaagtggaaacattggaagttacccgtaattacacgggtctgcagaaaataagaggggcaataattgtgcaggtcgtatgttccctgagggctccttcttaagcagagcagaagagcctagtaacagtaagctcagggaggagaggagcaaagagtacagatggtggatgtgaaacagagatcagtggagatcaaca

SEQ ID NO: 341104 - DNA, 386 bp, Homo sapiens
ttgccacagacctccacgttgaagctcatgtaattggaacatgcccagatgaaccatgtatgaaaccatgggcagaacctaagtgctaagatggaggcgcaagaactgaattaagaaggagacactgaatgacaggattcaggatccaatcatatggagccctgcgtgcaaacgcaaagagcaagaaccaaacaaagacaggaacaattcccagaagaagtcccgcctggtgttcactgacctccaacgccgaacactcttcgccatcttcaaggagaacaaacgcccgtcaaaggagatgcagatcaccatttcccagcagctgggcctggagctcacaaccgtcagcaacttcttcatgaacgcccggcgccgcagcctggaga

SEQ ID NO: 341105 - DNA, 416 bp, Homo sapiens
aagtagtagttttctgttgctgtgtaactaattaccacaaacttagaggcttaaaacaacacacattttaaaatctcatggtcctataggtcagaaatgcagtaggcttggctgggttatctgctctgggtcttaggaggctgaaatcaagttgtcagtaggactgcattcttttctggaggctctggagataaatcaactcccacacttatttgggttgttggtagaattcagttcatatggttgtaggactgaggtccatgtgtccttgctggatgttagctgatggtcgttctcagcttctacaggccatacatttcttgccttgtgatcctctttctttcttcatcttcaaagccggcaataggaggttgaatctctctcatgctttgaatctctctgactcatattttttt

SEQ ID NO: 341106 - DNA, 630 bp, Homo sapiens
gcaaagatcatggggaccatttctgagtttgtctatccaaggaaggggactgtgctgaggacaccggagtattagtgcctccctgggtaccatgagagggggcaacagaggagtcagacacacatgcacaaatacagaaaagcacagctgagactgagaaggagcaagaggaggagagtcagggaggctgagaggctaaacaaccaagaaagcagagttcagagaagttgactgcactgtgaaaagctgagtgtgattttatttgggagcatgcctctggtgtttttcaaggctatattttcatattcatcaggccctcaccgactggggagaccagaatgaaaaagtcattatgtgtgtcttcaaggatctcacaatatcagttcaaacataaatgtaagagggtgaaagtgttgaaagcatggttttctcttcccccatgaggatggccttgtcctgaaaatccaccacttgggaattggccagctctgactaggttgagatctcagggtctgaggaggctgtcaagcctctgcctcaagttcttgagcataatcccaacatctgggacattagcaaccttcctgtatgccaagaaagtagctggattagccagagtctgtcttgact

SEQ ID NO: 341107 - DNA, 1058 bp, Homo sapiens
agcggtgtgcctcctggcggctcctgaactccagccccctctctatcagccgctcactccgtctcaatatgtctcaagatggcggccaatgtgggatcgatgtttcaatattggaagcgctttgatttacagcagctgcagagagaactcgatgccaccgcaacggtattggcgaaccggcaggatgaaagtgagcagtccagaaagcggcttatcgaacagagccgggagttcaagaagaacactccagaggatttgcgcaagcaggtagcgccgctgctgaagagtttccaaggagagattgatgcactgagtaaaagaagcaaggaagctgaagcagctttcttgaatgtctacaaaagattgattgacgtcccagatcccgtaccagctttggatctcggacagcaactccagctcaaagtgcagcgcctgcacgatattgaaacagagaaccagaaacttagggaaactctggaagaatacaacaaggaatttgctgaagtgaaaaatcaagaggttacgataaaagcacttaaagagaaaatccgagaatatgaacagacactgaagaaccaagccgaaaccatagctcttgagaaggaacagaagttacagaatgactttgcagaaaaggagagaaagctgcaggagacacagatgtccaccacctcaaagctggaggaagctgagcataaggttcagagcctacaaacaggtttgatactctccttcctagtaccatggatgtggggaggacccagggggagagttgggtcagcccctgaccgccccggtccccgcggatacctgttgctcttcggggccgtgggagctgccgggagcccacgctgaagaattccgcagcacgcccgccagctgctgcgcctcattcctcactgactttgagttgttaatgtagaggtgggaggatctcgattccattttcatcccttccacacgccatccttgcttcctgctctttttccaacaaacacttctaaatcaccaaactgtcaaggactgacatttcatttggaacaataatagaaaaaaaa

SEQ ID NO: 341108 - DNA, 546 bp, Homo sapiens
ctccaggaactcttgagccttccccatgatgatgagtgggtcagggttaccgcagagctgaacggcctctgtagcgttcagcctgcagcctgcccaatgaggacgtttgcgctctggaaaggtaaactcaggatgctgttggctcctaagcagaaagcaggcgccacccagccttcaagtgcttcaacagtgaagagttaggacggaggcccagcctggaacattcacgccaccttctgcccccagtaaaattccttaaagctatgaggttctgactcaccacggggagtccctggccgccgctgggagggccttggccatgcaaatctcagtgacatagcatgtcttatttgcttcagaagtggcagaggagaaagtgacttgcctcacgctgcccggttccacccagggaccttgtgaagagacgcgggaaggctggcagaaaggagaaccgtccttcccgtggaatactcccgagatcgcaccactccactccagcctgggtgacaagagcaaaactccatctcaaaaaaaaaaaaaaaaagg

SEQ ID NO: 341109 - DNA, 967 bp, Homo sapiens
ccaacgcgttcgcccgagcgtcgcgaatatgatgcgattcggatgaacctgtcgtgctctttgctcttcagtaaggtctggagactacagaatgactttgcagaaccggagagaaagctgcaggagacacagatgtccaccacctcaaagctggaggaagctgagcataaggttcagagcctacaaacagccctggaaaaaactcgaacagaattatttgacctgaaaaccaaatacgatgaagaaactactgcaaaggccgacgagattgaaatgatcatgacggaccttgaaagggcaaaccagagggcagaggtggctcagagagaggcggagaccttaagggaacagctctcatcggccaatcactccctccagctggcctcacagatccagaaggcaccagacgtggagcaggccatagaggtgctgacccgctccagcctagaagttgagttggccgccaaggagcgggagatcgcacagctggtggaggacgtgcagagactccaggccagcctcaccaagctgcgggagaattcggccagccagatctcacagcttgagcagcagctgagcgccaaaaacagcacactcaaacaatggaagaaaaactcaaagggccggctgactatgaaagagggcacccagagctgaacatctgagtccatggaggtaggaccatcgaggcgctgggacacagatgcggccagcctggacgtgctgtgggacgagcacgacctgacgcagaacaccgcggcattcaacacgaacctaagagacgcgagagcgcaggagcgacacagaggggggcagacgggagagcaaccggagcgcggagagagcgacatacacaagccgcgaccagggcaacgctggaacagcagaaaggagaaggagagcaaggccaagggagacaacaacgcgggaaaaacagccaccggacagcgaacgacagagcgcagac

SEQ ID NO: 341110 - DNA, 457 bp, Homo sapiens
agcggtgtgcctcctggcggctcctgaactccagccccctctctatcagccgctcactccgtctcaatatgtctcaagatggcggccaatgtgggatcgatgtttcaatattggaagcgctttgatttacagcagctgcagagagaactcgatgccaccgcaacggtattggcgaaccggcaggatgaaagtgagcagtccagaaagcggcttatcgaacagagccgggagttcaagaagaacactccagaggatttgcgcaagcaggtagcgccgctgctgaagagtttccaaggagaggtaagcttttctattcattttctatcctgagccacccttcgtggctaattggtctttttattcacattaaagaaatgctccgggcaaaaggtgctgcccagatggtgccttcccggctgctccgacccagcgtcatgcagattttgcgctctgtgat

SEQ ID NO: 341111 - DNA, 3172 bp, Homo sapiens
agcggtgtgcctcctggcggctcctgaactccagccccctctctatcagccgctcactccgtctcaatatgtctcaagatggcggccaatgtgggatcgatgtttcaatattggaagcgctttgatttacagcagctgcagagagaactcgatgccaccgcaacggtattggcgaaccggcaggatgaaagtgagcagtccagaaagcggcttatcgaacagagccgggagttcaagaagaacactccagaggatttgcgcaagcaggtagcgccgctgctgaagagtttccaaggagagattgatgcactgagtaaaagaagcaaggaagctgaagcagctttcttgaatgtctacaaaagattgattgacgtcccagatcccgtaccagctttggatctcggacagcaactccagctcaaagtgcagcgcctgcacgatattgaaacagagaaccagaaacttagggaaactctggaagaatacaacaaggaatttgctgaagtgaaaaatcaagaggttacgataaaagcacttaaagagaaaatccgagaatatgaacagacactgaagaaccaagccgaaaccatagctcttgagaaggaacagaagttacagaatgactttgcagaaaaggagagaaagctgcaggagacacagatgtccaccacctcaaagctggaggaagctgagcataaggttcagagcctacaaacagccctggaaaaaactcgaacagaattatttgacctgaaaaccaaatacgatgaagaaactactgcaaaggccgacgagattgaaatgatcatgacggaccttgaaagggcaaaccagagggcagaggtggctcagagagaggcggagaccttaagggaacagctctcatcggccaatcactccctccagctggcctcacagatccagaaggcaccagacgtggagcaggccatagaggtgctgacccgctccagcctagaagttgagttggccgccaaggagcgggagatcgcacagctggtggaggacgtgcagagactccaggccagcctcaccaagctgcgggagaattcggccagccagatctcacagcttgagcagcagctgagcgccaaaaacagcacactcaaacaactggaagaaaaactcaaaggccaggctgactatgaagaggtgaagaaagagctgaacattctgaagtccatggagtttgcaccgtccgagggcgctgggacacaggatgcggccaagcccctggaggtgctgttgctggagaagaaccgctcgctgcagtccgagaacgccgcgctgcgcatctccaacagcgacctgagcggacgctgtgcggagctgcaagtccgtatcactgaggctgtggccacagccactgagcagagagagctgatcgcccgcctggagcaggacctgagcatcattcagtccatccagcggcccgatgccgagggtgccgctgagcaccgcctggagaagatcccagagcccatcaaagaggccactgccctattctacggacctgcagcaccagccagcggtgccctcccagagggccaggtggattcactgctttccatcatctccagccagagggagcgcttccgtgcccggaaccaggagcttgaggccgagaaccgcctggcccagcacaccctccaggccctgcagagtgagctggacagcctgcgcgccgacaacatcaagctctttgagaagatcaagttcctgcagagctaccctggccggggcagcggcagtgatgacacggagctgcggtactcgtcccagtacgaggagcgcctggaccccttctcctccttcagcaagcgggagcggcagaggaagtacctgagcttgagtccctgggacaaggccaccctcagcatggggcgtctggttctctccaacaagatggcgcgcaccatcggcttcttctacacactgttcctgcactgcctggtcttcctggtgctctacaagctggcatggagcgagagcatggagagggactgtgccaccttctgcgccaagaagttcgctgaccacctgcacaagttccacgagaatgacaacggggctgcggctggtgacttgtggcagtgataccccggggcctcccccgtgacagtgacggctgcgcctccaccccgactgctcagtgcatctaatcacttagactcccctgaagaatcccccatggaaactgcccttatccgctgtccagcagctgccagaggccccaggtcacctcgggtccccttgaaagaatgtctcggtcacatcaggcccgctaggtccagagagcgagcccccaatgcccggccaggctaagccgcagagaccctctcagcccccacctcaggttagggctctgcccgcagcctgacctctagccctggtggcagaggtccctcagctgcgaggctaattgggtgaccaccgattccagctgcggttaatccagcttgggcctgtctgcactgcgatcctcttgggctctcctaggatccccccatgccccgtaagaggtggaagacgcttccttccaggacagcaggctttgagtccagcacccccagcctgcctttgccaccagccccaccctgcagagtatatgaggcttgacagagtctgccccctcccccactgcaccccaagagagagagccccagccagcggaacagtttctattaccccctccctgcccccagacccatgtgatttctgctttcttctttagcaagatattctggtttctagataaggaagagtctctaatgagcccccgagccccagtctcttcagactcatggattggtctgaggggtctgaacgtctcctagccaatcagaactggctgtggaccaccctagcacggccacctctcagggccactggcaggccttcctgagttagatttgtagttgcatatttagctttgcacatttgaaataaaccacggtttggcatgcgccaaagaaaaaaatcaaacaacacactataatataaaagcactatcatagaaacatagacgaaaaaaacaacaaaccaaggcggaggcgcctccgcctacataatctatcccccacgcaagggggcgcccctacactgtgccgcgtctctcccccgcctttcttactttctctccagtggtggccct

SEQ ID NO: 341112 - DNA, 3124 bp, Homo sapiens
agcggtgtgcctcctggcggctcctgaactccagccccctctctatcagccgctcactccgtctcaatatgtctcaagatggcggccaatgtgggatcgatgtttcaatattggaagcgctttgatttacagcagctgcagagagaactcgatgccaccgcaacggtattggcgaaccggcaggatgaaagtgagcagtccagaaagcggcttatcgaacagagccgggagttcaagaagaacactccagagattgatgcactgagtaaaagaagcaaggaagctgaagcagctttcttgaatgtctacaaaagattgattgacgtcccagatcccgtaccagctttggatctcggacagcaactccagctcaaagtgcagcgcctgcacgatattgaaacagagaaccagaaacttagggaaactctggaagaatacaacaaggaatttgctgaagtgaaaaatcaagaggttacgataaaagcacttaaagagaaaatccgagaatatgaacagacactgaagaaccaagccgaaaccatagctcttgagaaggaacagaagttacagaatgactttgcagaaaaggagagaaagctgcaggagacacagatgtccaccacctcaaagctggaggaagctgagcataaggttcagagcctacaaacagccctggaaaaaactcgaacagaattatttgacctgaaaaccaaatacgatgaagaaactactgcaaaggccgacgagattgaaatgatcatgacggaccttgaaagggcaaaccagagggcagaggtggctcagagagaggcggagaccttaagggaacagctctcatcggccaatcactccctccagctggcctcacagatccagaaggcaccagacgtggagcaggccatagaggtgctgacccgctccagcctagaagttgagttggccgccaaggagcgggagatcgcacagctggtggaggacgtgcagagactccaggccagcctcaccaagctgcgggagaattcggccagccagatctcacagcttgagcagcagctgagcgccaaaaacagcacactcaaacaactggaagaaaaactcaaaggccaggctgactatgaagaggtgaagaaagagctgaacattctgaagtccatggagtttgcaccgtccgagggcgctgggacacaggatgcggccaagcccctggaggtgctgttgctggagaagaaccgctcgctgcagtccgagaacgccgcgctgcgcatctccaacagcgacctgagcggacgctgtgcggagctgcaagtccgtatcactgaggctgtggccacagccactgagcagagagagctgatcgcccgcctggagcaggacctgagcatcattcagtccatccagcggcccgatgccgagggtgccgctgagcaccgcctggagaagatcccagagcccatcaaagaggccactgccctattctacggacctgcagcaccagccagcggtgccctcccagagggccaggtggattcactgctttccatcatctccagccagagggagcgcttccgtgcccggaaccaggagcttgaggccgagaaccgcctggcccagcacaccctccaggccctgcagagtgagctggacagcctgcgcgccgacaacatcaagctctttgagaagatcaagttcctgcagagctaccctggccggggcagcggcagtgatgacacggagctgcggtactcgtcccagtacgaggagcgcctggaccccttctcctccttcagcaagcgggagcggcagaggaagtacctgagcttgagtccctgggacaaggccaccctcagcatggggcgtctggttctctccaacaagatggcgcgcaccatcggcttcttctacacactgttcctgcactgcctggtcttcctggtgctctacaagctggcatggagcgagagcatggagagggactgtgccaccttctgcgccaagaagttcgctgaccacctgcacaagttccacgagaatgacaacggggctgcggctggtgacttgtggcagtgataccccggggcctcccccgtgacagtgacggctgcgcctccaccccgactgctcagtgcatctaatcacttagactcccctgaagaatcccccatggaaactgcccttatccgctgtccagcagctgccagaggccccaggtcacctcgggtccccttgaaagaatgtctcggtcacatcaggcccgctaggtccagagagcgagcccccaatgcccggccaggctaagccgcagagaccctctcagcccccacctcaggttagggctctgcccgcagcctgacctctagccctggtggcagaggtccctcagctgcgaggctaattgggtgaccaccgattccagctgcggttaatccagcttgggcctgtctgcactgcgatcctcttgggctctcctaggatccccccatgccccgtaagaggtggaagacgcttccttccaggacagcaggctttgagtccagcacccccagcctgcctttgccaccagccccaccctgcagagtatatgaggcttgacagagtctgccccctcccccactgcaccccaagagagagagccccagccagcggaacagtttctattaccccctccctgcccccagacccatgtgatttctgctttcttctttagcaagatattctggtttctagataaggaagagtctctaatgagcccccgagccccagtctcttcagactcatggattggtctgaggggtctgaacgtctcctagccaatcagaactggctgtggaccaccctagcacggccacctctcagggccactggcaggccttcctgagttagatttgtagttgcatatttagctttgcacatttgaaataaaccacggtttggcatgcgccaaagaaaaaaatcaaacaacacactataatataaaagcactatcatagaaacatagacgaaaaaaacaacaaaccaaggcggaggcgcctccgcctacataatctatcccccacgcaagggggcgcccctacactgtgccgcgtctctcccccgcctttcttactttctctccagtggtggccct

SEQ ID NO: 341113 - DNA, 5563 bp, Homo sapiens
  misc_feature (2)..(5): n is a, c, g, or t
  misc_feature (56)..(57): n is a, c, g, or t
  misc_feature (2573)..(2574): n is a, c, g, or t
gnnnnccgcggcgccgggacagccccgggactctgccaggtggatgttgtgcgtanncggagccaggttgaagagagaactcgatgccaccgcaacggtattggcgaaccggcaggatgaaagtgagcagtccagaaagcggcttatcgaacagagccgggagttcaagaagaacactccagaggatttgcgcaagcaggtagcgccgctgctgaagagtttccaaggagagattgatgcactgagtaaaagaagcaaggaagctgaagcagctttcttgaatgtctacaaaagattgattgacgtcccagatcccgtaccagctttggatctcggacagcaactccagctcaaagtgcagcgcctgcacgatattgaaacagagaaccagaaacttagggaaactctggaagaatacaacaaggaatttgctgaagtgaaaaatcaagaggttacgataaaagcacttaaagagaaaatccgagaatatgaacagacactgaagaaccaagccgaaaccatagctcttgagaaggaacagaagttacagaatgactttgcagaaaaggagagaaagctgcaggagacacagatgtccaccacctcaaagctggaggaagctgagcataaggttcagagcctacaaacagccctggaaaaaactcgaacagaattatttgacctgaaaaccaaatacgatgaagaaactactgcaaaggccgacgagattgaaatgatcatgacggaccttgaaagggcaaaccagagggcagaggtggctcagagagaggcggagaccttaagggaacagctctcatcggccaatcactccctccagctggcctcacagatccagaaggcaccagacgtggagcaggccatagaggtgctgacccgctccagcctagaagttgagttggccgccaaggagcgggagatcgcacagctggtggaggacgtgcagagactccaggccagcctcaccaagctgcgggagaattcggccagccagatctcacagcttgagcagcagctgagcgccaaaaacagcacactcaaacaactggaagaaaaactcaaaggccaggctgactatgaagaggtgaagaaagagctgaacattctgaagtccatggagtttgcaccgtccgagggcgctgggacacaggatgcggccaagcccctggaggtgctgttgctggagaagaaccgctcgctgcagtccgagaacgccgcgctgcgcatctccaacagcgacctgagcgggtcagccaggaggaaagggaaagaccagcctgaaagtcggcgcccgggatctttgccggccccccctccttctcagttgccccgcaacccgggggagcaggcttccaatactaatggtacacaccagttctcaccagcggggttaagtcaagactttttcagctcatccctggcaagccccagcctacccctggcttctacaggaaaatttgcactaaactctcttctccagcggcagctaatgcagtccttctactccaaggctatgcaggaagccggaagcacaagcatgattttttcaacaggtccatacagcacaaactccatatcttcccaaagtccattacaacaaagcccagatgtcaatggcatggccccatcccccagccagtcagaaagtgctgggagcgtctccgagggcgaggagatggacactgcagaaatcgcccggcaggtcaaagagcagctgattaagcacaatatcggacaacgtattttcggacattatgtgttgggactgtctcaagggtccgtgagcgagattctggcccggcccaagccatggaataaactgactgttcgtggcaaggagccatttcacaagatgaaacagttcctctccgatgagcagaacatcctggccctccgtagcatccaaggcagacaaagagagaatccaggccagagcctgaacagactatttcaggaagtaccgaaacgaagaaatgggtctgaaggtaacatcaccacccggatccgagcctcggagactggctctgatgaagccatcaagtccatcctagagcaagccaagagggagctccaagtgcagaaaactgcagagccggcccagccttcctccgcatccggcagcgggaactctgatgacgccatccgctccatcctgcagcaagcccgccgggagatggaggcccagcaggctgccctcgaccctgccttaaagcaggcaccactgtcccagagtgacatcaccatcctcacccccaagcttctgtccacctcgcccatgcccaccgtgtccagctacccacctctcgccatctccctgaagaagccctccgcagctcctgaggccggtgcctctgctctgccgaaccccccggccctcaaaaaggaggcccaggacgcccccgggctggacccccagggagcagccgattgtgcacaaggggtcctgagacaggtgaaaaatgaggtgggccgcagcggtgcctggaaggaccactggtggagcgcggtgcagccggagagaagaaatgccgcctcctccgaggaggccaaggccnnagaaacgggcggcgggaaagagaagggcagcggtggcagcggaggtggcagccagcctcgggccgagcgcagtcagctccagggaccctcgtcgtcagagtactggaaggagtggcccagcgctgagtccccatactcccagagctcagagctgagtctgaccggggccagccgcagcgagacaccacagaacagccccctgccatcctccccgatcgtgcccatgtccaagcccaccaagccctcggtccccccgctgacccccgagcagtacgaggtctacatgtaccaggaggtggacaccatcgagctcacccggcaggttaaggaaaagctggccaagaacggcatctgccagagaatcttcggggagaaggtgctgggcctgtcccagggcagcgtcagcgacatgctgtcccgaccgaagccatggagcaagctgacgcagaaaggccgagaacccttcatccggatgcagctctggctgaacggcgagctaggccagggtgttctacccgtccagggccagcagcaagggccagtcctccactccgtgacatcgctccaggacccgctgcagcagggctgtgtgagctcagaaagcactccaaagacctccgccagctgcagccctgcccctgagtccccgatgagttccagtgagtcggtgaagagcctgaccgagctggtccagcagccctgtccccccatcgaggcgagcaaggacagcaagccaccagagcccagtgacccgccagcatccgactcccagcccacaaccccgctgcctctctccggacactcggccctcagcatccaagaattagtagccatgtccccggagctggacacctacggcataaccaagcgggtgaaggaggtgctgacggacaacaacctcggccagcgcttatttggggagaccatcttagggctcacccaaggctctgtctctgacctccttgcccgccccaaaccctggcataagctcagtctgaaaggacgagagcccttcgtccggatgcagctgtggctgaacgaccccaacaatgtggagaagctgatggacatgaaacggatggagaagaaagcctacatgaagcggcggcacagctcagtcagtgacagccagccctgcgaaccgccctctgtcggcaccgagtacagccagggcgccagcccccagccccagcaccagctgaagaaaccccgggtggtgctggctccggaggagaaggaggcgctgaaacgagcgtatcagcaaaagccatacccgtcaccaaaaaccatcgaagacctcgccacccagctcaacctgaaaaccagcaccgtcatcaactggttccacaactacaggtctcggatccgcagagaactgttcattgaggaaattcaggccgggagtcagggccaggcgggcgccagcgactcaccctcggcccgcagcggccgggcggcgcccagctcggagggcgacagctgcgacggcgtggaggccactgagggcccaggcagcgccgacaccgaggagcccaagtctcagggagaggccgagcgggaggaggtgccgcggccggcggagcagacggagccgccgccctcggggaccccgggcccggacgacgcccgcgacgacgaccacgagggaggccccgtggaaggcccggggcccctgcccagccccgcctccgcgaccgccaccgccgcgcccgcggcccccgaggacgccgctacctcagccgccgccgcgccgggggagggccccgcggccccgagctccgcgccaccgcccagcaacagcagcagcagcagcgccccccgcaggcccagctcgctgcagagccttttcggcctccccgaggccgcgggcgcccgggactcgcgcgacaaccccctgcgcaagaagaaggccgcgaacttgaacagcatcatccaccgcctggagaaggccgccagccgggaggaacctatcgaatgggagttctgaggggctgcggccctggggcgggcagccaggctgggccgcaagggcctggacggggtcggacggggcaggcgctgcggacaccgtggcctgggcttggcccgcggcctgcaccgaccccgggccggacctgagcccgcagcccagaccccctccacggtccgcggcctgcaccgacccgaggcccagatccaaggccgcggcccagacccactctgcggcccgggccgaccctgcggcctccaccaaccccgcggcccagacccagcccgcggcctggacccctggaccgctttgcgcacttaccgccctgcgggccacagggcaaaatcgccataggccaaggtgcatatagaaaacaaaggagcattaagcccaatctatgtcgtgttttcaaggaagaaaacggaaatgtgtggtcgagcttttttgtaccctgaagtgttttttttattgccctaagtgatttccacaggttctggaataactcttacagctttgccttgtgtcctcttgttccgtgtgggctttaaaagaaaaaaaatcaaacccacatattaaaagggggctttttatctgccatctaatggcttcagagcgataatacactattatcttcttaaaccaggaaaaaataaaagggggggtgggatttttcagaaaaattaaaaaagaaagtttttgtagctgttcagttgccactaagagattgcacagtcaaaacgactctaaacacactagtttggattcctaaatattttcaagaaaagaatcttctcgtttgaaactttgaattaaaataaaacacatttactccacatattttttaacaaaaagaaaacgtcacatcaggaaactctgattttgtggtagctgacatagtgttttcttgtacgtgaatagaatcctgacatgtagtgcacattgatgtatagctttaactgaccctgggttttgcagaccagggtttgtttaatacactccattctaggccaaatcaggaca

SEQ ID NO: 341114 - DNA, 2225 bp, Homo sapiens
agcggtgtgcctcctggcggctcctgaactccagccccctctctatcagccgctcactccgtctcaatatgtctcaagatggcggccaatgtgggatcgatgtttcaatattggaagcgctttgatttacagcagctgcagagagaactcgatgccaccgcaacggtattggcgaaccggcaggatgaaagtgagcagtccagaaagcggcttatcgaacagagccgggagttcaagaagaacactccagaggatttgcgcaagcaggtagcgccgctgctgaagagtttccaaggagagattgatgcactgagtaaaagaagcaaggaagctgaagcagctttcttgaatgtctacaaaagattgattgacgtcccagatcccgtaccagctttggatctcggacagcaactccagctcaaagtgcagcgcctgcacgatattgaaacagagaaccagaaacttagggaaactctggaagaatacaacaaggaatttgctgaagtgaaaaatcaagaggttacgataaaagcacttaaagagaaaatccgagaatatgaacagacactgaagaaccaagccgaaaccatagctcttgagaaggaacagaagttacagaatgactttgcagaaaaggagagaaagctgcaggagacacagatgtccaccacctcaaagctggaggaagctgagcataaggttcagagcctacaaacagccctggaaaaaactcgaacagaattatttgacctgaaaaccaaatacgatgaagaaactactgcaaaggccgacgagattgaaatgatcatgacggaccttgaaagggcaaaccagagggcagaggtggctcagagagaggcggagaccttaagggaacagctctcatcggccaatcactccctccagctggcctcacagatccagaaggcaccagacgtggagcaggccatagaggtgctgacccgctccagcctagaagttgagttggccgccaaggagcgggagatcgcacagctggtggaggacgtgcagagactccaggccagcctcaccaagctgcgggagaattcggccagccagatctcacagcttgagcagcagctgagcgccaaaaacagcacactcaaacaactggaagaaaaactcaaaggccaggctgactatgaagaggtgaagaaagagctgaacattctgaagtccatggagtttgcaccgtccgagggcgctgggacacaggatgcggccaagcccctggaggtgctgttgctggagaagaaccgctcgctgcagtccgagaacgccgcgctgcgcatctccaacagcgacctgagcggacgctgtgcggagctgcaagtccgtatcactgaggctgtggccacagccactgagcagagagagctgatcgcccgcctggagcaggacctgagcatcattcagtccatccagcggcccgatgccgagggtgccgctgagcaccgcctggagaagatcccagagcccatcaaagaggccactgccctattctacggacctgcagcaccagccagcggtgccctcccagagggccaggtggattcactgctttccatcatctccagccagagggagcgcttccgtgcccggaaccaggagcttgaggccgagaaccgcctggcccagcacaccctccaggccctgcagagtgagctggacagcctgcgcgccgacaacatcaagctctttgagaagatcaagttcctgcagagctaccctggccggggcagcggcagtgatgacacggagctgcggtactcgtcccagtacgaggagcgcctggaccccttctcctccttcagcaagcgggagcggcagaggaagtacctgagcttgagtccctgggacaaggccaccctcagcatggggcgtctggttctctccaacaagatggcgcgcaccatcggcttcttctacacactgttcctgcactgcctggtcttcctggtgctctacaagctggcatggagcgagagcatggagagggactgtgccaccttctgcgccaagaagttcgctgaccacctgcacaagttccacgagaatgacaacggggctgcggctggtgacttgtggcagtgataccccggggcctcccccgtgacagtgacggctgcgcctccaccccgactgctcgcttactgtactatgtgctggctgcagctgctgctccgctaaatgagtagcagctt

SEQ ID NO: 341115 - DNA, 6478 bp, Homo sapiens
  misc_feature (2335)..(2336): n is a, c, g, or t
agcggtgtgcctcctggcggctcctgaactccagccccctctctatcagccgctcactccgtctcaatatgtctcaagatggcggccaatgtgggatcgatgtttcaatattggaagcgctttgatttacagcagctgcagagagaactcgatgccaccgcaacggtattggcgaaccggcaggatgaaagtgagcagtccagaaagcggcttatcgaacagagccgggagttcaagaagaacactccagaggatttgcgcaagcaggtagcgccgctgctgaagagtttccaaggagagattgatgcactgagtaaaagaagcaaggaagctgaagcagctttcttgaatgtctacaaaagattgattgacgtcccagatcccgtaccagctttggatctcggacagcaactccagctcaaagtgcagcgcctgcacgatattgaaacagagaaccagaaacttagggaaactctggaagaatacaacaaggaatttgctgaagtgaaaaatcaagaggttacgataaaagcacttaaagagaaaatccgagaatatgaacagacactgaagaaccaagccgaaaccatagctcttgagaaggaacagaagttacagaatgactttgcagaaaaggagagaaagctgcaggagacacagatgtccaccacctcaaagctggaggaagctgagcataaggttcagagcctacaaacagccctggaaaaaactcgaacagaattatttgacctgaaaaccaaatacgatgaagaaactactgcaaaggccgacgagattgaaatgatcatgacggaccttgaaagggcaaaccagagggcagaggtggctcagagagaggcggagaccttaagggaacagctctcatcggccaatcactccctccagctggcctcacagatccagaaggcaccagacgtggagcaggccatagaggtgctgacccgctccagcctagaagttgagttggccgccaaggagcgggagatcgcacagctggtggaggacgtgcagagactccaggccagcctcaccaagctgcgggagaattcggccagccagatctcacagcttgagcagcagctgagcgccaaaaacagcacactcaaacaactggaagaaaaactcaaaggccaggctgactatgaagaggtgaagaaagagctgaacattctgaagtccatggagtttgcaccgtccgagggcgctgggacacaggatgcggccaagcccctggaggtgctgttgctggagaagaaccgctcgctgcagtccgagaacgccgcgctgcgcatctccaacagcgacctgagcggtccatacagcacaaactccatatcttcccaaagtccattacaacaaagcccagatgtcaatggcatggccccatcccccagccagtcagaaagtgctgggagcgtctccgagggcgaggagatggacactgcagaaatcgcccggcaggtcaaagagcagctgattaagcacaatatcggacaacgtattttcggacattatgtgttgggactgtctcaagggtccgtgagcgagattctggcccggcccaagccatggaataaactgactgttcgtggcaaggagccatttcacaagatgaaacagttcctctccgatgagcagaacatcctggccctccgtagcatccaaggcagacaaagagagaatccaggccagagcctgaacagactatttcaggaagtaccgaaacgaagaaatgggtctgaaggtaacatcaccacccggatccgagcctcggagactggctctgatgaagccatcaagtccatcctagagcaagccaagagggagctccaagtgcagaaaactgcagagccggcccagccttcctccgcatccggcagcgggaactctgatgacgccatccgctccatcctgcagcaagcccgccgggagatggaggcccagcaggctgccctcgaccctgccttaaagcaggcaccactgtcccagagtgacatcaccatcctcacccccaagcttctgtccacctcgcccatgcccaccgtgtccagctacccacctctcgccatctccctgaagaagccctccgcagctcctgaggccggtgcctctgctctgccgaaccccccggccctcaaaaaggaggcccaggacgcccccgggctggacccccagggagcagccgattgtgcacaaggggtcctgagacaggtgaaaaatgaggtgggccgcagcggtgcctggaaggaccactggtggagcgcggtgcagccggagagaagaaatgccgcctcctccgaggaggccaaggccnnagaaacgggcggcgggaaagagaagggcagcggtggcagcggaggtggcagccagcctcgggccgagcgcagtcagctccagggaccctcgtcgtcagagtactggaaggagtggcccagcgctgagtccccatactcccagagctcagagctgagtctgaccggggccagccgcagcgagacaccacagaacagccccctgccatcctccccgatcgtgcccatgtccaagcccaccaagccctcggtccccccgctgacccccgagcagtacgaggtctacatgtaccaggaggtggacaccatcgagctcacccggcaggttaaggaaaagctggccaagaacggcatctgccagagaatcttcggggagaaggtgctgggcctgtcccagggcagcgtcagcgacatgctgtcccgaccgaagccatggagcaagctgacgcagaaaggccgagaacccttcatccggatgcagctctggctgaacggcgagctaggccagggtgttctacccgtccagggccagcagcaagggccagtcctccactccgtgacatcgctccaggacccgctgcagcagggctgtgtgagctcagaaagcactccaaagacctccgccagctgcagccctgcccctgagtccccgatgagttccagtgagtcggtgaagagcctgaccgagctggtccagcagccctgtccccccatcgaggcgagcaaggacagcaagccaccagagcccagtgacccgccagcatccgactcccagcccacaaccccgctgcctctctccggacactcggccctcagcatccaagaattagtagccatgtccccggagctggacacctacggcataaccaagcgggtgaaggaggtgctgacggacaacaacctcggccagcgcttatttggggagaccatcttagggctcacccaaggctctgtctctgacctccttgcccgccccaaaccctggcataagctcagtctgaaaggacgagagcccttcgtccggatgcagctgtggctgaacgaccccaacaatgtggagaagctgatggacatgaaacggatggagaagaaagcctacatgaagcggcggcacagctcagtcagtgacagccagccctgcgaaccgccctctgtcggcaccgagtacagccagggcgccagcccccagccccagcaccagctgaagaaaccccgggtggtgctggctccggaggagaaggaggcgctgaaacgagcgtatcagcaaaagccatacccgtcaccaaaaaccatcgaagacctcgccacccagctcaacctgaaaaccagcaccgtcatcaactggttccacaactacaggtctcggatccgcagagaactgttcattgaggaaattcaggccgggagtcagggccaggcgggcgccagcgactcaccctcggcccgcagcggccgggcggcgcccagctcggagggcgacagctgcgacggcgtggaggccactgagggcccaggcagcgccgacaccgaggagcccaagtctcagggagaggccgagcgggaggaggtgccgcggccggcggagcagacggagccgccgccctcggggaccccgggcccggacgacgcccgcgacgacgaccacgagggaggccccgtggaaggcccggggcccctgcccagccccgcctccgcgaccgccaccgccgcgcccgcggcccccgaggacgccgctacctcagccgccgccgcgccgggggagggccccgcggccccgagctccgcgccaccgcccagcaacagcagcagcagcagcgccccccgcaggcccagctcgctgcagagccttttcggcctccccgaggccgcgggcgcccgggactcgcgcgacaaccccctgcgcaagaagaaggccgcgaacttgaacagcatcatccaccgcctggagaaggccgccagccgggaggaacctatcgaatgggagttctgaggggctgcggccctggggcgggcagccaggctgggccgcaagggcctggacggggtcggacggggcaggcgctgcggacaccgtggcctgggcttggcccgcggcctgcaccgaccccgggccggacctgagcccgcagcccagaccccctccacggtccgcggcctgcaccgacccgaggcccagatccaaggccgcggcccagacccactctgcggcccgggccgaccctgcggcctccaccaaccccgcggcccagacccagcccgcggcctggacccctggaccgctttgcgcacttaccgccctgcgggccacagggcaaaatcgccataggccaaggtgcatatagaaaacaaaggagcattaagcccaatctatgtcgtgttttcaaggaagaaaacggaaatgtgtggtcgagcttttttgtaccctgaagtgttttttttattgccctaagtgatttccacaggttctggaataactcttacagctttgccttgtgtcctcttgttccgtgtgggctttaaaagaaaaaaaatcaaacccacatattaaaagggggctttttatctgccatctaatggcttcagagcgataatacactattatcttcttaaaccaggaaaaaataaaagggggggtgggatttttcagaaaaattaaaaaagaaagtttttgtagctgttcagttgccactaagagattgcacagtcaaaacgactctaaacacactagtttggattcctaaatattttcaagaaaagaatcttctcgtttgaaactttgaattaaaataaaacacatttactccacatattttttaacaaaaagaaaacgtcacatcaggaaactctgattttgtggtagctgacatagtgttttcttgtacgtgaatagaatcctgacatgtagtgcacattgatgtatagctttaactgaccctgggttttgcagaccagggtttgtttaatacactccattctaggccaaatcaggacaaaaaaaagaaaaaaaaagaaaaaaaaaaaagaaaagatccgaatctaggtattttataatctgctttttaacctctaaccgcagagcacgctgatcagacctcatatcttggaggtttaggagacaagttagaactgtagcatgtacctgttaattttgtttaatttatggtgtctcaatctgtctgtgcgtctgcacgtgtgcaagcattgaaagaaaggagagagtagtccgggcgagcacagcaggcagttccagggccagacgggcccatccccaagtagatagcagtctacggatctctctctggcacagaaggcacctcacctcacaccactctcctggatacctgatgaactgagccctcccaggggaagacactccccaggcctgggcagggcttacacgcgcactctctctcttctttccctttttcttcccaccgcaagcactgatgaccctgttgaactcgtgggaaacttcctttctctgcaggagagagaacgtggcattctgggctccccactcccatccctgtagaaatggcccaaactcacaccaaaacgtggatgctcttcaacttccaaacctaccatttgcccttctttcatttcgcctcttagttctttttatgcacagttttagggcagtctaagtacaaactgaaagtctaacttgtctctgattcctcccttgtctatgtgtatatgcgtgagaatagaggcgggtgagagtgtgcgtgcgtgtgcgtgtgtgcaattttatacgtctgtgtattttcttaagtacctgtgcacacgtagagtgcattactgccacctttttcaataagctgttttatcagttacggcttctacaagtttgctaatttagacttctttattgccatatctttaaactaacaatagatgatttcggtatatatatatatttttttttgcttatttataggtgctgtattttattatctgattgttaggaagggatgaaaggggcaaatattctttagagggatagactgccggcagtattgggtataatttacaagatgtagttgtcatactgtatattactgattgaaaactttttgaccgtattgtgtatcattgaaacctttgtcttaggtcaacatctttggatgacattttaatgg

SEQ ID NO: 341116 - DNA, 2531 bp, Homo sapiens
  misc_feature (7)..(7): n is a, c, g, or t
gtctttncagtcaaaagtccttgaagctgggaccctttgaaagtctgtcagttacatgttgttggtagtggcttgttttgaccgtttcaaaaaaggaagaaaaaaccacttaaatcatttttcctttctcttttctactgcaaaggccgacgagattgaaatgatcatgacggaccttgaaagggcaaaccagagggcagaggtggctcagagagaggcggagaccttaagggaacagctctcatcggccaatcactccctccagctggcctcacagatccagaaggcaccagacgtggagcaggccatagaggtgctgacccgctccagcctagaagttgagttggccgccaaggagcgggagatcgcacagctggtggaggacgtgcagagactccaggccagcctcaccaagctgcgggagaattcggccagccagatctcacagcttgagcagcagctgagcgccaaaaacagcacactcaaacaactggaagaaaaactcaaaggccaggctgactatgaagaggtgaagaaagagctgaacattctgaagtccatggagtttgcaccgtccgagggcgctgggacacaggatgcggccaagcccctggaggtgctgttgctggagaagaaccgctcgctgcagtccgagaacgccgcgctgcgcatctccaacagcgacctgagcggacgctgtgcggagctgcaagtccgtatcactgaggctgtggccacagccactgagcagagagagctgatcgcccgcctggagcaggacctgagcatcattcagtccatccagcggcccgatgccgagggtgccgctgagcaccgcctggagaagatcccagagcccatcaaagaggccactgccctattctacggacctgcagcaccagccagcggtgccctcccagagggccaggtggattcactgctttccatcatctccagccagagggagcgcttccgtgcccggaaccaggagcttgaggccgagaaccgcctggcccagcacaccctccaggccctgcagagtgagctggacagcctgcgcgccgacaacatcaagctctttgagaagatcaagttcctgcagagctaccctggccggggcagcggcagtgatgacacggagctgcggtactcgtcccagtacgaggagcgcctggaccccttctcctccttcagcaagcgggagcggcagaggaagtacctgagcttgagtccctgggacaaggccaccctcagcatggggcgtctggttctctccaacaagatggcgcgcaccatcggcttcttctacacactgttcctgcactgcctggtcttcctggtgctctacaagctggcatggagcgagagcatggagagggactgtgccaccttctgcgccaagaagttcgctgaccacctgcacaagttccacgagaatgacaacggggctgcggctggtgacttgtggcagtgataccccggggcctcccccgtgacagtgacggctgcgcctccaccccgactgctcagtgcatctaatcacttagactcccctgaagaatcccccatggaaactgcccttatccgctgtccagcagctgccagaggccccaggtcacctcgggtccccttgaaagaatgtctcggtcacatcaggcccgctaggtccagagagcgagcccccaatgcccggccaggctaagccgcagagaccctctcagcccccacctcaggttagggctctgcccgcagcctgacctctagccctggtggcagaggtccctcagctgcgaggctaattgggtgaccaccgattccagctgcggttaatccagcttgggcctgtctgcactgcgatcctcttgggctctcctaggatccccccatgccccgtaagaggtggaagacgcttccttccaggacagcaggctttgagtccagcacccccagcctgcctttgccaccagccccaccctgcagagtatatgaggcttgacagagtctgccccctcccccactgcaccccaagagagagagccccagccagcggaacagtttctattaccccctccctgcccccagacccatgtgatttctgctttcttctttagcaagatattctggtttctagataaggaagagtctctaatgagcccccgagccccagtctcttcagactcatggattggtctgaggggtctgaacgtctcctagccaatcagaactggctgtggaccaccctagcacggccacctctcagggccactggcaggccttcctgagttagatttgtagttgcatatttagctttgcacatttgaaataaaccacggtttggcatgcgccaaagaaaaaaatcaaacaacacactataatataaaagcactatcatagaaacatagacgaaaaaaacaacaaaccaaggcggaggcgcctccgcctacataatctatcccccacgcaagggggcgcccctacactgtgccgcgtctctcccccgcctttcttactttctctccagtggtggccct

SEQ ID NO: 341117 - DNA, 2211 bp, Homo sapiens
  misc_feature (1844)..(1844): n is a, c, g, or t
  misc_feature (1846)..(1846): n is a, c, g, or t
  misc_feature (1854)..(1854): n is a, c, g, or t
  misc_feature (1858)..(1859): n is a, c, g, or t
  misc_feature (1865)..(1865): n is a, c, g, or t
  misc_feature (1874)..(1875): n is a, c, g, or t
  misc_feature (1880)..(1880): n is a, c, g, or t
  misc_feature (1897)..(1897): n is a, c, g, or t
  misc_feature (1899)..(1899): n is a, c, g, or t
  misc_feature (1909)..(1909): n is a, c, g, or t
  misc_feature (1919)..(1919): n is a, c, g, or t
  misc_feature (1942)..(1942): n is a, c, g, or t
  misc_feature (1950)..(1950): n is a, c, g, or t
  misc_feature (1970)..(1970): n is a, c, g, or t
  misc_feature (1975)..(1975): n is a, c, g, or t
  misc_feature (1990)..(1990): n is a, c, g, or t
  misc_feature (2000)..(2000): n is a, c, g, or t
  misc_feature (2012)..(2013): n is a, c, g, or t
  misc_feature (2041)..(2041): n is a, c, g, or t
  misc_feature (2043)..(2043): n is a, c, g, or t
  misc_feature (2139)..(2139): n is a, c, g, or t
  misc_feature (2188)..(2188): n is a, c, g, or t
agcggtgtgcctcctggcggctcctgaactccagccccctctctatcagccgctcactccgtctcaatatgtctcaagatggcggccaatgtgggatcgatgtttcaatattggaagcgctttgatttacagcagctgcagagagaactcgatgccaccgcaacggtattggcgaaccggcaggatgaaagtgagcagtccagaaagcggcttatcgaacagagccgggagttcaagaagaacactccagaggatttgcgcaagcaggtagcgccgctgctgaagagtttccaaggagagattgatgcactgagtaaaagaagcaaggaagctgaagcagctttcttgaatgtctacaaaagattgattgacgtcccagatcccgtaccagctttggatctcggacagcaactccagctcaaagtgcagcgcctgcacgatattgaaacagagaaccagaaacttagggaaactctggaagaatacaacaaggaatttgctgaagtgaaaaatcaagaggttacgataaaagcacttaaagagaaaatccgagaatatgaacagacactgaagaaccaagccgaaaccatagctcttgagaaggaacagaagttacagaatgactttgcagaaaaggagagaaagctgcaggagacacagatgtccaccacctcaaagctggaggaagctgagcataaggttcagagcctacaaacagccctggaaaaaactcgaacagaattatttgacctgaaaaccaaatacgatgaagaaactactgcaaaggccgacgagattgaaatgatcatgacggaccttgaaagggcaaaccagagggcagaggtggctcagagagaggcggagaccttaagggaacagctctcatcggccaatcactccctccagctggcctcacagatccagaaggcaccagacgtggagcaggccatagaggtgctgacccgctccagcctagaagttgagttggccgccaaggagcgggagatcgcacagctggtggaggacgtgcagagactccaggccagcctcaccaagctgcgggagaattcggccagccagatctcacagcttgagcagcagctgagcgccaaaaacagcacactcaaacaactggaagaaaaactcaaaggccaggctgactatgaagaggtgaagaaagagctgaacattctgaagtccatggagtttgcaccgtccgagggcgctgggacacaggatgcggccaagcccctggaggtgctgttgctggagaagaaccgctcgctgcagtccgagaacgccgcgctgcgcatctccaacagcgacctgagcggtccatacagcacaaactccatatcttcccaaagtccattacaacaaagcccagatgtcaatggcatggccccatcccccagccagtcagaaagtgctgggagcgtctccgagggcgaggagatggacactgcagaaatcgcccggcaggtcaaagagcagctgattaagcacaatatcggacaacgtattttcggacattatgtgttgggactgtctcaagggtccgtgagcgagattctggcccggcccaagccatggaataaactgactgttcgtggcaaggagccatttcacaagatgaaacagttcctctccgatgagcagaacatcctggccctccgtagcatccaaggcagacaaagagagaatccaggccagagcctgaacagactatttcaggaagtaccgaaacgaagaaatgggtctgaaggtaacatcaccacccgtccacctggccgaggcagcccagagccagcgggatgagctggcgggccagagaacgccaagananagaaaaanaaanngataangtattgccnnacccntccgccgttccccaccntntgccccccanccctctggcntctctaaaaactgctgctgatgnagacaagnacagagcccgcccccacccngcacngcaagcccctcactncaccctcctnccaggccctccnncccgggtggtggccggcacctctgaacntnacgtgggtcgcggggcgggcatgtcccaggtttgtctgagacagtctttttttattttgtattgttatttttattatttttaatttaaacctgatnacttgcacagcatctttcccaccgggaagagcgggcctgctgccttccnacctgcggggtgggggtggaaca

SEQ ID NO: 341118 - DNA, 5784 bp, Homo sapiens
  misc_feature (1641)..(1642): n is a, c, g, or t
agcggtgtgcctcctggcggctcctgaactccagccccctctctatcagccgctcactccgtctcaatatgtctcaagatggcggccaatgtgggatcgatgtttcaatattggaagcgctttgatttacagcagctgcagagagaactcgatgccaccgcaacggtattggcgaaccggcaggatgaaagtgagcagtccagaaagcggcttatcgaacagagccgggagttcaagaagaacactccagaggatttgcgcaagcaggtagcgccgctgctgaagagtttccaaggagagattgatgcactgagtaaaagaagcaaggaagctgaagcagctttcttgaatgtctacaaaagattgattgacgtcccagatcccgtaccagctttggatctcggacagcaactccagctcaaagtgcagcgcctgcacgatattgaaacagagaaccagaaacttagggaaactctggaagaatacaacaaggaatttgctgaagtgaaaaatcaagaggttacgataaaagcacttaaagagaaaatccgagaatatgaacagacactgaagaaccaaagtccttctactccaaggctatgcaggaagccggaagcacaagcatgattttttcaacaggtccatacagcacaaactccatatcttcccaaagtccattacaacaaagcccagatgtcaatggcatggccccatcccccagccagtcagaaagtgctgggagcgtctccgagggcgaggagatggacactgcagaaatcgcccggcaggtcaaagagcagctgattaagcacaatatcggacaacgtattttcggacattatgtgttgggactgtctcaagggtccgtgagcgagattctggcccggcccaagccatggaataaactgactgttcgtggcaaggagccatttcacaagatgaaacagttcctctccgatgagcagaacatcctggccctccgtagcatccaaggcagacaaagagagaatccaggccagagcctgaacagactatttcaggaagtaccgaaacgaagaaatgggtctgaaggtaacatcaccacccggatccgagcctcggagactggctctgatgaagccatcaagtccatcctagagcaagccaagagggagctccaagtgcagaaaactgcagagccggcccagccttcctccgcatccggcagcgggaactctgatgacgccatccgctccatcctgcagcaagcccgccgggagatggaggcccagcaggctgccctcgaccctgccttaaagcaggcaccactgtcccagagtgacatcaccatcctcacccccaagcttctgtccacctcgcccatgcccaccgtgtccagctacccacctctcgccatctccctgaagaagccctccgcagctcctgaggccggtgcctctgctctgccgaaccccccggccctcaaaaaggaggcccaggacgcccccgggctggacccccagggagcagccgattgtgcacaaggggtcctgagacaggtgaaaaatgaggtgggccgcagcggtgcctggaaggaccactggtggagcgcggtgcagccggagagaagaaatgccgcctcctccgaggaggccaaggccnnagaaacgggcggcgggaaagagaagggcagcggtggcagcggaggtggcagccagcctcgggccgagcgcagtcagctccagggaccctcgtcgtcagagtactggaaggagtggcccagcgctgagtccccatactcccagagctcagagctgagtctgaccggggccagccgcagcgagacaccacagaacagccccctgccatcctccccgatcgtgcccatgtccaagcccaccaagccctcggtccccccgctgacccccgagcagtacgaggtctacatgtaccaggaggtggacaccatcgagctcacccggcaggttaaggaaaagctggccaagaacggcatctgccagagaatcttcggggagaaggtgctgggcctgtcccagggcagcgtcagcgacatgctgtcccgaccgaagccatggagcaagctgacgcagaaaggccgagaacccttcatccggatgcagctctggctgaacggcgagctaggccagggtgttctacccgtccagggccagcagcaagggccagtcctccactccgtgacatcgctccaggacccgctgcagcagggctgtgtgagctcagaaagcactccaaagacctccgccagctgcagccctgcccctgagtccccgatgagttccagtgagtcggtgaagagcctgaccgagctggtccagcagccctgtccccccatcgaggcgagcaaggacagcaagccaccagagcccagtgacccgccagcatccgactcccagcccacaaccccgctgcctctctccggacactcggccctcagcatccaagaattagtagccatgtccccggagctggacacctacggcataaccaagcgggtgaaggaggtgctgacggacaacaacctcggccagcgcttatttggggagaccatcttagggctcacccaaggctctgtctctgacctccttgcccgccccaaaccctggcataagctcagtctgaaaggacgagagcccttcgtccggatgcagctgtggctgaacgaccccaacaatgtggagaagctgatggacatgaaacggatggagaagaaagcctacatgaagcggcggcacagctcagtcagtgacagccagccctgcgaaccgccctctgtcggcaccgagtacagccagggcgccagcccccagccccagcaccagctgaagaaaccccgggtggtgctggctccggaggagaaggaggcgctgaaacgagcgtatcagcaaaagccatacccgtcaccaaaaaccatcgaagacctcgccacccagctcaacctgaaaaccagcaccgtcatcaactggttccacaactacaggtctcggatccgcagagaactgttcattgaggaaattcaggccgggagtcagggccaggcgggcgccagcgactcaccctcggcccgcagcggccgggcggcgcccagctcggagggcgacagctgcgacggcgtggaggccactgagggcccaggcagcgccgacaccgaggagcccaagtctcagggagaggccgagcgggaggaggtgccgcggccggcggagcagacggagccgccgccctcggggaccccgggcccggacgacgcccgcgacgacgaccacgagggaggccccgtggaaggcccggggcccctgcccagccccgcctccgcgaccgccaccgccgcgcccgcggcccccgaggacgccgctacctcagccgccgccgcgccgggggagggccccgcggccccgagctccgcgccaccgcccagcaacagcagcagcagcagcgccccccgcaggcccagctcgctgcagagccttttcggcctccccgaggccgcgggcgcccgggactcgcgcgacaaccccctgcgcaagaagaaggccgcgaacttgaacagcatcatccaccgcctggagaaggccgccagccgggaggaacctatcgaatgggagttctgaggggctgcggccctggggcgggcagccaggctgggccgcaagggcctggacggggtcggacggggcaggcgctgcggacaccgtggcctgggcttggcccgcggcctgcaccgaccccgggccggacctgagcccgcagcccagaccccctccacggtccgcggcctgcaccgacccgaggcccagatccaaggccgcggcccagacccactctgcggcccgggccgaccctgcggcctccaccaaccccgcggcccagacccagcccgcggcctggacccctggaccgctttgcgcacttaccgccctgcgggccacagggcaaaatcgccataggccaaggtgcatatagaaaacaaaggagcattaagcccaatctatgtcgtgttttcaaggaagaaaacggaaatgtgtggtcgagcttttttgtaccctgaagtgttttttttattgccctaagtgatttccacaggttctggaataactcttacagctttgccttgtgtcctcttgttccgtgtgggctttaaaagaaaaaaaatcaaacccacatattaaaagggggctttttatctgccatctaatggcttcagagcgataatacactattatcttcttaaaccaggaaaaaataaaagggggggtgggatttttcagaaaaattaaaaaagaaagtttttgtagctgttcagttgccactaagagattgcacagtcaaaacgactctaaacacactagtttggattcctaaatattttcaagaaaagaatcttctcgtttgaaactttgaattaaaataaaacacatttactccacatattttttaacaaaaagaaaacgtcacatcaggaaactctgattttgtggtagctgacatagtgttttcttgtacgtgaatagaatcctgacatgtagtgcacattgatgtatagctttaactgaccctgggttttgcagaccagggtttgtttaatacactccattctaggccaaatcaggacaaaaaaaagaaaaaaaaagaaaaaaaaaaaagaaaagatccgaatctaggtattttataatctgctttttaacctctaaccgcagagcacgctgatcagacctcatatcttggaggtttaggagacaagttagaactgtagcatgtacctgttaattttgtttaatttatggtgtctcaatctgtctgtgcgtctgcacgtgtgcaagcattgaaagaaaggagagagtagtccgggcgagcacagcaggcagttccagggccagacgggcccatccccaagtagatagcagtctacggatctctctctggcacagaaggcacctcacctcacaccactctcctggatacctgatgaactgagccctcccaggggaagacactccccaggcctgggcagggcttacacgcgcactctctctcttctttccctttttcttcccaccgcaagcactgatgaccctgttgaactcgtgggaaacttcctttctctgcaggagagagaacgtggcattctgggctccccactcccatccctgtagaaatggcccaaactcacaccaaaacgtggatgctcttcaacttccaaacctaccatttgcccttctttcatttcgcctcttagttctttttatgcacagttttagggcagtctaagtacaaactgaaagtctaacttgtctctgattcctcccttgtctatgtgtatatgcgtgagaatagaggcgggtgagagtgtgcgtgcgtgtgcgtgtgtgcaattttatacgtctgtgtattttcttaagtacctgtgcacacgtagagtgcattactgccacctttttcaataagctgttttatcagttacggcttctacaagtttgctaatttagacttctttattgccatatctttaaactaacaatagatgatttcggtatatatatatatttttttttgcttatttataggtgctgtattttattatctgattgttaggaagggatgaaaggggcaaatattctttagagggatagactgccggcagtattgggtataatttacaagatgtagttgtcatactgtatattactgattgaaaactttttgaccgtattgtgtatcattgaaacctttgtcttaggtcaacatctttggatgacattttaatgg

SEQ ID NO: 341119 - DNA, 972 bp, Homo sapiens
agcggtgtgcctcctggcggctcctgaactccagccccctctctatcagccgctcactccgtctcaatatgtctcaagatggcggccaatgtgggatcgatgtttcaatattggaagcgctttgatttacagcagctgcagagagaactcgatgccaccgcaacggtattggcgaaccggcaggatgaaagtgagcagtccagaaagcggcttatcgaacagagccgggagttcaagaagaacactccagaggatttgcgcaagcaggtagcgccgctgctgaagagtttccaaggagagattgatgcactgagtaaaagaagcaaggaagctgaagcagctttcttgaatgtctacaaaagattgattgacgtcccagatcccgtaccagctttggatctcggacagcaactccagctcaaagtgcagcgcctgcacgatattgaaacagagaaccagaaacttagggaaactctggaagaatacaacaaggaatttgctgaagtgaaaaatcaagaggttacgataaaagcacttaaagagaaaatccgagaatatgaacagacactgaagaaccaagccgaaaccatagctcttgagaaggaacagaagttacagaatgactttgcagaaaaggagagaaagctgcaggagacacagatgtccaccacctcaaagctggaggaagctgagcataaggttcagagcctacaaacagccctggaaaaaactcgaacagaattatttgacctgaaaaccaaatacgatgaagaaactactgcaaaaagtggcagaggagaaagtgacttgcctcacgctgcccggttccacccagggaccttgtgaagagacgcgggaaggctggcagaaaggagaaccgtccttcccgtggaatactcccgagatcgcaccactccactccagcctgggtgacaagagcaaaactccatctcaaaaaaaaaaaaaaaaagg

SEQ ID NO: 341120 - DNA, 310 bp, Homo sapiens
actctgtctcaaaaaataaataaaataacccctctgttgtgctcttgcagcattctgaagtccatggagtttgcaccgtccgagggcgctgggacacaggtacgtgtctcacctcaatggtcagcactagcatcagccccgctgctggttaccactggtccctccggcatatcccatgatccactgtttctacgagacctctcacttacagccgatgagtcatacttcaagaacatttaaccaagttgaagcaaattatctttttttttttgtctcctttttttccatgtgtccaaggcatgaaccaggc

SEQ ID NO: 341121 - DNA, 453 bp, Homo sapiens
aacaacaagaacaacaaagaaccacctcgttgtattcttaaataagtttaaatcctgaagcgccagttggcgttattgatgttttaggagtgcaggaatgggtgaggtcccaggcttgctttagatagtgataattagcactgactgccacgctgtttttaggaggccttaaccaatgtttcccttctttctccttctcaaatggctgcttcctgacctccgcctcctgctccaggatttgcgcaagcaggtagcgccgctgctgaagagtttccaaggagaggtaagcttttctattcattttctatcctgagccacccttcgtggctaattggtctttttattcacattaaagaaatgctccgggcaaaaggtgctgcccagatggtgccttcccggctgctccgacccagcgtcatgcagattttgcgctctgtgatgtgattttccatt

SEQ ID NO: 341122 - DNA, 960 bp, Homo sapiens
agcggtgtgcctcctggcggctcctgaactccagccccctctctatcagccgctcactccgtctcaatatgtctcaagatggcggccaatgtgggatcgatgtttcaatattggaagcgctttgatttacagcagctgcagagagaactcgatgccaccgcaacggtattggcgaaccggcaggatgaaagtgagcagtccagaaagcggcttatcgaacagagccgggagttcaagaagaacactccagaggatttgcgcaagcaggtagcgccgctgctgaagagtttccaaggagagattgatgcactgagtaaaagaagcaaggaagctgaagcagctttcttgaatgtctacaaaagattgattgacgtcccagatcccgtaccagctttggatctcggacagcaactccagctcaaagtgcagcgcctgcacgatattgaaacagagaaccagaaacttagggaaactctggaagaatacaacaaggaatttgctgaagtgaaaaatcaagaggttacgataaaagcacttaaagagaaaatccgagaatatgaacagacactgaagaaccaagccgaaaccatagctcttgagaaggaacagaagttacagaatgactttgcagaaaaggagagaaagctgcaggagacacagatgtccaccacctcaaagctggaggaagctgagcataaggttcagagcctacaaacagccctggaaaaaactcgaacagaattatttgacctgaaaaccaaatacgatgaagaaactactgcaaaactgaaggcgacgagattgaatgttctgacgggcctggaaagggcaaccgagggcgaggtgctcacagagaggggagacctagggaaaggcctcatcgggcaacactcccccgcgtgggtccaggtccaaaggccacagtgggcgccacagggcgaccgctgcacaaaaggaagg

SEQ ID NO: 341123 - DNA, 3625 bp, Homo sapiens
taaaaatacaaaaattagtctggcatggtggtaggcacctgtaattccagctacttgggaggctgagggcaagaatcgcttgaacctgggaggcagaggttgcagtgagctgagatcgtgctactgcactccagtctgggcgacagagcaagactctgtctcaaaaaaaggagaattttatgaaattctttgctcctgggatttgaatgtgttcgtccgtttacatgcagcatcttacccgtccacctgggtgaaatgctttttaagactctgctctaaggtcacaactttactgcctgaagttcccttctccatgtccccagggatttaattacttgttaattacatacctgtttccctcctagaccctgagcttctgggggtaggaactgtctcttcccacccacctctgatccccagcagtgtctagcacatggccagctcttaagtcagcatttggagaagacaaaagaccaggaagggcacgccagaccattctctatggaagacccacccagtgttccctgctgtatagtgaatggctccatactcccaaatctctgctcctcccttgtttaccttcatgaacagggtccttttgtgtttgcaggcatttcctctaagaggctgaagcccagttgtcaagcatctcccttgctacgggaattcactagatgtgtaatgctttgtaaattacctctcgacaaatgttgagctctttgttcttcttttctttctttccttccctttcagattgatgcactgagtaaaagaagcaaggaagctgaagcagctttcttgaatgtctacaaaagattgattgacgtcccagatcccgtaccagctttggatctcggacagcaactccagctcaaagtgcagcgcctgcacgatattgaaacagagaaccagaaacttagggaaactctggaagaatacaacaaggaatttgctgaagtgaaaaatcaagaggttacgataaaagcacttaaagagaaaatccgagaatatgaacagacactgaagaaccaagccgaaaccatagctcttgagaaggaacagaagttacagaatgactttgcagaaaaggagagaaagctgcaggagacacagatgtccaccacctcaaagctggaggaagctgagcataaggttcagagcctacaaacagccctggaaaaaactcgaacagaattatttgacctgaaaaccaaatacgatgaagaaactactgcaaaggccgacgagattgaaatgatcatgacggaccttgaaagggcaaaccagagggcagaggtggctcagagagaggcggagaccttaagggaacagctctcatcggccaatcactccctccagctggcctcacagatccagaaggcaccagacgtggagcaggccatagaggtgctgacccgctccagcctagaagttgagttggccgccaaggagcgggagatcgcacagctggtggaggacgtgcagagactccaggccagcctcaccaagctgcgggagaattcggccagccagatctcacagcttgagcagcagctgagcgccaaaaacagcacactcaaacaactggaagaaaaactcaaaggccaggctgactatgaagaggtgaagaaagagctgaacattctgaagtccatggagtttgcaccgtccgagggcgctgggacacaggatgcggccaagcccctggaggtgctgttgctggagaagaaccgctcgctgcagtccgagaacgccgcgctgcgcatctccaacagcgacctgagcggacgctgtgcggagctgcaagtccgtatcactgaggctgtggccacagccactgagcagagagagctgatcgcccgcctggagcaggacctgagcatcattcagtccatccagcggcccgatgccgagggtgccgctgagcaccgcctggagaagatcccagagcccatcaaagaggccactgccctattctacggacctgcagcaccagccagcggtgccctcccagagggccaggtggattcactgctttccatcatctccagccagagggagcgcttccgtgcccggaaccaggagcttgaggccgagaaccgcctggcccagcacaccctccaggccctgcagagtgagctggacagcctgcgcgccgacaacatcaagctctttgagaagatcaagttcctgcagagctaccctggccggggcagcggcagtgatgacacggagctgcggtactcgtcccagtacgaggagcgcctggaccccttctcctccttcagcaagcgggagcggcagaggaagtacctgagcttgagtccctgggacaaggccaccctcagcatggggcgtctggttctctccaacaagatggcgcgcaccatcggcttcttctacacactgttcctgcactgcctggtcttcctggtgctctacaagctggcatggagcgagagcatggagagggactgtgccaccttctgcgccaagaagttcgctgaccacctgcacaagttccacgagaatgacaacggggctgcggctggtgacttgtggcagtgataccccggggcctcccccgtgacagtgacggctgcgcctccaccccgactgctcagtgcatctaatcacttagactcccctgaagaatcccccatggaaactgcccttatccgctgtccagcagctgccagaggccccaggtcacctcgggtccccttgaaagaatgtctcggtcacatcaggcccgctaggtccagagagcgagcccccaatgcccggccaggctaagccgcagagaccctctcagcccccacctcaggttagggctctgcccgcagcctgacctctagccctggtggcagaggtccctcagctgcgaggctaattgggtgaccaccgattccagctgcggttaatccagcttgggcctgtctgcactgcgatcctcttgggctctcctaggatccccccatgccccgtaagaggtggaagacgcttccttccaggacagcaggctttgagtccagcacccccagcctgcctttgccaccagccccaccctgcagagtatatgaggcttgacagagtctgccccctcccccactgcaccccaagagagagagccccagccagcggaacagtttctattaccccctccctgcccccagacccatgtgatttctgctttcttctttagcaagatattctggtttctagataaggaagagtctctaatgagcccccgagccccagtctcttcagactcatggattggtctgaggggtctgaacgtctcctagccaatcagaactggctgtggaccaccctagcacggccacctctcagggccactggcaggccttcctgagttagatttgtagttgcatatttagctttgcacatttgaaataaaccacggtttggcatgcgccaaagaaaaaaatcaaacaacacactataatataaaagcactatcatagaaacatagacgaaaaaaacaacaaaccaaggcggaggcgcctccgcctacataatctatcccccacgcaagggggcgcccctacactgtgccgcgtctctcccccgcctttcttactttctctccagtggtggccct

SEQ ID NO: 341124 - DNA, 6716 bp, Homo sapiens
  misc_feature (2)..(5): n is a, c, g, or t
  misc_feature (56)..(57): n is a, c, g, or t
  misc_feature (2573)..(2574): n is a, c, g, or t
gnnnnccgcggcgccgggacagccccgggactctgccaggtggatgttgtgcgtanncggagccaggttgaagagagaactcgatgccaccgcaacggtattggcgaaccggcaggatgaaagtgagcagtccagaaagcggcttatcgaacagagccgggagttcaagaagaacactccagaggatttgcgcaagcaggtagcgccgctgctgaagagtttccaaggagagattgatgcactgagtaaaagaagcaaggaagctgaagcagctttcttgaatgtctacaaaagattgattgacgtcccagatcccgtaccagctttggatctcggacagcaactccagctcaaagtgcagcgcctgcacgatattgaaacagagaaccagaaacttagggaaactctggaagaatacaacaaggaatttgctgaagtgaaaaatcaagaggttacgataaaagcacttaaagagaaaatccgagaatatgaacagacactgaagaaccaagccgaaaccatagctcttgagaaggaacagaagttacagaatgactttgcagaaaaggagagaaagctgcaggagacacagatgtccaccacctcaaagctggaggaagctgagcataaggttcagagcctacaaacagccctggaaaaaactcgaacagaattatttgacctgaaaaccaaatacgatgaagaaactactgcaaaggccgacgagattgaaatgatcatgacggaccttgaaagggcaaaccagagggcagaggtggctcagagagaggcggagaccttaagggaacagctctcatcggccaatcactccctccagctggcctcacagatccagaaggcaccagacgtggagcaggccatagaggtgctgacccgctccagcctagaagttgagttggccgccaaggagcgggagatcgcacagctggtggaggacgtgcagagactccaggccagcctcaccaagctgcgggagaattcggccagccagatctcacagcttgagcagcagctgagcgccaaaaacagcacactcaaacaactggaagaaaaactcaaaggccaggctgactatgaagaggtgaagaaagagctgaacattctgaagtccatggagtttgcaccgtccgagggcgctgggacacaggatgcggccaagcccctggaggtgctgttgctggagaagaaccgctcgctgcagtccgagaacgccgcgctgcgcatctccaacagcgacctgagcgggtcagccaggaggaaagggaaagaccagcctgaaagtcggcgcccgggatctttgccggccccccctccttctcagttgccccgcaacccgggggagcaggcttccaatactaatggtacacaccagttctcaccagcggggttaagtcaagactttttcagctcatccctggcaagccccagcctacccctggcttctacaggaaaatttgcactaaactctcttctccagcggcagctaatgcagtccttctactccaaggctatgcaggaagccggaagcacaagcatgattttttcaacaggtccatacagcacaaactccatatcttcccaaagtccattacaacaaagcccagatgtcaatggcatggccccatcccccagccagtcagaaagtgctgggagcgtctccgagggcgaggagatggacactgcagaaatcgcccggcaggtcaaagagcagctgattaagcacaatatcggacaacgtattttcggacattatgtgttgggactgtctcaagggtccgtgagcgagattctggcccggcccaagccatggaataaactgactgttcgtggcaaggagccatttcacaagatgaaacagttcctctccgatgagcagaacatcctggccctccgtagcatccaaggcagacaaagagagaatccaggccagagcctgaacagactatttcaggaagtaccgaaacgaagaaatgggtctgaaggtaacatcaccacccggatccgagcctcggagactggctctgatgaagccatcaagtccatcctagagcaagccaagagggagctccaagtgcagaaaactgcagagccggcccagccttcctccgcatccggcagcgggaactctgatgacgccatccgctccatcctgcagcaagcccgccgggagatggaggcccagcaggctgccctcgaccctgccttaaagcaggcaccactgtcccagagtgacatcaccatcctcacccccaagcttctgtccacctcgcccatgcccaccgtgtccagctacccacctctcgccatctccctgaagaagccctccgcagctcctgaggccggtgcctctgctctgccgaaccccccggccctcaaaaaggaggcccaggacgcccccgggctggacccccagggagcagccgattgtgcacaaggggtcctgagacaggtgaaaaatgaggtgggccgcagcggtgcctggaaggaccactggtggagcgcggtgcagccggagagaagaaatgccgcctcctccgaggaggccaaggccnnagaaacgggcggcgggaaagagaagggcagcggtggcagcggaggtggcagccagcctcgggccgagcgcagtcagctccagggaccctcgtcgtcagagtactggaaggagtggcccagcgctgagtccccatactcccagagctcagagctgagtctgaccggggccagccgcagcgagacaccacagaacagccccctgccatcctccccgatcgtgcccatgtccaagcccaccaagccctcggtccccccgctgacccccgagcagtacgaggtctacatgtaccaggaggtggacaccatcgagctcacccggcaggttaaggaaaagctggccaagaacggcatctgccagagaatcttcggggagaaggtgctgggcctgtcccagggcagcgtcagcgacatgctgtcccgaccgaagccatggagcaagctgacgcagaaaggccgagaacccttcatccggatgcagctctggctgaacggcgagctaggccagggtgttctacccgtccagggccagcagcaagggccagtcctccactccgtgacatcgctccaggacccgctgcagcagggctgtgtgagctcagaaagcactccaaagacctccgccagctgcagccctgcccctgagtccccgatgagttccagtgagtcggtgaagagcctgaccgagctggtccagcagccctgtccccccatcgaggcgagcaaggacagcaagccaccagagcccagtgacccgccagcatccgactcccagcccacaaccccgctgcctctctccggacactcggccctcagcatccaagaattagtagccatgtccccggagctggacacctacggcataaccaagcgggtgaaggaggtgctgacggacaacaacctcggccagcgcttatttggggagaccatcttagggctcacccaaggctctgtctctgacctccttgcccgccccaaaccctggcataagctcagtctgaaaggacgagagcccttcgtccggatgcagctgtggctgaacgaccccaacaatgtggagaagctgatggacatgaaacggatggagaagaaagcctacatgaagcggcggcacagctcagtcagtgacagccagccctgcgaaccgccctctgtcggcaccgagtacagccagggcgccagcccccagccccagcaccagctgaagaaaccccgggtggtgctggctccggaggagaaggaggcgctgaaacgagcgtatcagcaaaagccatacccgtcaccaaaaaccatcgaagacctcgccacccagctcaacctgaaaaccagcaccgtcatcaactggttccacaactacaggtctcggatccgcagagaactgttcattgaggaaattcaggccgggagtcagggccaggcgggcgccagcgactcaccctcggcccgcagcggccgggcggcgcccagctcggagggcgacagctgcgacggcgtggaggccactgagggcccaggcagcgccgacaccgaggagcccaagtctcagggagaggccgagcgggaggaggtgccgcggccggcggagcagacggagccgccgccctcggggaccccgggcccggacgacgcccgcgacgacgaccacgagggaggccccgtggaaggcccggggcccctgcccagccccgcctccgcgaccgccaccgccgcgcccgcggcccccgaggacgccgctacctcagccgccgccgcgccgggggagggccccgcggccccgagctccgcgccaccgcccagcaacagcagcagcagcagcgccccccgcaggcccagctcgctgcagagccttttcggcctccccgaggccgcgggcgcccgggactcgcgcgacaaccccctgcgcaagaagaaggccgcgaacttgaacagcatcatccaccgcctggagaaggccgccagccgggaggaacctatcgaatgggagttctgaggggctgcggccctggggcgggcagccaggctgggccgcaagggcctggacggggtcggacggggcaggcgctgcggacaccgtggcctgggcttggcccgcggcctgcaccgaccccgggccggacctgagcccgcagcccagaccccctccacggtccgcggcctgcaccgacccgaggcccagatccaaggccgcggcccagacccactctgcggcccgggccgaccctgcggcctccaccaaccccgcggcccagacccagcccgcggcctggacccctggaccgctttgcgcacttaccgccctgcgggccacagggcaaaatcgccataggccaaggtgcatatagaaaacaaaggagcattaagcccaatctatgtcgtgttttcaaggaagaaaacggaaatgtgtggtcgagcttttttgtaccctgaagtgttttttttattgccctaagtgatttccacaggttctggaataactcttacagctttgccttgtgtcctcttgttccgtgtgggctttaaaagaaaaaaaatcaaacccacatattaaaagggggctttttatctgccatctaatggcttcagagcgataatacactattatcttcttaaaccaggaaaaaataaaagggggggtgggatttttcagaaaaattaaaaaagaaagtttttgtagctgttcagttgccactaagagattgcacagtcaaaacgactctaaacacactagtttggattcctaaatattttcaagaaaagaatcttctcgtttgaaactttgaattaaaataaaacacatttactccacatattttttaacaaaaagaaaacgtcacatcaggaaactctgattttgtggtagctgacatagtgttttcttgtacgtgaatagaatcctgacatgtagtgcacattgatgtatagctttaactgaccctgggttttgcagaccagggtttgtttaatacactccattctaggccaaatcaggacaaaaaaaagaaaaaaaaagaaaaaaaaaaaagaaaagatccgaatctaggtattttataatctgctttttaacctctaaccgcagagcacgctgatcagacctcatatcttggaggtttaggagacaagttagaactgtagcatgtacctgttaattttgtttaatttatggtgtctcaatctgtctgtgcgtctgcacgtgtgcaagcattgaaagaaaggagagagtagtccgggcgagcacagcaggcagttccagggccagacgggcccatccccaagtagatagcagtctacggatctctctctggcacagaaggcacctcacctcacaccactctcctggatacctgatgaactgagccctcccaggggaagacactccccaggcctgggcagggcttacacgcgcactctctctcttctttccctttttcttcccaccgcaagcactgatgaccctgttgaactcgtgggaaacttcctttctctgcaggagagagaacgtggcattctgggctccccactcccatccctgtagaaatggcccaaactcacaccaaaacgtggatgctcttcaacttccaaacctaccatttgcccttctttcatttcgcctcttagttctttttatgcacagttttagggcagtctaagtacaaactgaaagtctaacttgtctctgattcctcccttgtctatgtgtatatgcgtgagaatagaggcgggtgagagtgtgcgtgcgtgtgcgtgtgtgcaattttatacgtctgtgtattttcttaagtacctgtgcacacgtagagtgcattactgccacctttttcaataagctgttttatcagttacggcttctacaagtttgctaatttagacttctttattgccatatctttaaactaacaatagatgatttcggtatatatatatatttttttttgcttatttataggtgctgtattttattatctgattgttaggaagggatgaaaggggcaaatattctttagagggatagactgccggcagtattgggtataatttacaagatgtagttgtcatactgtatattactgattgaaaactttttgaccgtattgtgtatcattgaaacctttgtcttaggtcaacatctttggatgacattttaatgg

SEQ ID NO: 341125 - DNA, 3123 bp, Homo sapiens
agcggtgtgcctcctggcggctcctgaactccagccccctctctatcagccgctcactccgtctcaatatgtctcaagatggcggccaatgtgggatcgatgtttcaatattggaagcgctttgatttacagcagctgcagagagaactcgatgccaccgcaacggtattggcgaaccggcaggatgaaagtgagcagtccagaaagcggcttatcgaacagagccgggagttcaagaagaacactccagaggatttgcgcaagcaggtagcgccgctgctgaagagtttccaaggagagattgatgcactgagtaaaagaagcaaggaagctgaagcagctttcttgaatgtctacaaaagattgattgacgtcccagatcccgtaccagctttggatctcggacagcaactccagctcaaagtgcagcgcctgcacgatattgaaacagagaaccagaaacttagggaaactctggaagaatacaacaaggaatttgctgaagtgaaaaatcaagaggttacgataaaagcacttaaagagaaaatccgagaatatgaacagacactgaagaaccaagccgaaaccatagctcttgagaaggaacagaagttacagaatgactttgcagaaaaggagagaaagctgcaggagacacagatgtccaccacctcaaagctggaggaagctgagcataaggttcagagcctacaaacagccctggaaaaaactcgaacagaattatttgacctgaaaaccaaatacgatgaagaaactactgcaaaagggcagaggtggctcagagagaggcggagaccttaagggaacagctctcatcggccaatcactccctccagctggcctcacagatccagaaggcaccagacgtggagcaggccatagaggtgctgacccgctccagcctagaagttgagttggccgccaaggagcgggagatcgcacagctggtggaggacgtgcagagactccaggccagcctcaccaagctgcgggagaattcggccagccagatctcacagcttgagcagcagctgagcgccaaaaacagcacactcaaacaactggaagaaaaactcaaaggccaggctgactatgaagaggtgaagaaagagctgaacattctgaagtccatggagtttgcaccgtccgagggcgctgggacacaggatgcggccaagcccctggaggtgctgttgctggagaagaaccgctcgctgcagtccgagaacgccgcgctgcgcatctccaacagcgacctgagcggacgctgtgcggagctgcaagtccgtatcactgaggctgtggccacagccactgagcagagagagctgatcgcccgcctggagcaggacctgagcatcattcagtccatccagcggcccgatgccgagggtgccgctgagcaccgcctggagaagatcccagagcccatcaaagaggccactgccctattctacggacctgcagcaccagccagcggtgccctcccagagggccaggtggattcactgctttccatcatctccagccagagggagcgcttccgtgcccggaaccaggagcttgaggccgagaaccgcctggcccagcacaccctccaggccctgcagagtgagctggacagcctgcgcgccgacaacatcaagctctttgagaagatcaagttcctgcagagctaccctggccggggcagcggcagtgatgacacggagctgcggtactcgtcccagtacgaggagcgcctggaccccttctcctccttcagcaagcgggagcggcagaggaagtacctgagcttgagtccctgggacaaggccaccctcagcatggggcgtctggttctctccaacaagatggcgcgcaccatcggcttcttctacacactgttcctgcactgcctggtcttcctggtgctctacaagctggcatggagcgagagcatggagagggactgtgccaccttctgcgccaagaagttcgctgaccacctgcacaagttccacgagaatgacaacggggctgcggctggtgacttgtggcagtgataccccggggcctcccccgtgacagtgacggctgcgcctccaccccgactgctcagtgcatctaatcacttagactcccctgaagaatcccccatggaaactgcccttatccgctgtccagcagctgccagaggccccaggtcacctcgggtccccttgaaagaatgtctcggtcacatcaggcccgctaggtccagagagcgagcccccaatgcccggccaggctaagccgcagagaccctctcagcccccacctcaggttagggctctgcccgcagcctgacctctagccctggtggcagaggtccctcagctgcgaggctaattgggtgaccaccgattccagctgcggttaatccagcttgggcctgtctgcactgcgatcctcttgggctctcctaggatccccccatgccccgtaagaggtggaagacgcttccttccaggacagcaggctttgagtccagcacccccagcctgcctttgccaccagccccaccctgcagagtatatgaggcttgacagagtctgccccctcccccactgcaccccaagagagagagccccagccagcggaacagtttctattaccccctccctgcccccagacccatgtgatttctgctttcttctttagcaagatattctggtttctagataaggaagagtctctaatgagcccccgagccccagtctcttcagactcatggattggtctgaggggtctgaacgtctcctagccaatcagaactggctgtggaccaccctagcacggccacctctcagggccactggcaggccttcctgagttagatttgtagttgcatatttagctttgcacatttgaaataaaccacggtttggcatgcgccaaagaaaaaaatcaaacaacacactataatataaaagcactatcatagaaacatagacgaaaaaaacaacaaaccaaggcggaggcgcctccgcctacataatctatcccccacgcaagggggcgcccctacactgtgccgcgtctctcccccgcctttcttactttctctccagtggtggccct

SEQ ID NO: 341126 - DNA, 6423 bp, Homo sapiens
  misc_feature (2335)..(2336): n is a, c, g, or t
agcggtgtgcctcctggcggctcctgaactccagccccctctctatcagccgctcactccgtctcaatatgtctcaagatggcggccaatgtgggatcgatgtttcaatattggaagcgctttgatttacagcagctgcagagagaactcgatgccaccgcaacggtattggcgaaccggcaggatgaaagtgagcagtccagaaagcggcttatcgaacagagccgggagttcaagaagaacactccagaggatttgcgcaagcaggtagcgccgctgctgaagagtttccaaggagagattgatgcactgagtaaaagaagcaaggaagctgaagcagctttcttgaatgtctacaaaagattgattgacgtcccagatcccgtaccagctttggatctcggacagcaactccagctcaaagtgcagcgcctgcacgatattgaaacagagaaccagaaacttagggaaactctggaagaatacaacaaggaatttgctgaagtgaaaaatcaagaggttacgataaaagcacttaaagagaaaatccgagaatatgaacagacactgaagaaccaagccgaaaccatagctcttgagaaggaacagaagttacagaatgactttgcagaaaaggagagaaagctgcaggagacacagatgtccaccacctcaaagctggaggaagctgagcataaggttcagagcctacaaacagccctggaaaaaactcgaacagaattatttgacctgaaaaccaaatacgatgaagaaactactgcaaaggccgacgagattgaaatgatcatgacggaccttgaaagggcaaaccagagggcagaggtggctcagagagaggcggagaccttaagggaacagctctcatcggccaatcactccctccagctggcctcacagatccagaaggcaccagacgtggagcaggccatagaggtgctgacccgctccagcctagaagttgagttggccgccaaggagcgggagatcgcacagctggtggaggacgtgcagagactccaggccagcctcaccaagctgcgggagaattcggccagccagatctcacagcttgagcagcagctgagcgccaaaaacagcacactcaaacaactggaagaaaaactcaaaggccaggctgactatgaagaggtgaagaaagagctgaacattctgaagtccatggagtttgcaccgtccgagggcgctgggacacaggatgcggccaagcccctggaggtgctgttgctggagaagaaccgctcgctgcagtccgagaacgccgcgctgcgcatctccaacagcgacctgagcggtccatacagcacaaactccatatcttcccaaagtccattacaacaaagcccagatgtcaatggcatggccccatcccccagccagtcagaaagtgctgggagcgtctccgagggcgaggagatggacactgcagaaatcgcccggcaggtcaaagagcagctgattaagcacaatatcggacaacgtattttcggacattatgtgttgggactgtctcaagggtccgtgagcgagattctggcccggcccaagccatggaataaactgactgttcgtggcaaggagccatttcacaagatgaaacagttcctctccgatgagcagaacatcctggccctccgtagcatccaaggcagacaaagagagaatccaggccagagcctgaacagactatttcaggaagtaccgaaacgaagaaatgggtctgaaggtaacatcaccacccggatccgagcctcggagactggctctgatgaagccatcaagtccatcctagagcaagccaagagggagctccaagtgcagaaaactgcagagccggcccagccttcctccgcatccggcagcgggaactctgatgacgccatccgctccatcctgcagcaagcccgccgggagatggaggcccagcaggctgccctcgaccctgccttaaagcaggcaccactgtcccagagtgacatcaccatcctcacccccaagcttctgtccacctcgcccatgcccaccgtgtccagctacccacctctcgccatctccctgaagaagccctccgcagctcctgaggccggtgcctctgctctgccgaaccccccggccctcaaaaaggaggcccaggacgcccccgggctggacccccagggagcagccgattgtgcacaaggggtcctgagacaggtgaaaaatgaggtgggccgcagcggtgcctggaaggaccactggtggagcgcggtgcagccggagagaagaaatgccgcctcctccgaggaggccaaggccnnagaaacgggcggcgggaaagagaagggcagcggtggcagcggaggtggcagccagcctcgggccgagcgcagtcagctccagggaccctcgtcgtcagagtactggaaggagtggcccagcgctgagtccccatactcccagagctcagagctgagtctgaccggggccagccgcagcgagacaccacagaacagccccctgccatcctccccgatcgtgcccatgtccaagcccaccaagccctcggtccccccgctgacccccgagcagtacgaggtctacatgtaccaggaggtggacaccatcgagctcacccggcaggttaaggaaaagctggccaagaacggcatctgccagagaatcttcggggagaaggtgctgggcctgtcccagggcagcgtcagcgacatgctgtcccgaccgaagccatggagcaagctgacgcagaaaggccgagaacccttcatccggatgcagctctggctgaacggcgagctaggccagggtgttctacccgtccagggccagcagcaagggccagtcctccactccgtgacatcgctccaggacccgctgcagcagggctgtgtgagctcagaaagcactccaaagacctccgccagctgcagccctgcccctgagtccccgatgagttccagtgagtcggtgaagagcctgaccgagctggtccagcagccctgtccccccatcgaggcgagcaaggacagcaagccaccagagcccagtgacccgccagcatccgactcccagcccacaaccccgctgcctctctccggacactcggccctcagcatccaagaattagtagccatgtccccggagctggacacctacggcataaccaagcgggtgaaggaggtgctgacggacaacaacctcggccagcgcttatttggggagaccatcttagggctcacccaaggctctgtctctgacctccttgcccgccccaaaccctggcataagctcagtctgaaaggacgagagcccttcgtccggatgcagctgtggctgaacgaccccaacaatgtggagaagctgatggacatgaaacggatggagaagaaagcctacatgaagcggcggcacagctcagtcagtgacagccagccctgcgaaccgccctctgtcggcaccgagtacagccagggcgccagcccccagccccagcaccagctgaagaaaccccgggtggtgctggctccggaggagaaggaggcgctgaaacgagcgtatcagcaaaagccatacccgtcaccaaaaaccatcgaagacctcgccacccagctcaacctgaaaaccagcaccgtcatcaactggttccacaactacaggtctcggatccgcagagaactgttcattgaggaaattcaggccgggagtcagggccaggcgggcgccagcgactcaccctcggcccgcagcggccgggcggcgcccagctcggagggcgacagctgcgacggcgtggaggccactgagggcccaggcagcgccgacaccgaggagcccaagtctcagggagaggccgagcgggaggaggtgccgcggccggcggagcagacggagccgccgccctcggggaccccgggcccggacgacgcccgcgacgacgaccacgagggaggccccgtggaaggcccggggcccctgcccagccccgcctccgcgaccgccaccgccgcgcccgcggcccccgaggacgccgctacctcagccgccgccgcgccgggggagggccccgcggccccgagctccgcgccaccgcccagcaacagcagcagcagcagcgccccccgcaggcccagctcgctgcagagccttttcggcctccccgaggccgcgggcgcccgggactcgcgcgacaaccccctgcgcaagaagaaggccgcgaacttgaacagcatcatccaccgcctggagaaggccgccagccgggaggaacctatcgaatgggagttctgaggggctgcggccctggggcgggcagccaggctgggccgcaagggcctggacggggtcggacggggcaggcgctgcggacaccgtggcctgggcttggcccgcggcctgcaccgaccccgggccggacctgagcccgcagcccagaccccctccacggtccgcggcctgcaccgacccgaggcccagatccaaggccgcggccagacccagcccgcggcctggacccctggaccgctttgcgcacttaccgccctgcgggccacagggcaaaatcgccataggccaaggtgcatatagaaaacaaaggagcattaagcccaatctatgtcgtgttttcaaggaagaaaacggaaatgtgtggtcgagcttttttgtaccctgaagtgttttttttattgccctaagtgatttccacaggttctggaataactcttacagctttgccttgtgtcctcttgttccgtgtgggctttaaaagaaaaaaaatcaaacccacatattaaaagggggctttttatctgccatctaatggcttcagagcgataatacactattatcttcttaaaccaggaaaaaataaaagggggggtgggatttttcagaaaaattaaaaaagaaagtttttgtagctgttcagttgccactaagagattgcacagtcaaaacgactctaaacacactagtttggattcctaaatattttcaagaaaagaatcttctcgtttgaaactttgaattaaaataaaacacatttactccacatattttttaacaaaaagaaaacgtcacatcaggaaactctgattttgtggtagctgacatagtgttttcttgtacgtgaatagaatcctgacatgtagtgcacattgatgtatagctttaactgaccctgggttttgcagaccagggtttgtttaatacactccattctaggccaaatcaggacaaaaaaaagaaaaaaaaagaaaaaaaaaaaagaaaagatccgaatctaggtattttataatctgctttttaacctctaaccgcagagcacgctgatcagacctcatatcttggaggtttaggagacaagttagaactgtagcatgtacctgttaattttgtttaatttatggtgtctcaatctgtctgtgcgtctgcacgtgtgcaagcattgaaagaaaggagagagtagtccgggcgagcacagcaggcagttccagggccagacgggcccatccccaagtagatagcagtctacggatctctctctggcacagaaggcacctcacctcacaccactctcctggatacctgatgaactgagccctcccaggggaagacactccccaggcctgggcagggcttacacgcgcactctctctcttctttccctttttcttcccaccgcaagcactgatgaccctgttgaactcgtgggaaacttcctttctctgcaggagagagaacgtggcattctgggctccccactcccatccctgtagaaatggcccaaactcacaccaaaacgtggatgctcttcaacttccaaacctaccatttgcccttctttcatttcgcctcttagttctttttatgcacagttttagggcagtctaagtacaaactgaaagtctaacttgtctctgattcctcccttgtctatgtgtatatgcgtgagaatagaggcgggtgagagtgtgcgtgcgtgtgcgtgtgtgcaattttatacgtctgtgtattttcttaagtacctgtgcacacgtagagtgcattactgccacctttttcaataagctgttttatcagttacggcttctacaagtttgctaatttagacttctttattgccatatctttaaactaacaatagatgatttcggtatatatatatatttttttttgcttatttataggtgctgtattttattatctgattgttaggaagggatgaaaggggcaaatattctttagagggatagactgccggcagtattgggtataatttacaagatgtagttgtcatactgtatattactgattgaaaactttttgaccgtattgtgtatcattgaaacctttgtcttaggtcaacatctttggatgacattttaatgg

SEQ ID NO: 341127 - DNA, 1779 bp, Homo sapiens
atgctgaaagggaatattccgtgcccattgtgcggaggcacctcctcatcgcttcctgtcacctgcagggtgccgctgagcaccgcctggagaagatcccagagcccatcaaagaggccactgccctattctacggacctgcagcaccagccagcggtgccctcccagagggccaggtggattcactgctttccatcatctccagccagagggagcgcttccgtgcccggaaccaggagcttgaggccgagaaccgcctggcccagcacaccctccaggccctgcagagtgagctggacagcctgcgcgccgacaacatcaagctctttgagaagatcaagttcctgcagagctaccctggccggggcagcggcagtgatgacacggagctgcggtactcgtcccagtacgaggagcgcctggaccccttctcctccttcagcaagcgggagcggcagaggaagtacctgagcttgagtccctgggacaaggccaccctcagcatggggcgtctggttctctccaacaagatggcgcgcaccatcggcttcttctacacactgttcctgcactgcctggtcttcctggtgctctacaagctggcatggagcgagagcatggagagggactgtgccaccttctgcgccaagaagttcgctgaccacctgcacaagttccacgagaatgacaacggggctgcggctggtgacttgtggcagtgataccccggggcctcccccgtgacagtgacggctgcgcctccaccccgactgctcagtgcatctaatcacttagactcccctgaagaatcccccatggaaactgcccttatccgctgtccagcagctgccagaggccccaggtcacctcgggtccccttgaaagaatgtctcggtcacatcaggcccgctaggtccagagagcgagcccccaatgcccggccaggctaagccgcagagaccctctcagcccccacctcaggttagggctctgcccgcagcctgacctctagccctggtggcagaggtccctcagctgcgaggctaattgggtgaccaccgattccagctgcggttaatccagcttgggcctgtctgcactgcgatcctcttgggctctcctaggatccccccatgccccgtaagaggtggaagacgcttccttccaggacagcaggctttgagtccagcacccccagcctgcctttgccaccagccccaccctgcagagtatatgaggcttgacagagtctgccccctcccccactgcaccccaagagagagagccccagccagcggaacagtttctattaccccctccctgcccccagacccatgtgatttctgctttcttctttagcaagatattctggtttctagataaggaagagtctctaatgagcccccgagccccagtctcttcagactcatggattggtctgaggggtctgaacgtctcctagccaatcagaactggctgtggaccaccctagcacggccacctctcagggccactggcaggccttcctgagttagatttgtagttgcatatttagctttgcacatttgaaataaaccacggtttggcatgcgccaaagaaaaaaatcaaacaacacactataatataaaagcactatcatagaaacatagacgaaaaaaacaacaaaccaaggcggaggcgcctccgcctacataatctatcccccacgcaagggggcgcccctacactgtgccgcgtctctcccccgcctttcttactttctctccagtggtggccct

SEQ ID NO: 341128 - DNA, 1438 bp, Homo sapiens
ttaggctaggtagcgaggctgggtggcagcggcagtgatgacacggagctgcggtactcgtcccagtacgaggagcgcctggaccccttctcctccttcagcaagcgggagcggcagaggaagtacctgagcttgagtccctgggacaaggccaccctcagcatggggcgtctggttctctccaacaagatggcgcgcaccatcggcttcttctacacactgttcctgcactgcctggtcttcctggtgctctacaagctggcatggagcgagagcatggagagggactgtgccaccttctgcgccaagaagttcgctgaccacctgcacaagttccacgagaatgacaacggggctgcggctggtgacttgtggcagtgataccccggggcctcccccgtgacagtgacggctgcgcctccaccccgactgctcagtgcatctaatcacttagactcccctgaagaatcccccatggaaactgcccttatccgctgtccagcagctgccagaggccccaggtcacctcgggtccccttgaaagaatgtctcggtcacatcaggcccgctaggtccagagagcgagcccccaatgcccggccaggctaagccgcagagaccctctcagcccccacctcaggttagggctctgcccgcagcctgacctctagccctggtggcagaggtccctcagctgcgaggctaattgggtgaccaccgattccagctgcggttaatccagcttgggcctgtctgcactgcgatcctcttgggctctcctaggatccccccatgccccgtaagaggtggaagacgcttccttccaggacagcaggctttgagtccagcacccccagcctgcctttgccaccagccccaccctgcagagtatatgaggcttgacagagtctgccccctcccccactgcaccccaagagagagagccccagccagcggaacagtttctattaccccctccctgcccccagacccatgtgatttctgctttcttctttagcaagatattctggtttctagataaggaagagtctctaatgagcccccgagccccagtctcttcagactcatggattggtctgaggggtctgaacgtctcctagccaatcagaactggctgtggaccaccctagcacggccacctctcagggccactggcaggccttcctgagttagatttgtagttgcatatttagctttgcacatttgaaataaaccacggtttggcatgcgccaaagaaaaaaatcaaacaacacactataatataaaagcactatcatagaaacatagacgaaaaaaacaacaaaccaaggcggaggcgcctccgcctacataatctatcccccacgcaagggggcgcccctacactgtgccgcgtctctcccccgcctttcttactttctctccagtggtggccct

SEQ ID NO: 341129 - DNA, 594 bp, Homo sapiens
agaagtgatcatcacatataaggaatcctcaataagattatctgcagatttctcatcagaaacttcagaggccagaaagcagtaggctgatataaagtgctaaaagaaagaaactatcaactaagaatcctatatccagcaaatcttcacttcaaaagctggaggattcacacttctttgtttcaaaacttaccacaaagttacagcgatcaaaacagtgtggtactggcacaaagacagacatatagaccaatggaatagaacacagtccagaaaaaaaccctcttagcacaagggtgctaagattatccaatggggaaaagatgatctttttgacaaatggtgctgggaaaattgccacatacaaaagaatacagttggacccttacctgataccatttacattaaattaatgcagactagatccataacctaatgtaagaactaaaactataaaactcataggagaaagcatagggcaaaagttcacaacattagaatgggcaataatttcttggatataacatcacaagtacaggcaacaacaacaacaaaagaacacaaattggattgtattacaattttaaaattttg

SEQ ID NO: 341130 - DNA, 415 bp, Homo sapiens
ttgtagctttgtggatggagggtgtgggggaggccgtgtgtagtgaaaggaccacccggctgaagacggtcctgggggtggagggcaggagggagcgagaaggacagttctgctcctgggagcctctcgttcctgggcgagggtctggggaccctggatgaagttttaggatcttttacaatgacggtctggggcagagaataaaattttgcagggagcagattgagggtctggaggactgggttaggtgggctctaggtacccaggacgatctcgggaggcgcacaatgagaatctgggggctccaggattacggtgtgggtgcacaggatgaaattctgggggcgcagattaggtaggatctaggtgagcaggatgacatttttggtgagcgttgggacgctcggcgtgtgca

SEQ ID NO: 341131 - DNA, 460 bp, Homo sapiens
ttttttttttgagagacaggtctcaccctgttgccctggctagagtgcagtggcatgatcacagctcactgcaacttccgcctcctgagatcaagcaattcttctaccacagcctcccaagtagctgagactacaggcgcacaccatcacacccatctaattgttgtattttttggtagagatggggtttcactgtgttggtcaggctggtcttgaactcctgacctcaagtgatccacccacctcggtctcccaaagtgctggggttacaggcgtgagccactgcactcgaccagtggtatcatttgttttgccgctcccctaatgctggatgtttccagctttctactattttttaaatgtttcgatgagagttgttctctatgcatgtgcaagtacttgtcagattatttccttataataaattcctagaaggtggattgctacaaacaagaaatgt

SEQ ID NO: 341132 - DNA, 416 bp, Homo sapiens
atctcaacgtgctaattgtagttgtgttagggttataagttatggttgattatttttcttcttctttccaaaattttggcaatgtgattatttcttttaggtgaaaaattatagttatgattttttttttcttaaaagaagaagctgggtgcagtggctcatgcttgtaatcccagccagcactttgagagactgaggccggaggattgctttgagcccaggagttctagactagtctgaacaacaacacagcaagactgcctctttgaaaaagaagaggccatcactttttcccttattattggttaggtttcagccattattcctttttacttgctgaacttttcctaaatcctccctggaaaaatacgagcataaagcatattttagaaaatggaaatttattttggaatgta

SEQ ID NO: 341133 - DNA, 242 bp, Homo sapiens
ctcctggtctgtcttccattttgctttctttcagctatgtcataactattgttaaaactattgaattcttcactttatttacattatttttcagttctagattttctgtttattttttatagatttaaatttacttgcaaaattttccatttatcacttattttattgaatatgttaatcatttattttaaagcatctttctgataaatccaatacatggatcacctggaggttattggcat

SEQ ID NO: 341134 - DNA, 435 bp, Homo sapiens
gaaacacaccaggaagttctacaggcggatcctttaactcttatttagagtctgatggtgtgctgggatccattgcgaggtgggctggtcagctacaggaccttccttccagggatgattgtgtttttgtgaacccccatggccgtaatccagtacgattaccagccacaaatcatcagacttcttctttgctatatgaatatttttattacaaaagtcagataaccaagtaaaaatgctttaaaagattaacagttgggaaaatgggtcagaatcacccacaatctcaaaaatttagtgtaaccactattggaacaatggcttagttccttttggatgttttgcttgtgcatcacctttgtggttttattgttataaattagatgccctcctttattttcccctcttaaaaatatcagaagcagttttctgtaa

SEQ ID NO: 341135 - DNA, 225 bp, Homo sapiens
tgctgggattacaggcgtgagccactgcacctggccagttgaaggattttaatcaggttaaatggacaaccaatttttcttttttaagaaaaatcacttttggctgcagtgtggacaaggcactgaaaagagaggacaaagctgaaggtagagagacatttgaggaagttgggtagtctgagagagatgactatgagatgaactagcttagcggcaggagggttg

SEQ ID NO: 341136 - DNA, 227 bp, Homo sapiens
tggacagcagcagtccaagaatgagagctggtcccagggtcagggggttcctggcagggcctgtgcatcagcaccctgagagtaggcccagaagcagcagctgggcccctgagaggccaaatggcccgagaccgctgccctcaaatctcagggagaaacaggagaccatgctgccaccgatggtgactccctcagggcctggctaaaggggcagggacagaaactca

SEQ ID NO: 341137 - DNA, 237 bp, Homo sapiens
gggctcatttatgtctttatgcacttagatttttttttaactctatgtattataatccagtattcttattctgttactcagattgtcgtagctttggtcattggaagctcctgcagtttgggtcctatgtcctttcatcatgttttcccaatttcttattttcagctaccacaggacactcagggtgcatcttgaattttctttgctccagctctggagtcaggcacttgagggagc

SEQ ID NO: 341138 - DNA, 249 bp, Homo sapiens
ttgcacaaaactattccatttctcttacaagaatagcctatgggtgggcccgtaggctcagaggtccttatctgcagcaagcctaaggttttgtgtgttttagagacaaggtttcacaatgtcatccaggctggagtgcagtggttccatcatagctcactgcaccttcaaactcctgccccgactttccaaagtgttgggattacaactctttttgcatttctctgactctccagcagggggcagcct

SEQ ID NO: 341139 - DNA, 225 bp, Homo sapiens
aattcccgactctgccagagaccaaaaatagcgcttgattcttcccactcatcttattttcactgacccctcaccttcactatcaaacacttaataagcagttaattctagtaacagatatgagatatggttcctattcccaagaagcttaacaccaaacagtagtaacacaaatacctcgacccacctgcttaatacaaagatgactagcaggggaggaggaca

SEQ ID NO: 341140 - DNA, 189 bp, Homo sapiens
tctggtggtcagcgctttctcacctcatgaggctaattctgatttgaagtgagatccttatgaagtatcaaaggaagttgagaccgcctagcatagtcttgagagttggtgacacctgcctcacgtgtgtattttcagttatctgttccccagaatatttggttgaccaagatgtgccattgcctgatc

SEQ ID NO: 341141 - DNA, 281 bp, Homo sapiens
ccttccaagggcatttgttctctccaacccccattccttcttccattctagtttatctcttcaagcttctggccaattctattccatcatgagtccacttactacctattcctctgcctactgtccagtttcttttctatcagctttaagcctactaagcaggggtcaattcatacttaccactctcatcctccaaattcttggcttggctatagcagttcatcagccacctcaccactctgcccctttctcatacacactcccacaggacaccaccacta

SEQ ID NO: 341142 - DNA, 316 bp, Homo sapiens
aaaagattgcatatattttattcttcagatgtaaattttaactctttcctgggcctaaactcatgcaatttttgaggtagagactggagaagtgcctttgtctactttggaattatggtctgtaaattagtgaagtttctggagattatattgtcattagacttgggcttttatgaaatacattgtgttcacgtgtttacgttcacatgtggtaattttttctagtgcatatttgccaggaagtagcaattggagagtcttagaaaattgctcaggttaagttactttgttgaaagcaatgagtttgtacttaagt

SEQ ID NO: 341143 - DNA, 410 bp, Homo sapiens
gaaaatgacatagaggcagggaaaccattaatggctggcttctggacacatctgttatgaagtgtgaagcagagttaactcaggaagttcccaaagaactgaattttggcccatagagagtttatgaaatgaacagagaaacaagatgtctcttcccagtcttaggtatctgtgggcatccattttaatacctggtttcttcagaattagcctgtgacacttttctgtatttctgaaatatttttctaacatgtgcttctctctaaaagacctggtttgtagtaactgtatgtgttttttgtttgtctgtttttgagatggagtctcgctctcgccatgctggagtgcagtggtgcgatcttggctcactgcaacctctgcctcccgggttcaagcgattctcctgcctc

SEQ ID NO: 341144 - DNA, 457 bp, Homo sapiens
cctatctacctgcgtgcatctgtacccatatatcccatattctttccttaacaatggataaatcattatgtttctgccgagggccagactcttctcttgggctgcagtctctctttctgtcctcctctgctcaaaagtctccgatgtctgaccatctcacacgtgaagccagaatgaatcctcccagtggcctccagtccctgcatgacatggcgaccagtcacctccctggcctcatctcccagtgttcactccttcattcaccccattctagctgcctggtctcctggctgccccttaagcactctaggcctgcccttgccttgggaccttggcactttgcaggtcctctgcctcttccctggattctgagtaggttcgctgtgcatctcctttaagtctttggtcaccttcctagcgaggcctttcctatctaacaccacatgcacacatcccc

SEQ ID NO: 341145 - DNA, 368 bp, Homo sapiens
aaaatatagttgtcttcccaatgaaagagaacatatggcttcctataactagcataacatttaataaagagatggactagttcagattccaatacaactaagctatttatttctgtgtcacagtacagttcctaactaactgaaattagttcctgataagaaactaaagctatttttcacaacaggtaagtcgatggcctgcctggagatagacggtgtgatggctgcacagcaatgtgaatgtgcttaatgccacagacttgtacacttaaaaatgattaaaatggtaaattttatgttatgaatgttccaccacaataaaaaaaaatagtggatagcctgaatattaatttctgtgcccatttcaa

SEQ ID NO: 341146 - DNA, 257 bp, Homo sapiens
ttttgcataaaattctaaggtcttcttggatctctgcagttcaccaagggacccaggttaataactcctgttctagaaaacatgactttctgtgtgctgatttctttggattatccccagcacagctccctgtgggaggaagctgttgtcagaagcaagctgggggtagtgatggataatgaaaactgtgtagaggacactggtagcgactcactggtgagaaccctgaagcggcgtgctgggggccatctcatgac

SEQ ID NO: 341147 - DNA, 211 bp, Homo sapiens
tgaacagggaagcaatatgttaagttgcacttaaggtttttaaaagtagtgacaggattatctccaaagaagatacagaagtggcaaagaaaataaaaataaataaatgaaaagaaaaaaataaaatgacaggattaattaggtggagagtcagggagaactttaaggaggatgcttgttgatgattgagggcctgaactaagtgggaatg

SEQ ID NO: 341148 - DNA, 209 bp, Homo sapiens
cagtttggtgcaagtattgatgacattcaaggcttctctgaaacttcctttctggataaggcatatcactttacaatgcaggccagttacatcatctttgtggatctgcagtatcttattgacaggcttgagagcacacaggaagttgctgttctggccgtaccggttcacttcactccacacagcacaggcactgaaactccaccctg

SEQ ID NO: 341149 - DNA, 244 bp, Homo sapiens
aaaaagaaatggcttggttgttcttactatttatttatttattccagaaataaaaatactttttcattttcttatttcttatttatttattcttccaaagaaacttatctgggaaaagagaagtaatagcaagtttgtgtgttgataggaattaacaatgggtgttggaaaacattgatgatacaagaagaaaaagagctgggcaaggcgggtcacatgataatcctagtactttgggaggcta

SEQ ID NO: 341150 - DNA, 238 bp, Homo sapiens
ggattccatacacctggggacacaaaataatcttgctctcttaaagagctccagttctggccaggcacggaggctcatacctgtaatcctagcactttgggaggccaaggcaagcggattgcctaggcaagcggattgcctaagctcagttcaggagttcgagaccagcctgggcaacatggtgaaaccccatctctactaaaatacaaaaaaagttagccaggcatggcagtgtgca

SEQ ID NO: 341151 - DNA, 311 bp, Homo sapiens
cagatcaaggactcaggccggtgttgcttccgatgtcctggaaaagtgttttctgagcctccagcacataatgttttactctctgaaggaggcttattctgattagcttaacagagggtatggaagaaaggaagtctattgattcagctccttggtcacgagacaggaattgcaaggtggagggaagctgtaattccaacacctgtggaacgtgctttgcgtttttgtgctgttgatctgctttcctgagacatgattggaagtcagcagctccagcctgcatgttcccagatcacctgtaagagttctta

SEQ ID NO: 341152 - DNA, 361 bp, Homo sapiens
tatctcatggccccacgttaaaacactaaatgtcaggtgatcaacagctgaaatactaaaatgcaagaacccaataggttttacccaacggcaggaaattagccctttcgcatgaatgaactgtttcagatcaatgaaattgacctctttaagaagcatcaaaataatttttaattcagaacttttcttaatgtgtattcttcatttcccagtatttcttgatagacacagaggcattgtggacactgactactgcactgtcccataagagtcgtgcaagcgaggactttgaaaggaaatggtattcctcagccctggagtaaatgactcgcagaccactggcccccgctgttgctgtgtg

SEQ ID NO: 341153 - DNA, 130 bp, Homo sapiens
gatatgaatgttctatatcctccctaaacctactatgtatttgatttattcattattctagtcttggaagacaattaatcactaagggaacatttttctcatcttttttttttttttttttttttttttt

SEQ ID NO: 341154 - DNA, 87 bp, Homo sapiens
tgctgggattggtgtgagccaccgtgcccggccttctaataaatattatgctcgtacaatattcgagtgctttcttccccgcccccg

SEQ ID NO: 341155 - DNA, 151 bp, Homo sapiens
aatgttcctaaggggagacctccaacaataagacaagttgctttttgagggcataaatctctcatagtcaacagaattgctgaaagaactcttagaaagattttagaattcattctccaattgcacaggagatgtaactagtgactcacta

SEQ ID NO: 341156 - DNA, 278 bp, Homo sapiens
gattgcactccagactgggcaacagggtgagaccctgtctcaaaaaaaatagaaaaagggaaaaacggtaactcaaaccaagggatcaaggttagcttcaccagtaataagagatactgttatcacataccacttacgtgatgcagaaagagcacatccaggccggacacggtggctcacgcctgtaatcccagcactttgggaggccgaggcgggcggatcacgatgtcaggagatcaagaccatcctggccaacgtggtgaaaccctgtctctact

SEQ ID NO: 341157 - DNA, 357 bp, Homo sapiens
tgccatgaaaaggtgtcttctcagagaccctgctcactgtaccaaatctgtttcaccctccactggatggtcaggctgtgtgcagggtaaactataacatgaatgtggccaaggttaaaagtcaaataaatgctgtccagggaaggaccagtgcatgacttgaggtctctgagaacagacaatatgcatatcaagctcaactggtacattgtttacttacagcaagaggagaagagggaatgcataaatccagccccttgcagtgtgtcagtctccatggctaatggattcaccctgcagccaatgtaggcagtgcggctaacaatttgtgaactattttagagtttggaataccaa

SEQ ID NO: 341158 - DNA, 215 bp, Homo sapiens
cacctctggtgcatgcctataaagaaatggtggcagaaggaggaaaaaggacttaccagtgtcacacaaccagtaaggcataaacctaggactcaaactcagatctgcctgccccagaagctaagctttaactactaaaggcaaagaaagaacagaagtgtcactctctaactcaaagttaaaccctactctctacatcttactctccacacccc

SEQ ID NO: 341159 - DNA, 209 bp, Homo sapiens
atatttatccaaacaaaggtcaacttttaaaccacagtagttttctaaaaagtccatcaatgaagaatgtgcttaaataatttaaggtccatttatgtcatggaataatactaagtactaaataatactaaatactaaataatactaaagtgaaaagtcaaattgttttatatatatgtattttatatatatacatatatatatatgta

SEQ ID NO: 341160 - DNA, 545 bp, Homo sapiens
caaggcagtgaggcagaggccagcatcttccaggaaggggcagagacaggaatctcagaactgcacaccactgaaataaggagagacagcaggtggcataatctgaaatgctgtacgcttcaaaaaaactatttcttttaaaggagtaaacagagaaatggtctggaaatggcaataaggaggatcctgactcatatctagacattgcagaaataaatcgccacagttggagaaggctgtagggacagtgatgtcctccaggcttcagttatggcaggatgaagaagaaaatgttttggtttaaaaaggcccaacttctgcacagctctgacctgtgacttgctcaaagacctagagaaatttaccacctatcctattcatgagttttaagatgactttcaacaagtgaggcttttatttatacatacagtgtagccagaaaaggacttaccatgcaaagaaaacacattttaaaagtatttcacaaggaaatctagatttagtcttggcactttctgtacgtattcattttatatccccacttc

SEQ ID NO: 341161 - DNA, 799 bp, Homo sapiens
gcacgaggaaaactacgctctttaattttacaaaatcatggattttcgtggtgatagcaatggatgtgaagaccattaggtgaaaaatggataggaagcttataatgcatggagcagaatgacaggacactaatctatattaacatctctaaatgagatcagccagatgaacttgatgtgatgaaatggatacacacagtggacacctgtgaagttttcttggctcccccaaaactgagaagtacaagttagtctccaaacctaattaccagtttacaggaaacatggggaataaaagaacaaattaacaacacaaagaagcaaacaaccaaatgcacaatttgggaaattctgcagaagtaatggcctagttttttaaccaatacatgtcaaaaaaaaaaaaaaaaaagacaaaaatggaatcctacactttaaaggagactaagaaacgtatccttcaaatacagtgtatggagcattttaggatccttgtgttaaaatgcgcttgggatttgttttaatcaatcatggtgagacaggcagacatggaaattattgtcatgaaggaagaagtttatacgcagatcccacaaacgggaggcatggcatggcatgcagggtcacgtaaagaagcacctgggtgtatcaggaggcagagggtgagagcacagcatggcccagagcttttattgggggttttcatgggaaggaatggacaaggcaggggtaggcacactggtaagcttaggattgaatagtttgagtaattttgttggtctctgggatctaggggggattc

SEQ ID NO: 341162 - DNA, 357 bp, Homo sapiens
catgcagggtcacgtaaagaagcacctgggtgtatcaggaggcagagggtgagagcacagcatggcccagagcttttattgggggttttcatgggaaggaatggacaaggcaggggtaggcacactggtaagcttaggattgaatagtttgagtaattttgttggtctctgggatctaggggggattcgtaattgtctagttagggcaggggaatattgaattggtgtatgagagtttggtaaaggagatagttgggagtatgggctctggattggttggtttgtatatgaaaggcatgcttgcagtggagtttatcatctatgcattagcttgccctgggaggggcagcctatcca

SEQ ID NO: 341163 - DNA, 488 bp, Homo sapiens
tcaaaaaaaaaaaaaaaacacaggagagacaactggtttttgaatgaaatacatgggtactgccttgcttgacatcacatagtccttgatgaaagttcacatttaggtctgcttggtacaatacgcctcctaaaaaggtccttgatgaaagttcacatttaggtctgcttggtacaacacgcctcctgaaagggtctgatagctttcagtagcagtaagacacttgcatgtgatggtaaggtatctgcaaatttgcacacaccgtacacagcttaagtcttagaattaacttgctaaaatgtgagcctttggtaattaggctgttttattagggagtgtgataatatttgaatttcttttcatatttgtgctttgtgtcattttcaaatgacccttgaaatgtattttaaaactagataaaagccagaaagtgatttgattgtctatccagcaaaagatggtggttcattttcttgtcctcttaatac

SEQ ID NO: 341164 - DNA, 365 bp, Homo sapiens
tatagaatatattatttataatattctatataatatataatatgtattatatagattatagaatacatagaatatattatattctatatataatacattatatagaatataatatatattttacatattatatagaatataatatatattatatagaatataatatatattatatagaatataatatatattatatagaatataatatatatacatattttttgagacagagtctcattctgtcacccaggctagagtgcagtggcacgatctcagctcactgtagcctccgcctcaagcgatgctcctgccttagcctcccaggtagctaagattacaggcagataccactacacccagctaag

SEQ ID NO: 341165 - DNA, 482 bp, Homo sapiens
tctgaataccatataacatccttgttggatatgatacagaattcgagctcattccaaagagcaacaaaatgtcattcttctgagagagttattaataacacagcctactcagggtctaattattcagtgtgcagattatacaagctcctttttcctccttctccgtctctatctttttcctagttcccactctccaaccatttcattactattctgcacttctgccagaatatgcacagtgatagacgtgtttgactgtctatgggtctacaactgccctgattgtagaggaaaaaaggagttgctcacacacaaggatgagagggactcacttgccttccacagatgccagagttctcatgcttagaacaccttctgggaggaggacattatttctagagcaccactgagaaaacgcaaagatgcattggtgaatatgttaccaaggcaatggttcgataaaatgcaaaaacagacggtga

SEQ ID NO: 341166 - DNA, 304 bp, Homo sapiens
ctgttcccccaaaacctgttgacaaaaaagtagaaaataaaactttctgattaaaacaacaacaaaagcccagaaatgctattgcttatggtcattaattcttttatcctgcaacctctcttatagtggttgtctgttggctgacagaataaaataataattaatagtttgtctacctgttgtttctgttttctcttccaatatttataccatgttggttgttttcttcctgtttttattgctgtgtaccaaacactccaaaacttaaggcctttaaagaaaaataaaatatttcttacatttc

SEQ ID NO: 341167 - DNA, 293 bp, Homo sapiens
ttcatttaaaaaaaaaaaaagtccaattacttaaatgttaatctcatccaaaacaccctcacagaaatatgcagaaaatcttccatcacatacatacctgggcattatggcccagccaagttgacacacaaattaaccaccacatatggtggaaatagagcttcaaaatgatgttccaaaggcaagcaatattatacttttaaaatctctgggaatataccccttttgtatactattttgaaatccttggaaatacacaatttttttatacttcagtgtagttttaaggagca

SEQ ID NO: 341168 - DNA, 537 bp, Homo sapiens
actctatgctttgctcatcctttccctggcctgagcctcatcctccaggaagaatcaccagctggtggaagccccactctggagccagcccggagcccctgattcactaaatttcctccacagaaagttcctcgggccactctggttgccaggatgcctgcttatcccgtaccctctcaccgtcccctcttcctccataaggggagcaagaccaacaaaaagcaacccaccagtggccgggtgaggcagctcacgctcgtaatcccagagctttaggaagctaaggcgggaggatcacgtgagcccaggggtttgagaccagccccagcaacagagcaagatcttgtttcgtcaaaaaagaagaaaacgtatctgggtgcagtggtgtgcacctgtagtcccagctactcaggaggctgaggtgggagaatggcttgagcccaggagttcgagaccagcctgggcaacatagcaagaccccttctctacaattttgtttttttaattaactgccatctatttgggagtctgaggtag

SEQ ID NO: 341169 - DNA, 186 bp, Homo sapiens
agcatttatcccaggagcaggggcaaaacttccctaaatgtaagcgttttaattggacagttgcactttgatcatattctatgagttgtgggtgttccctataccaggtacgcttactggttaggcttgggggcagattctctgccccccagttactctctctttcttactcgccagcaggaccct

SEQ ID NO: 341170 - DNA, 523 bp, Homo sapiens
cctcaaccatctggaatagtgcccagcacatactggctcaatgaatatttattgggtgctcaatgagtatttattgaattgagctgcgtataggacacgatggtgcctaaacaatgcaaagttagttaacgtgcccattctttaaatctctcttccattaaatctgcttctcctgtggatagcattaacagcctctcagttttgtaatcacaaaatccaggtgtcattgataacgccctttctctccttatatccaccccttcaaaatcattcatcaagtcctgtggagtccaagaaaacaaatacctttcattttaatctctcctctctgctccatcttggtttaagccacatcttctttcccaaaccatgttgaagttgacttcccctgtcctttcccatatggcaggtagagttattcgtctaaaacacacactgggctgggtgcagtggctcacacctgtaatcccagcacttgggaagaccaatgcaggcggatcacttgaggtcaggactttgagac

SEQ ID NO: 341171 - DNA, 107 bp, Homo sapiens
atgttgttaggagatttacattactggcagacagtttggggatgagatagtgatgtgtttttttaagtgcagaaaattaagcaaataagaaaagacatttatgaact

SEQ ID NO: 341172 - DNA, 735 bp, Homo sapiens
aaacctgtagatttggagtaagaagcagagaggctagtgagagagttcagggtttaggcctgatttctatcctcttccacctaccacttgttgcatttccttcactgtcagaatttgattgttctgtgtctgtatcttcagatgtgtttttcctagtgtatttgaaaaactgttgaacagtcccctctgggcagggagggaagagggttagacaatcaggagtagagactctgttatttctctctccagacctagaccctggagttaactgaaggtccagagttactgaggggcggctgtgtttgtttttcagtaggctggctttactgagtgggatacaagagcccaaagcacaggccattcccagaagcctaacattttcatatttctttctctgccaaagaatctttggttagggttaagaataactagtctgtctgtggaaataccaaggccttttgtttgccagaagaaaagcgcttttgattaaggctgccttttctctctctcttttttttttcttaagctgttgtgggaagacttcagagcctctgaaggtgccgtatttaaggggtgtaggggaaggaatgatagctaaatagaactaagggagacttaatcgtgctttaccgcacatttgtgcagagattaacaacagcaacaaaatctacccagtttttggtcattgcttctactagcctttctttcttcctgtcttttatgaaatctacccaa

SEQ ID NO: 341173 - DNA, 231 bp, Homo sapiens
acaaacacttgttctgctgtttctgtggcctggctgagccaagaaaacatgttaaagcacagagcccacgcaagacagtgtgcttgcaggagaccctaccaacaggaatcggataacaaggagctaaaggggtgataatgagaagcaatggactagaggattcaagtggaagagtcttcatcacccgcaggggaatcaggagcaatgttcatcagtgaatgaaaggagtgc

SEQ ID NO: 341174 - DNA, 542 bp, Homo sapiens
taagttgacacctcttgccaattaatagcacttatactaatttataacccctccaaaatatgtgtgaaagtacaggttttttccttatccttcataagcagagtacagttaagtttttgaacttcaataatgatatatgttgttgtttaactttatttctttaaattattaataagtttgaacaccttttaatgtatttatgggccagtgatatttattttcatgtgagcttaactgttcatgtgcttggttcatttttctttttaatttgttgttttttttcctcattgattttttttcctttagagatggaatcttgctatgttgcccaggctggccttaaactcctattctcaagcagtactcctgcctcagcttcctgagtatctgcattgatttttaagtgcttcttataccttaagatattcctttgttgaacgtgttgaaaatatttttcctagtttgtcattttgtctttgactttttttgtgcttcatttttccttgcagaaagatttaatttttatgtagacaaatataaat

SEQ ID NO: 341175 - DNA, 332 bp, Homo sapiens
attcagatggtcacttaagcctctaatatatgatgtgtatcttcaaaaacaagggagccactcacacacagctctcagatgtgtgcgatgagcaccatcacaaattccttccttaatgcactctgctttccagctgacctgaagcttgcaaacagcaattctgatggtaaggagggtaaggaggaaatcaaagtccccaggtcactagtcagatctagccacagaagtaccagctccttttactctgcttatttgtggtaataagttattgttggcatgaattctgttctctaatctagtcacagtgtgggagaaatttttaaatctagcct

SEQ ID NO: 341176 - DNA, 258 bp, Homo sapiens
tgaatctgactcatttcttgactttatcattatagcttccacccttcctgcaacctctactgcctgattagagtcctaattttaccctctccctccctgatgcataggtaaaggcccctctgtggagtaaggagatcttcagagctgttagtgtaactaattgagaagtattgtttccattgcgtgttctactcatgttgcttctcttgtgaaccattaactttaattggatattatttttacctgtttctggaaaaa

SEQ ID NO: 341177 - DNA, 610 bp, Homo sapiens
agaaataattaaaataatgtgtgtgcacatatatatgcatattataaaacattgaactacataatctataaaatctatcaatatataacatacaagtatgtattgcaaaacaagtgaaagagtgaacctcgcatttatatattaagtgatgctgcttaaataaggaaatatataaaataactttggtaaatggaaacagttttggtgaagattcttaattcacagggtagaactcaaaatggttctctgaaaatacagtctagttctctaatgttttagagtaaagttgcatagaataagtaatataaatttattgataacctaactccaacattattcattataattactattttttttttttgagacagggtctgactctgatgcccaggccgaagtgtagtggtgcaatctcggctcactgcaactcccactgcccaggctcaagtgatcctcccacctgagcctcccaagtaacagggaccacaggtgtgcatcactgtgcctggctagtttttggattttttgtagagacagggtttcatatgttgcccaggctggtcttgaactcctgagctcaagcagtccacctgcctcgcctccccaagtg

SEQ ID NO: 341178 - DNA, 398 bp, Homo sapiens
  misc_feature (242)..(242): n is a, c, g, or t
  misc_feature (245)..(245): n is a, c, g, or t
actctgtctcaaaaaaaaaaaaaaaaagatgagaactttagatattgcatagccacaaagaaggaggtatcagattaaaatatgcaagtgtctcggggtcacagatagcgctgcctggatatttaaggtactgtgaccttatacagtcatcgctgtccgaggtgtcatacaccaggttgttggcgaacatactcctgaggaaccgcacgggctccagccacgactcgatgagcagcaggganatncacctctggtttagattgcatctacatggcgcagcctccatgtcgtagggtgccatagcaccttctaaaaactcaataatgcgaaccgagactggcccaccattgatgcacgtgtggattcccgatttagtgttccatcaaggcggagtgact

SEQ ID NO: 341179 - DNA, 117 bp, Homo sapiens
agtggaccaggcagttgaccccaaaagggaagcacaggacaaaggccctggggggacaaaacccacaaagagcgtcttgcctgcgaaagggcagaaggtcccccttgagcaaaagaa

SEQ ID NO: 341180 - DNA, 813 bp, Homo sapiens
gagccccaagcttaccacctgcacccggagagctgtgtcaccatgtgggtcccggttgtcttcctcaccctgtccgtgacgtggattggcgctgcgcccctcatcctgtctcggattgtgggaggctgggagtgcgagaagcattcccaaccctggcaggtgcttgtggcctctcgtggcagggcagtctgcggcggtgttctggtgcacccccagtgggtcctcacagctgcccactgcatcaggaagtgagtaggggcctggggtctggggagcaggtgtctgtgtcccagaggaataacagctgggcattttccccaggataacctctaaggccagccttgggactgggggagagagggaaagttctggttcaggtcacatggggaggcagggttggggctggaccaccctccccatggctgcctgggtctccatctgtgtccctctatgtctctttgtgtcgctttcattatgtctcttggtaactggcttcggttgtgtctctccgtgtgactattttgttctctctctccctctcttctctgtcttcagtctccatatcttccccctctctctgtccttctctggtccctctctagccagtgtgtctcaccctgtatctctctgccaggctctgtctctcggtctctgtctcacctgtggcttctccctactgaacacacgccagggatgggcctggggggccctgagaaaaggagggtttgcgtggggcggggtcaacctggtattccagacctggggggcacgcgggcaaggcaggtagatcacctgaggtcaggagttcgagac

SEQ ID NO: 341181 - DNA, 1157 bp, Homo sapiens
  misc_feature (1126)..(1128): n is a, c, g, or t
gagccccaagcttaccacctgcacccggagagctgtgtcaccatgtgggtcccggttgtcttcctcaccctgtccgtgacgtggattggtgagaggggccatggttggggggatgcaggagagggagccagccctgactgtcaagctgaggctctttccccccaaacccagcaccccagcccagacagggagctgggctcttttctgtctctcccagccccactccaagcccatacccccagcccctccatattgcaacagtcctcactcccacaccaggtccccgctccctcccacttacgccagaactttctccccattgcccagccagctccctgctcccagctgctttactaaaggggaagttcctgggcatctccgtgtttctctttgtggggctcaaaacctccaaggacctctctcaatgccattggttccttggaccgtatcactggtccacctcctgaggccctcaatcctatcacagtctactgattttcccattcagctgtgagtgcccaaccctatcccagagacttgatgcttggcctcccaatcttgccctaggatacccagatgcaaccagaacctccttcttcctagccaggctatctggcctgagacaacaaatgggtccctcagtctggcaatgggactctgagaactcctcattccctgactcttagccccagactcttcattcagtggcccacattttccttaggaaaaacatgagcatccccagccacaactgccagctctctgattccccaaatctgcatccttttcaaaacctaaaaacaaaaagaaaaacaaataaaacaaaaccaactcagaccagaactgttttctcaacctgggacttcctaaactttccaaaaccttcctcttccagcaactgaacctcgccataaggcacttatccctggttcctagcaccccttatcccctcagaatccacaacttgtaccaagtttcccttctcccagtccaagaccccaaatcaccacaaaggacccaatccccagactcaagatatggtctgggcgctgtcttgtgtctcctaccctgatccctgggttcaactctgctcccagagcatgaagcctctccaccagcaccagtnnnactggcggtgttttaactcggatcggcta

SEQ ID NO: 341182 - DNA, 504 bp, Homo sapiens
caaaacctaaaaacaaaaagaaaaacaaataaaacaaaaccaactcagaccagaactgttttctcaacctgggacttcctaaactttccaaaaccttcctcttccagcaactgaacctcgccataaggcacttatccctggttcctagcaccccttatcccctcagaatccacaacttgtaccaagtttcccttctcccagtccaagaccccaaatcaccacaaaggacccaatccccagactcaagatatggtctgggcgctgtcttgtgtctcctaccctgatccctgggttcaactctgctcccagagcatgaagcctctccaccagcaccagccaccaacctgcaaacctagggaagattgacagaattcccagcctttcccagctccccctgcccatgtcccaggactcccagcctgggttctctgcgcccccgtgtcttttcaaacccacatcctaaatccatctcctatccgagtcccccagttcctcctgtcaacc

SEQ ID NO: 341183 - DNA, 1220 bp, Homo sapiens
gagccccaagcttaccacctgcacccggagagctgtgtcaccatgtgggtcccggttgtcttcctcaccctgtccgtgacgtggattggtgagaggggccatggttggggggatgcaggagagggagccagccctgactgtcaagctgaggctctttccccccaaacccagcaccccagcccagacagggagctgggctcttttctgtctctcccagccccactccaagcccatacccccagcccctccatattgcaacagtcctcactcccacaccaggtccccgctccctcccacttacgccagaactttctccccattgcccagccagctccctgctcccagctgctttactaaaggggaagttcctgggcatctccgtgtttctctttgtggggctcaaaacctccaaggacctctctcaatgccattggttccttggaccgtatcactggtccacctcctgaggccctcaatcctatcacagtctactgattttcccattcagctgtgagtgcccaaccctatcccagagacttgatgcttggcctcccaatcttgccctaggatacccagatgcaaccagaacctccttcttcctagccaggctatctggcctgagacaacaaatgggtccctcagtctggcaatgggactctgagaactcctcattccctgactcttagccccagactcttcattcagtggcccacattttccttaggaaaaacatgagcatccccagccacaactgccagctctctgattccccaaatctgcatccttttcaaaacctaaaaacaaaaagaaaaacaaataaaacaaaaccaactcagaccagaactgttttctcaacctgggacttcctaaactttccaaaaccttcctcttccagcaactgaacctcgccataaggcacttatccctggttcctagcaccccttatcccctcagaatccacaacttgtaccaagtttcccttctcccagtccaagaccccaaatcaccacaaaggacccaatccccagactcaagatatggtctgggcgctgtcttgtgtctcctaccctgatccctgggttcaactctgctcccagagcatgaagcctctccaccagcaccagccaccaacctgcaaacctagggaagattgacagaattcccagcctttcccagctccccctgcccatgtcccaggactcccagcctgggttctctgc

SEQ ID NO: 341184 - DNA, 609 bp, Homo sapiens
  misc_feature (1)..(1): n is a, c, g, or t
ntcgctctagagtatcccctgcacacgccgagtctccagactacatgggaggctgaggcagaaggtttgtttaggcccaggaggtcgaggctgcaataatctgagtttccaccactgcactcactccatgctggctgcctttggattgttcctaattggatggttttgctttcaacagacactccaataaagtacacgaaataaagaataaagttaaacagtcagtcccagtgctgtgtaggtggcagtaagtctgggagagcgacctcggctgaactaactgtggtgtgcatcattgttaagcagggccagcaggatcctcatgtcacctggcaggaggagggacagggaagggtccctagaagtgaccttgagttgcacttagtgctcttggcagagggaagggcttgggctagtgctggaggcatgaagatggggtgtgttcagggctctccagcagtccaggcatgggaaggggacgctgagggccaaaggcggaggtgacactgggaagggaactagcaaggtgaggactggcttttggccatgtgactgaattgcctgtgtggtgcgtgtgtatgtgtgcgaatgtcagtgaactgtgtgtga

SEQ ID NO: 341185 - DNA, 663 bp, Homo sapiens
ggaattcaagaccaccctgggaaacaaagtgcgaccccatctctacaaagtcatacaattagcccagcatggtggcatgagcctgtgatccaaactacatgggaggctgaggcagaaggtttgtttaggcccaggaggtcgaggctgcaataatctgagtttccaccactgcactcactccatgctggctgcctttggattgttcctaattggatggttttgctttcaacagacactccaataaagtacacgaaataaagaataaagttaaacagtcagtcccagtgctgtgtaggtggcagtaagtctgggagagcgacctcggctgaactaactgtggtgtgcatcattgttaagcagggccagcaggatcctcatgtcacctggcaggaggagggacagggaagggtccctagaagtgaccttgagttgcacttagtgctcttggcagagggaagggcttgggctagtgctggaggcatgaagatggggtgtgttcagggctctccagcagtccaggcatgggaaggggacgctgagggccaaaggcggaggtgacactgggaagggaactagcaaggtgaggactggcttttggccatgtgactgaattgcctgtgtggtgcgtgtgtatgtgtgcgaatgtcagtgaactgtgtgtga

SEQ ID NO: 341186 - DNA, 586 bp, Homo sapiens
caaataccaaatcatccttcaagttttttagctcaaatactgaaatagctgaaaacctgtctctgaaatccccatgttcccacagcacttggacgaatctccatttgaacaatcatctcagagtattcttattgcacatctacccgctcctacctccatatagattaagctgctggaggacctagaagacaaggtttttttttttttttttgagacagagtcttgctctgtcgcccaggctggagtacagtggtatggtctcagcttactgcaacctccacctcctgggttcaagctagattctagtgcctcagcctcctgagtaactgggattacaggagtgtgtctcggctaattagcctggctaatttttgtaattttagaagagacagagtctcaccacgttggccaggctggtttcaaactcctgacctccagggatccgcccacctcacccccccatagtgctgggattataggtgtgagccaccacgcccaaccaagactgtctttgcattgtagtaaatcctagtgtctagcagagcattcagccaagtggtacagtatttgttgaaggcatgagtaa

SEQ ID NO: 341187 - DNA, 181 bp, Homo sapiens
cattgtatttatcaaatatattttcaaaccacataacaacagttgaagagcagcttgcagcttatgtaaaatgtcatcagagaagccaactagtatttctgtaaatagtagtagtatttaatttatgttacccatctctgcggattaaaggaagtattctcaaggaaaaattcaattaaag

SEQ ID NO: 341188 - DNA, 292 bp, Homo sapiens
acgatcccgtccaggattccacatgatggtcgggagcatctcctcgggctcctcctggctgcgacagtttctcagaccctccttgttgtgatggccttggaagctttgaagttctgatgaggcactttggaggatgcccattggctggaagaggtctcatgcttttctcaagattagaacctctgtaactgggttccaggtttgggggaggatctacgacattttttaaaaatataaagcactcgaccaaacaaagtaacatgttaaatatttacttatttatttattttgg

SEQ ID NO: 341189 - DNA, 739 bp, Homo sapiens
aaggtggaaaaagagtatttcttcatttttcactcttgttacatgttttgaagagtttgaagacagacactgcataaagtaacacatgaaactacctggtttgaatttttctagatcataccacaacttctgcttaggattttgtctcttgagattaaatcagcaagaagaaatgggacaaactatctatcatccatagatcagccagtagcaagatatgccaatgtggcacttcagtttaagagtcaagaagactcagtggtagaggaatgtatttactgcaaattcctgtcttgagaccttgggaggagagaagcatatgctccgagacagataagaatagacagccttttcttggttgagtggttagctggaggagccaggctacttctttctgcagtcatcctaggaagatcccagcatcagcagggcccagctacatgctctcttgcttcctccccactcatcgatgccacccctttcccctcaaaggacacaatgcaaagcctcctctgtgtgggacgacatcagaaaatggggaagataactgggacaggaaatgctattttcgtccctactgccaagggcaagggcggctgacaactcaagtggagagaggtaaggatatcctcacacaagggcccctcttataaggacaaggctttgcaagtacctctgaccccctcccccacttctctccaaaataaaggaaaataaatcatcctgagcaagtctggaa

SEQ ID NO: 341190 - DNA, 443 bp, Homo sapiens
cttttgtttgtttccgtgtttctcctgtatcttccacttagattgtcctttctcatctcttcatgtacaaaatgaacctcagagccactctggacccttcactgcaagaaaggtgtagtactttctttgaattcccgtcatgttcaaaatgaacctcagagccactctggacccttcactgaaagaaaggagtagtactttctttgaattcccgtcatgttctctgtgtagctctcatacttcttaattctgtctactttttacggtgtttgtgggtatggattatctctctgacaagactgtaaattccttgagggcaaggtcaatatcttggcctcatgttcatttctcacagctccttgcatgtagtagctgctcaattaaatacatgcatgataacacacaaataactgagacccaatcagtgctaaagtagtaatatc

SEQ ID NO: 341191 - DNA, 176 bp, Homo sapiens
cactgcactccagcctgggcgacaaagcaagactccacctcaaaaaaagaaaaaaaacccacaagtcccaaaaccaaaactggtatttcccatgtacattcgaccttaactgttgctcattcaacccagcccaactcagtgccccatcccctggccctgaagagaccattctggcc

SEQ ID NO: 341192 - DNA, 103 bp, Homo sapiens
ggtctatgacattactatgcttttattctttcatcctttgggaactccagttatacatatgctgagtttcccttgtttattcttgtatatatagttttattta

SEQ ID NO: 341193 - DNA, 229 bp, Homo sapiens
tccagcctggacgacagagtgagaccgtctcaaaaaaagaaaaaaaatcactgtgcctggcactgatgtggatgttgggcaccatttgtgacaagagagaaaaaaatccctgcattggtggggcttatgttctggtaagtgtccgtaaatactgaacatcaataaatcatgtagtatggcggaaggttgtaagtgccatggaacaaaggagagcagggtatagagattt

SEQ ID NO: 341194 - DNA, 388 bp, Homo sapiens
cttttcttcgttgaagagctctgatgtattgccttgtctcgaatgcataattgatcattatgaaaagaatacaggttgttcctgttgtctgttcttccttcttctctagtaacggaattttgaactaggtaaatggctatctagagtcaagactacatttcctagcttctcttgttgctaggagtgcacctgcttctggccactggggtttgcaactattttaaaccatggagttgaggtccccaagacagagaaacaagatagaaggcacctgcacctttgatatttaatgacaagcgatgaagtaccatgatgaaaacagccccaaacccctaactacactttcatgtttcatgtgacagggaaataaacttctgttttgtgtaat

SEQ ID NO: 341195 - DNA, 672 bp, Homo sapiens
ctccttggtgatcagtgtctattgaccgatgagcgatttttctttcactaacagcgatggttaagctaagattaaactaatagtgcatggggtacactaatacaactattacaatgctaaattgatgaaagctggttgagagggttggttttcaccctgtcctctgagaacatgccttgtggacagaagaggatactgtggacagcacctgggattgctgcaccgttgtctgctttatatgttgaacattggggctcaattctgaggtataaagggtcttaagctctaaaaatggttgtaaacgcctcacccagataatgtcttttctcatttttgctgttttatgttctgaggtaaaaggatatgttaatcttcttttcaaaaatatccaaaaggaaagaattttttttgctcattgaaaatcttattttcttttaaagaaggccttagcaaagcaccttaagagaaatatacaatttaaaatagaaaaaacatggccaagtagatattactgactgaatttatttcaaactaaacaaaatgaatcttacaaaacaatttttttctgtgtgttaggtgtaaaaatcactccagtaagcccaaatgttttcaatctgtggattggattgtttgcactggaaatgtagatttccaactgattttctactgatc

SEQ ID NO: 341196 - DNA, 133 bp, Homo sapiens
tctgagggctagcagaggggggaaaatgagcctacagggcagactgggaaggaacagaaaggtgtgagaaaaatccagagtatgcagtgtttttagaaacccaagaaaagtgcttcaggcaggagaatgtggt

SEQ ID NO: 341197 - DNA, 427 bp, Homo sapiens
aacattttttttcatttggctgtgtggtctggagaacaccttcctaagccagcggagtgaagttccacgcactgaccagccccgagctcactggagcgagtcatcttccggctccatggcagcccagccccacccacaggcagctgcctgtcacccacgctggcatgttccctcatcctacccaggcagcgggaaaacctggctgcttctgggatcctactactctgtcctgtccacaagccttcagagtcttggattcctaccctcaaacatcaactttgtgatttatcttcttgaaaacaaccacaaaaacttaaaatcaaaactctctaagggagtttcgcacaacccttgaggaatagttaaatgcccacggtgaaaccgagcttgtaccccacggtccaggtaggggcacattcctgaagtc

SEQ ID NO: 341198 - DNA, 299 bp, Homo sapiens
taattatagtgttgatgatattattgataacattcttgttatatgtcagacactgtgcatatatggtataaattttatcttctcagcaaccccattttatagaggaggaaattgtgtttctgatcagtttaagcaacttgctcaagggctgtcacagctggtaatcagcaggtctggctctgtctcagatatgtcctgctccagtgcctgtgctcttaactacttgtcttaatctaccttccacttttataggtgggaaatgtggaataaaaaaataactctatcgataattgtaattg

SEQ ID NO: 341199 - DNA, 692 bp, Homo sapiens
aaaacaaggtccagctaaaatcagggtccagctccaccacaagcgcagctccaggggctgttgagttttgcctctaccattccaagtagtctctgctccagaccaagtcccaccatctggcagtcatgtcagtccaaccacagtcatatcagggcgcttccagtcattgagtgccccttgaggaggctggaggagaggccaatgacatttgcacttgagactccagagtctagatttataaccactatgttacggctgccagtgtggctgcaaggacacttctttcattcattcatttacaatagatgtagcatctgctgtgtgccagatgccattctaggttctagggaaacaaggcagagcccctgttttccaaggcatccacattctaggaaagactgctaccagcctggcgtggtggctcatgcctgtaatcccagtactttgggaggccgaggtgggcggatcacttgatgtcaggagttcaagaccagccaacatagtgaaaccccgtttctactaaaagtacaaaaatcagctgggcatggtggcacgtgcctgtagtcccagctactcaggaagctaaggcaggagaatcgcttgaacctgggaggcagaggttctggtgagccgagatcatgccactgcactccagcctggggaagagactctagactccatcaaaaaataat

SEQ ID NO: 341200 - DNA, 499 bp, Homo sapiens
ttttttttttttttttttgagacggagtctcgctctgtcgcccaggctggagtgcagtggcgcgatctcggctcatgcaaggacacttctttcattcattcatttacaatagatgtagcatctgctgtgtgccagatgccattctaggttctagggaaacaaggcagagcccctgttttccaaggcatccacattctaggaaagactgctaccagcctggcgtggtggctcatgcctgtaatcccagtactttgggaggccgaggtgggcggatcacttgatgtcaggagttcaagaccagccaacatagtgaaaccccgtttctactaaaagtacaaaaatcagctgggcatggtggcacgtgcctgtagtcccagctactcaggaagctaaggcaggagaatcgcttgaacctgggaggcagaggttctggtgagccgagatcatgccactgcactccagcctggggaagagactctagactccatcaaaaaataat

SEQ ID NO: 341201 - DNA, 585 bp, Homo sapiens
cacgaaggggtgtcccagagtgtatttctactttctcatttctactgacagaatgttgatttttttttccttaacagctattaacacctagagtaatgaccattatttccgcaacctgtcttatggctaaagtgtggctatgcaatttaaattctagcccatttatataaatgcgggtttgaaatttttttacaatagatgtagcatctgctgtgtgccagatgccattctaggttctagggaaacaaggcagagcccctgttttccaaggcatccacattctaggaaagactgctaccagcctggcgtggtggctcatgcctgtaatcccagtactttgggaggccgaggtgggcggatcacttgatgtcaggagttcaagaccagccaacatagtgaaaccccgtttctactaaaagtacaaaaatcagctgggcatggtggcacgtgcctgtagtcccagctactcaggaagctaaggcaggagaatcgcttgaacctgggaggcagaggttctggtgagccgagatcatgccactgcactccagcctggggaagagactctagactccatcaaaaaataat

SEQ ID NO: 341202 - DNA, 344 bp, Homo sapiens
catagagtcttaatcctttagatagtgttgttctgatttaaatctggaaacttcaatttgatgaatcattacaaataggtttcctttcagcatttgattgatggagactgccagaaacactaagctaagaagggttccgaggccgtgcctgtgctcagctggaaagttttctgtgattgatgaatgatgtctggcattaggcttcccccaacctaaggttttgtataacaagaaatccaatttgagttgtccgttgattatagtaagccgaatctatgtctctggacaatgtgtgctataagtcatagagtgacctatgataactcagttaaatgaatatttat

SEQ ID NO: 341203 - DNA, 1163 bp, Homo sapiens
actgaaactgccgctgctgaactcagcgtatccagtcccgcagctgaccaatcggagctcgcccttccggggcccgccccattccaggaatcgacctccgcaccggcctcgaaaattgaccaatcggttgtgtagctccgctcttagtcccgcccccacgctgaaactgacacttcggatcgccgagtaacgctcaccagacgtcccggccctgcccctcacctgaccaatcaagacggccggccgaggcccctggaacggctcaggcggctgcggctgctacggcggcgcatgctaggggattctgccgggtagaagagctgggcctggaacccagccctgaggacatcctgcggcccaggggcaagtgacacctgctgagagaggcccaggatggtggaggctgaggaactggcacagctgcggctgctcaatctggagctcctgaggcagctgtgggtggggcaggatgctgtgcggcggtcagtggccagggcagcctcggagtcaagcctggaatccagcagcagctacaactcagagactccatcgaccccagagacgtcctcaacttccttgagcacctcctgcccacggggccggtcctccgtgtggggcccaccagatgcctgtcgaggggacctccgtgatgtggccagatcgggggtggcctctctcccacctgccaaatgccagcaccaggagtccctgggccgaccgagaccccactcagcaccctcgctgggcacctcaagcctgagggacccagagccctcagggaggctgggtgatccaggaccccaggaggcacagaccccgaggtccatcctggctcaacagagcaagctgtccaagcccagggtgaccttctctgaggagtctgcagttcctgagaggagctggcgcctcaggccatacctgggctatgactggattgcagggtctctggacaccagctcttccatcaccagccagcctgaggccttcttctccaagctgcaggagtttcgggaaaccaacaaggaggagtgtatctgcagccatcctgaaccccagttgccaggcctgcgtgagagcagtggcagcggcgtggaggaagaccatgaatgtgagtgcgggccctcggctaggccgctgagtagtccagcctcgcgctgccctgg

SEQ ID NO: 341204 - DNA, 1883 bp, Homo sapiens
actgaaactgccgctgctgaactcagcgtatccagtcccgcagctgaccaatcggagctcgcccttccggggcccgccccattccaggaatcgacctccgcaccggcctcgaaaattgaccaatcggttgtgtagctccgctcttagtcccgcccccacgctgaaactgacacttcggatcgccgagtaacgctcaccagacgtcccggccctgcccctcacctgaccaatcaagacggccggccgaggcccctggaacggctcaggcggctgcggctgctacggcggcgcatgctaggggattctgccgggtagaagagctgggcctggaacccagccctgaggacatcctgcggcccaggggcaagtgacacctgctgagagaggcccaggatggtggaggctgaggaactggcacagctgcggctgctcaatctggagctcctgaggcagctgtgggtggggcaggatgctgtgcggcggtcagtggccagggcagcctcggagtcaagcctggaatccagcagcagctacaactcagagactccatcgaccccagagacgtcctcaacttccttgagcacctcctgcccacggggccggtcctccgtgtggggcccaccagatgcctgtcgaggggacctccgtgatgtggccagatcgggggtggcctctctcccacctgccaaatgccagcaccaggagtccctgggccgaccgagaccccactcagcaccctcgctgggcacctcaagcctgagggacccagagccctcagggaggctgggtgatccaggaccccaggaggcacagaccccgaggtccatcctggctcaacagagcaagctgtccaagcccagggtgaccttctctgaggagtctgcagttcctgagaggagctggcgcctcaggccatacctgggctatgactggattgcagggtctctggacaccagctcttccatcaccagccagcctgaggccttcttctccaagctgcaggagtttcgggaaaccaacaaggaggagtgtatctgcagccatcctgaaccccagttgccaggcctgcgtgagagcagtggcagcggcgtggaggaagaccatgaatgcgtgtactgttaccgtgtcaaccggcgcctgttcccggtgcctgtggatcccggtaccccctgccgcctgtgcaggacaccgcgagaccagcagggccctgggaccctggcgcagccagcgcacgtcagggtgagcatcccgctgtcgatcctggagcccccgcaccggtaccacatccaccggcgaaagagctttgacgcctctgacacactggccctgccccggcactgcctgctgggctgggacatttttcctccgaagtctgagaaaagctcagcccccaggaacctggacctctggtcctctgtctccgctgaggcccagcaccagaagctgtccggcaccagcagcccttttcacccggcctcaccaatgcagatgctgcccccgaccccgacctggtcagtgccccaggtccctcggccccacgtcccacggcagaagccctgaggactgactcctgggggagaacagcattcccgccgcctccagcctctcccctctggcaggcgcacccaggagatggaatcccctgcccgcccagctcaggcccagctgtcctaggttgggcaggtgggtggacccaagcttgtctgctgcctgagttccagagagggaggaccctggggtggagggtgagggattctgtggaagtttgtaaataaagctcagtgctctgcaaaaaaaaaacgaaacacaaaaacacaccacaagaacacaaacacaaacaacaaaccaaccaccccacaaagaaaaccccacaaccccccaac

SEQ ID NO: 341205 - DNA, 1872 bp, Homo sapiens
actgaaactgccgctgctgaactcagcgtatccagtcccgcagctgaccaatcggagctcgcccttccggggcccgccccattccaggaatcgacctccgcaccggcctcgaaaattgaccaatcggttgtgtagctccgctcttagtcccgcccccacgctgaaactgacacttcggatcgccgagtaacgctcaccagacgtcccggccctgcccctcacctgaccaatcaagacggccggccgaggcccctggaacggctcaggcggctgcggctgctacggcggcgcatgctaggggattctgccgggtagaagagctgggcctggaacccagccctgaggacatcctgcggcccaggggcaagtgacacctgctgagagaggcccaggatggtggaggctgaggaactggcacagctgcggctgctcaatctggagctcctgaggcagctgtgggtggggcaggatgctgtgcggcggtcagtggccagggcagcctcggagtcaagcctggaatccagcagcagctacaactcagagactccatcgaccccagagacgtcctcaacttccttgagcacctcctgcccacggggccggtcctccgtgtggggcccaccagatgcctgtcgaggggacctccgtgatgtggccagatcgggggtggcctctctcccacctgccaaatgccagcaccaggagtccctgggccgaccgagaccccactcagcaccctcgctgggcacctcaagcctgagggacccagagccctcagggaggctgggtgatccaggaccccaggaggcacagaccccgaggtccatcctggctcaacagagcaagctgtccaagcccagggtgaccttctctgaggagtctgcagttcctgagaggagctggcgcctcaggccatacctgggctatgactggattgcagggtctctggacaccagctcttccatcaccagccagcctgaggccttcttctccaagctgcaggagtttcgggaaaccaacaaggaggagtgtatctgcagccatcctgagtgagcaggggcgggcgagggtgggcgagggcggctgagcggctccatcccccggcctgctcatccccctcgccctctcagaccccagttgccaggcctgcgtgagagcagtggcagcggcgtggaggaagaccatgaatgcgtgtactgttaccgtgtcaaccggcgcctgttcccggtgcctgtggatcccggtaccccctgccgcctgtgcaggacaccgcgagaccagcagggccctgggaccctggcgcagccagcgcacgtcagggtgagcatcccgctgtcgatcctggagcccccgcaccggtaccacatccaccggcgaaagagctttgacgcctctgacacactggccctgccccggcactgcctgctgggctgggacatttttcctccgaagtctgagaaaagctcagcccccaggaacctggacctctggtcctctgtctccgctgaggcccagcaccagaagctgtccggcaccagcagcccttttcacccggcctcaccaatgcagatgctgcccccgaccccgacctggtcagtgccccaggtccctcggccccacgtcccacggcagaagccctgaggactgactcctgggggagaacagcattcccgccgcctccagcctctcccctctggcaggcgcacccaggagatggaatcccctgcccgcccagctcaggcccagctgtcctaggttgggcaggtgggtggacccaagcttgtctgctgcctgagttccagagagggaggaccctggggtggagggtgagggattctgtggaagtttgtaaataaagctcagtgctctgca

SEQ ID NO: 341206 - DNA, 1112 bp, Homo sapiens
gcctggccaccgaattaggggctgccctgtgtggcaccatcccaccctccccagcagtgcccctgtgctggtgggactccatcccagctcctgagggccccaggaggatgtccctccccaccccttagggcgtgggccccaggttctgggaggaaaggggttaggaggaaatgggccgaagggcttcccagagggattggcagcttgtgtggttgggggccgctgagggcagcacggagcctggggacctgggttcctggctcagggagagctgtggcttctcatgggcctcgcaggcgtgtactgttaccgtgtcaaccggcgcctgttcccggtgcctgtggatcccggtaccccctgccgcctgtgcaggacaccgcgagaccagcagggccctgggaccctggcgcagccagcgcacgtcaggtgagtgaccagagtattgggacaccttgggggacagagcctgaaccactggttttaagaaaagatgggcctgggcgtgggcccccaaccgctgggaggctcctcaggggtcccccactgcccccctgcgcagggtgagcatcccgctgtcgatcctggagcccccgcaccggtaccacatccaccggcgaaagagctttgacgcctctgacacactggccctgccccggcactgcctgctgggctgggacatttttcctccgaagtctgagaaaagctcagcccccaggaacctggacctctggtcctctgtctccgctgaggcccagcaccagaagctgtccggcaccagcagcccttttcacccggcctcaccaatgcagatgctgcccccgaccccgacctggtcagtgccccaggtccctcggccccacgtcccacggcagaagccctgaggactgactcctgggggagaacagcattcccgccgcctccagcctctcccctctggcaggcgcacccaggagatggaatcccctgcccgcccagctcaggcccagctgtcctaggttgggcaggtgggtggacccaagcttgtctgctgcctgagttccagagagggaggaccctggggtggagggtgagggattctgtggaagtttgtaaataaagctcagtgctctgca

SEQ ID NO: 341207 - DNA, 979 bp, Homo sapiens
gcctggccaccgaattaggggctgccctgtgtggcaccatcccaccctccccagcagtgcccctgtgctggtgggactccatcccagctcctgagggccccaggaggatgtccctccccaccccttagggcgtgggccccaggttctgggaggaaaggggttaggaggaaatgggccgaagggcttcccagagggattggcagcttgtgtggttgggggccgctgagggcagcacggagcctggggacctgggttcctggctcagggagagctgtggcttctcatgggcctcgcaggcgtgtactgttaccgtgtcaaccggcgcctgttcccggtgcctgtggatcccggtaccccctgccgcctgtgcaggacaccgcgagaccagcagggccctgggaccctggcgcagccagcgcacgtcagggtgagcatcccgctgtcgatcctggagcccccgcaccggtaccacatccaccggcgaaagagctttgacgcctctgacacactggccctgccccggcactgcctgctgggctgggacatttttcctccgaagtctgagaaaagctcagcccccaggaacctggacctctggtcctctgtctccgctgaggcccagcaccagaagctgtccggcaccagcagcccttttcacccggcctcaccaatgcagatgctgcccccgaccccgacctggtcagtgccccaggtccctcggccccacgtcccacggcagaagccctgaggactgactcctgggggagaacagcattcccgccgcctccagcctctcccctctggcaggcgcacccaggagatggaatcccctgcccgcccagctcaggcccagctgtcctaggttgggcaggtgggtggacccaagcttgtctgctgcctgagttccagagagggaggaccctggggtggagggtgagggattctgtggaagtttgtaaataaagctcagtgctctgca

SEQ ID NO: 341208 - DNA, 892 bp, Homo sapiens
actgaaactgccgctgctgaactcagcgtatccagtcccgcagctgaccaatcggagctcgcccttccggggcccgccccattccaggaatcgacctccgcaccggcctcgaaaattgaccaatcggttgtgtagctccgctcttagtcccgcccccacgctgaaactgacacttcggatcgccgagtaacgctcaccagacgtcccggccctgcccctcacctgaccaatcaagacggccggccgaggcccctggaacggctcaggcggctgcggctgctacggcggcgcatgctaggggattctgccgggtagaagagctgggcctggaacccagccctgaggacatcctgcggcccaggggcaagtgacacctgctgagagaggcccaggatggtggaggctgaggaactggcacagctgcggctgctcaatctggagctcctgaggcagctgtgggtggggcaggatgctgtgcggcggtcagtggccagggcagcctcggagtcaagcctggaatccagcagcagctacaactcagagactccatcgaccccagagacgtcctcaacttccttgagcacctcctgcccacggggccggtcctccgtgtggggcccaccagatgcctcggccccacgtcccacggcagaagccctgaggactgactcctgggggagaacagcattcccgccgcctccagcctctcccctctggcaggcgcacccaggagatggaatcccctgcccgcccagctcaggcccagctgtcctaggttgggcaggtgggtggacccaagcttgtctgctgcctgagttccagagagggaggaccctggggtggagggtgagggattctgtggaagtttgtaaataaagctcagtgctctgca

SEQ ID NO: 341209 - DNA, 434 bp, Homo sapiens
tgctccacccaggaaggccaccctgactgcaagatccaggagggaatgtggctggaactggggatgacctgtccctttcaagtggcccccctgagacttccctattccccatccaggcctcaccaatgcagatgctgcccccgaccccgacctggtcagtgccccaggtccctcggccccacgtcccacggcagaagccctgaggactgactcctgggggagaacagcattcccgccgcctccagcctctcccctctggcaggcgcacccaggagatggaatcccctgcccgcccagctcaggcccagctgtcctaggttgggcaggtgggtggacccaagcttgtctgctgcctgagttccagagagggaggaccctggggtggagggtgagggattctgtggaagtttgtaaataaagctcagtgctctgca

SEQ ID NO: 341210 - DNA, 1791 bp, Homo sapiens
actgaaactgccgctgctgaactcagcgtatccagtcccgcagctgaccaatcggagctcgcccttccggggcccgccccattccaggaatcgacctccgcaccggcctcgaaaattgaccaatcggttgtgtagctccgctcttagtcccgcccccacgctgaaactgacacttcggatcgccgagtaacgctcaccagacgtcccggccctgcccctcacctgaccaatcaagacggccggccgaggcccctggaacggctcaggcggctgcggctgctacggcggcgcatgctaggggattctgccgggtagaagagctgggcctggaacccagccctgaggacatcctgcggcccaggggcaagtgacacctgctgagagaggcccaggatggtggaggctgaggaactggcacagctgcggctgctcaatctggagctcctgaggcagctgtgggtggggcaggatgctgtgcggcggtcagtggccagggcagcctcggagtcaagcctggaatccagcagcagctacaactcagagactccatcgaccccagagacgtcctcaacttccttgagcacctcctgcccacggggccggtcctccgtgtggggcccaccagatgcctgtcgaggggacctccgtgatgtggccagatcgggggtggcctctctcccacctgccaaatgccagcaccaggagtccctgggccgaccgagaccccactcagcaccctcgctgggcacctcaagcctgagggacccagagccctcagggaggctgggtgatccaggaccccaggaggcacagaccccgaggtccatcctggctcaacagagcaagctgtccaagcccagggtgaccttctctgaggagtctgcagttcctgagaggagctggcgcctcaggccatacctgggctatgactggattgcagggtctctggacaccagctcttccatcaccagccagcctgaggccttcttctccaagctgcaggagtttcgggaaaccaacaaggaggagtgtatctgcagccatcctgaaccccagttgccaggcctgcgtgagagcagtggcagcggcgtggaggaagaccatgaatgcgtgtactgttaccgtgtcaaccggcgcctgttcccggtgcctgtggatcccggtaccccctgccgcctgtgcaggacaccgcgagaccagcagggccctgggaccctggcgcagccagcgcacgtcagggtgagcatcccgctgtcgatcctggagcccccgcaccggtaccacatccaccggcgaaagagctttgacgcctctgacacactggccctgccccggcactgcctgctgggctgggacatttttcctccgaagtctgagaaaagctcagcccccaggaacctggacctctggtcctctgtctccgctgaggcccagcaccagaagctgtccggcaccagcagcccttttcacccggcctcaccaatgcagatgctgcccccgaccccgacctggtcagtgccccaggtccctcggccccacgtcccacggcagaagccctgaggactgactcctgggggagaacagcattcccgccgcctccagcctctcccctctggcaggcgcacccaggagatggaatcccctgcccgcccagctcaggcccagctgtcctaggttgggcaggtgggtggacccaagcttgtctgctgcctgagttccagagagggaggaccctggggtggagggtgagggattctgtggaagtttgtaaataaagctcagtgctctgca

SEQ ID NO: 341211 - DNA, 1924 bp, Homo sapiens
actgaaactgccgctgctgaactcagcgtatccagtcccgcagctgaccaatcggagctcgcccttccggggcccgccccattccaggaatcgacctccgcaccggcctcgaaaattgaccaatcggttgtgtagctccgctcttagtcccgcccccacgctgaaactgacacttcggatcgccgagtaacgctcaccagacgtcccggccctgcccctcacctgaccaatcaagacggccggccgaggcccctggaacggctcaggcggctgcggctgctacggcggcgcatgctaggggattctgccgggtagaagagctgggcctggaacccagccctgaggacatcctgcggcccaggggcaagtgacacctgctgagagaggcccaggatggtggaggctgaggaactggcacagctgcggctgctcaatctggagctcctgaggcagctgtgggtggggcaggatgctgtgcggcggtcagtggccagggcagcctcggagtcaagcctggaatccagcagcagctacaactcagagactccatcgaccccagagacgtcctcaacttccttgagcacctcctgcccacggggccggtcctccgtgtggggcccaccagatgcctgtcgaggggacctccgtgatgtggccagatcgggggtggcctctctcccacctgccaaatgccagcaccaggagtccctgggccgaccgagaccccactcagcaccctcgctgggcacctcaagcctgagggacccagagccctcagggaggctgggtgatccaggaccccaggaggcacagaccccgaggtccatcctggctcaacagagcaagctgtccaagcccagggtgaccttctctgaggagtctgcagttcctgagaggagctggcgcctcaggccatacctgggctatgactggattgcagggtctctggacaccagctcttccatcaccagccagcctgaggccttcttctccaagctgcaggagtttcgggaaaccaacaaggaggagtgtatctgcagccatcctgaaccccagttgccaggcctgcgtgagagcagtggcagcggcgtggaggaagaccatgaatgcgtgtactgttaccgtgtcaaccggcgcctgttcccggtgcctgtggatcccggtaccccctgccgcctgtgcaggacaccgcgagaccagcagggccctgggaccctggcgcagccagcgcacgtcaggtgagtgaccagagtattgggacaccttgggggacagagcctgaaccactggttttaagaaaagatgggcctgggcgtgggcccccaaccgctgggaggctcctcaggggtcccccactgcccccctgcgcagggtgagcatcccgctgtcgatcctggagcccccgcaccggtaccacatccaccggcgaaagagctttgacgcctctgacacactggccctgccccggcactgcctgctgggctgggacatttttcctccgaagtctgagaaaagctcagcccccaggaacctggacctctggtcctctgtctccgctgaggcccagcaccagaagctgtccggcaccagcagcccttttcacccggcctcaccaatgcagatgctgcccccgaccccgacctggtcagtgccccaggtccctcggccccacgtcccacggcagaagccctgaggactgactcctgggggagaacagcattcccgccgcctccagcctctcccctctggcaggcgcacccaggagatggaatcccctgcccgcccagctcaggcccagctgtcctaggttgggcaggtgggtggacccaagcttgtctgctgcctgagttccagagagggaggaccctggggtggagggtgagggattctgtggaagtttgtaaataaagctcagtgctctgca

SEQ ID NO: 341212 - DNA, 1595 bp, Homo sapiens
actgaaactgccgctgctgaactcagcgtatccagtcccgcagctgaccaatcggagctcgcccttccggggcccgccccattccaggaatcgacctccgcaccggcctcgaaaattgaccaatcggttgtgtagctccgctcttagtcccgcccccacgctgaaactgacacttcggatcgccgagtaacgctcaccagacgtcccggccctgcccctcacctgaccaatcaagacggccggccgaggcccctggaacggctcaggcggctgcggctgctacggcggcgcatgctaggggattctgccggtcaagcctggaatccagcagcagctacaactcagagactccatcgaccccagagacgtcctcaacttccttgagcacctcctgcccacggggccggtcctccgtgtggggcccaccagatgcctgtcgaggggacctccgtgatgtggccagatcgggggtggcctctctcccacctgccaaatgccagcaccaggagtccctgggccgaccgagaccccactcagcaccctcgctgggcacctcaagcctgagggacccagagccctcagggaggctgggtgatccaggaccccaggaggcacagaccccgaggtccatcctggctcaacagagcaagctgtccaagcccagggtgaccttctctgaggagtctgcagttcctgagaggagctggcgcctcaggccatacctgggctatgactggattgcagggtctctggacaccagctcttccatcaccagccagcctgaggccttcttctccaagctgcaggagtttcgggaaaccaacaaggaggagtgtatctgcagccatcctgaaccccagttgccaggcctgcgtgagagcagtggcagcggcgtggaggaagaccatgaatgcgtgtactgttaccgtgtcaaccggcgcctgttcccggtgcctgtggatcccggtaccccctgccgcctgtgcaggacaccgcgagaccagcagggccctgggaccctggcgcagccagcgcacgtcagggtgagcatcccgctgtcgatcctggagcccccgcaccggtaccacatccaccggcgaaagagctttgacgcctctgacacactggccctgccccggcactgcctgctgggctgggacatttttcctccgaagtctgagaaaagctcagcccccaggaacctggacctctggtcctctgtctccgctgaggcccagcaccagaagctgtccggcaccagcagcccttttcacccggcctcaccaatgcagatgctgcccccgaccccgacctggtcagtgccccaggtccctcggccccacgtcccacggcagaagccctgaggactgactcctgggggagaacagcattcccgccgcctccagcctctcccctctggcaggcgcacccaggagatggaatcccctgcccgcccagctcaggcccagctgtcctaggttgggcaggtgggtggacccaagcttgtctgctgcctgagttccagagagggaggaccctggggtggagggtgagggattctgtggaagtttgtaaataaagctcagtgctctgca

SEQ ID NO: 341213 - DNA, 682 bp, Homo sapiens
actgaaactgccgctgctgaactcagcgtatccagtcccgcagctgaccaatcggagctcgcccttccggggcccgccccattccaggaatcgacctccgcaccggcctcgaaaattgaccaatcggttgtgtagctccgctcttagtcccgcccccacgctgaaactgacacttcggatcgccgagtaacgctcaccagacgtcccggccctgcccctcacctgaccaatcaagacggccggccgaggcccctggaacggctcaggcggctgcggctgctacggcggcgcatgctaggggattctgccgggtagaagagctgggcctggaacccagccctgaggacatcctgcggcccaggggcaagtgacacctgctgagagagccccgaccccgacctggtcagtgccccaggtccctcggccccacgtcccacggcagaagccctgaggactgactcctgggggagaacagcattcccgccgcctccagcctctcccctctggcaggcgcacccaggagatggaatcccctgcccgcccagctcaggcccagctgtcctaggttgggcaggtgggtggacccaagcttgtctgctgcctgagttccagagagggaggaccctggggtggagggtgagggattctgtggaagtttgtaaataaagctcagtgctctgca

SEQ ID NO: 341214 - DNA, 630 bp, Homo sapiens
cccacttccagacaggtaccctaagcacccaagtgctgccattctcaccccatcactcctatttccttgtctctatagcatgattatttggtattccttatctattcatttgcttacttgtttgaggcatgtctcaccaactgctggtaaagtccatgacagcagtgactttctcagtcttgttcattacctgtacattacagtattgaccagagccaagcatatgccttctaggaatgcgcactctatacatatttactgaacatgaatacatttcttagtgaaaacacatgtagaaatctaaatgcaaaagcagagttggaaagtagctggatccaaaatacgtgttaaaagtttacactgggggccagaagcattggctcatgcctgtaatttcagctacttaggaggttgaggcaggaagactacttgaggccaagagttcaagatcagctggggcaacatagcaagatgctgcctcttaaaaaataattttaaaaactgtttaaagtttacactgggaaagaaagaggaagctcacttcattaaaagaggaagaaaataacagaaattaggtgattagtaaatgatgaagttccttggggacagctcctacagtgatcttatttc

SEQ ID NO: 341215 - DNA, 499 bp, Homo sapiens
agtctcaggaataaatattaggaaataaatccagacaatggattccaatcattagagatgtgaaatgaaggggtatttagaatgctatatacacagtaaagcttcctaaattgagatgcctgtatattttcttttataatgagggagaaggagttactcaggaacaagaggaacctgaggatagtagagagggagagtaaatgaagaaagaatattctgaaagagagcatgaagtcaagactaaggatcatcagtaaacaatggacacctgcctgtttcggcacttctgtagctttagtccttcaattcctttaatttcatcaaggacccttcagctggccaatatcaggcacatttcacacatgaagaaaatgaggcttagagaagctaagtatcttgctccaagtctcaggaagcagaacaaacacatgtgtatctaaaacaggagctgttagactctgaagttcacactttctctgagatgagacactgtcactca

SEQ ID NO: 341216 - DNA, 776 bp, Homo sapiens
cgcagcatgtcagctccttctgacctggaaatgattggtaatgaagatttggaatttactagagcaaatcagaggcgtcgccacgtgaccagccaccgcagcagctcctttacactcctgcagtcgctggccattgaggacagcagggacaagcccacctacagtgtcctgctagggcagctgtttgctttcatcggcaccaaccctgaccaagctgtgtccagcagcagtttccttttggctgcacagacaaggtggcggcggggaaacactcgcaagcaggcactggtgcacatgcgggaattgctgacagctgccgtacgagtcgggggagtgacgcatcttgtgggtccagtgacgatggtccttcagggaggacccagaattgaagaactcacatgtggtgggatggtcgagcaggtccaggaagcctttggcgagaccatgacctctgttgtgtctctgtgtgctcgttaccctatcgcttgcgcaaatagcattggactcttatgtaccataccttacaccaggagcgaagagaagtgcctggtacgcagtggccttgtgcagctcatggatcgactgtgtagcttgagcaatcagaccgagtccagctccagtgagaaacagaccaagaagcagaaggtggccaccatggcctgggctgccttccaggtgcttgccaaccgctgtgttgagtgggaaaaagaggaaggtggctccacagaggctgtgcactcaggtctggcccgcacatccgtactggccgggtaccg

SEQ ID NO: 341217 - DNA, 988 bp, Homo sapiens
cgcagcatgtcagctccttctgacctggaaatgattggtaatgaagatttggaatttactagagcaaatcagaggcgtcgccacgtgaccagccaccgcagcagctcctttacactcctgcagtcgctggccattgaggacagcagggacaagcccacctacagtgtcctgctagggcagctgtttgctttcatcggcaccaaccctgaccaagctgtgtccagcagcagtttccttttggctgcacagacaaggtggcggcggggaaacactcgcaagcaggcactggtgcacatgcgggaattgctgacagctgccgtacgagtcgggggagtgacgcatcttgtgggtccagtgacgatggtccttcagggaggacccagaattgaagaactcacatgtggtgggatggtcgagcaggtccaggaagcctttggcgagaccatgacctctgttgtgtctctgtgtgctcgttaccctatcgcttgcgcaaatagcattggactcttatgtaccataccttacaccaggagcgaagagaagtgcctggtacgcagtggccttgtgcagctcatggatcgactgtgtagcttgagcaatcagaccgagtccagctccagtgagaaacagaccaagaagcagaaggtggccaccatggcctgggctgccttccaggtgcttgccaaccgctgtgttgagtgggaaaaagaggaaggtggctccacagaggctgtgcactcaggtctggcccggcaggtgtccagccttctcactaaccatcttgcccgagccacagagtgctgtggcaaccaggctgctgggaatgacgcgctccaggatgtccttagtcttctcaatgatctctcaaggagccacataggtaaagccatcctgagccagccagcttgtgtgtccaaactcctctccctgctgcttgaccaacgcccgtctccaaagctagtccttattattctccagctgtgccggg

SEQ ID NO: 341218 - DNA, 542 bp, Homo sapiens
  misc_feature (95)..(95): n is a, c, g, or t
aactgcatagcccacgtaacaatcataaaaatgagaatttaaggccctggaggagactgagttagccaggtcctaggcggactcctttcatagcngttgcttcatatacatttagaaaaacacatgcgtggccaggtgcagtggctcacatctgtaatcccagcactttgggaggccaagaagaaccttatcaacctgcctgccctgtcttcttctctcagcataatcgcttcctctgagaaaccttccctgaatggccaccctatttctccaaaagcacttgccattgttggaattctatctttgtctgttcaggtgattaatatctatctctccaaatatcagagaccaatcctgttatgctcatcactgtattcccagaacagtgtctggtgtatcatatggctcaacagaaatgtgttgaatgaatgaataaatggactgaactgcatagcccactgtaacaatcataaaaatgagaatttaaggcccttggaggagactgagttagccaggtcctaggcggactcctttcatagctg

SEQ ID NO: 341219 - DNA, 548 bp, Homo sapiens
tggaataatatattcaaagtactgaaggaaaacaaaaataaaaacaacatggaatcaagaattcttcatccagcaaagctgtctttcagaaatgagggagaaataaaacattcccagacaaactaaaagctaagggagtcgtcaacattaggcctgccttcaggaattactgaagggagttctttaagctgaaacaaaaggcccctaattaataatacaaaaacacaaaagcacaaaatttaatggtataagtaatatagagccatattcaaaatactctatgactgtaatgatggtatttaaagcaattttatctctagtacaagggttaaaagacaaaatattaataacaagcatagctaaaaataaattgtcaataaatacacattacaaaatatgtaaattctgacatcaacgacataaaatgtgtgtgggggagtgaaagaatgcaaagttaagttgttatcagcttgaaattgactgtaaaccccatagtaacagcaaggcaaaaatctttaatagaagcacagaacaaaaattttaaaaga

SEQ ID NO: 341220 - DNA, 690 bp, Homo sapiens
  misc_feature (422)..(422): n is a, c, g, or t
  misc_feature (461)..(461): n is a, c, g, or t
  misc_feature (584)..(584): n is a, c, g, or t
  misc_feature (587)..(587): n is a, c, g, or t
  misc_feature (593)..(593): n is a, c, g, or t
  misc_feature (597)..(597): n is a, c, g, or t
  misc_feature (606)..(606): n is a, c, g, or t
  misc_feature (632)..(632): n is a, c, g, or t
ctctcctgcagaaacgaagggaaaagaactggcagaacctaaatgcttttaaactaggttgaacaaagagaggcaatggtggaaaagttaccaaattatatggggaggctaaaggaagacaagaatcatgttacccaggtctgtttgtacagaattctctcagctctgacaacatgtggtttttttcttctggtacccggagagcatctttcacatgggagtttttatcgcttgttttcaggaagaaaagaggaagattagaatgtccttcttgcatcaagcgcctttacctcaaaataatcctaagccaaagtggcttattttggaatggcatattctgccaccccttaactgtaactgggggcatttgaagttttcttgcacactgattattcacaaatactctaacaacatagagaatnccgaggagcaccaccaatacatgtattggtggtgctctncttcctttcaatgactgcctgctcattttcccaggcagtcaggagcaccgtcttttgaattccccgcaacgatgtatccatcaatccgggatgggggagtagcccccatgggaaataaagccnggngatggnctgnacacagtcnatgttcaactttgcgggcacgccggngtaaaatggggccagggttaactggacacagaccataggcattatgctggcaggaaaa

SEQ ID NO: 341221 - DNA, 507 bp, Homo sapiens
gggaatgaatgttggataggtaactaacagtgaactctgtcgtaaagttgctgaggattgccttaccatgtgtgcacacgtgtgtgtaagtcttttcaatgctcctattgctgtgacttcatctctagtacaggaaggattctgtcacatgacgtcatgacaggttttgagatacagtggaattaactgagtttcttgatctgctgatgacagaaaaaggagacaaggatgaggaagtcttgtgtgagtttttctttttttgcggggggtagggtgtctcactccttttgcccaggcttgagtgcagtggggtggtcacagctcactgcagcctcaattctctgggctcaggtgatcctccccccatcagtctcccaagtagctgggactgcaggcatgagctactggtacccagctgtcagatagtgaacttctgtccatccggcagccagacaatgagagagtccagcacagtagcgcctctgaagaaatacactgcttgccaaa

SEQ ID NO: 341222 - DNA, 696 bp, Homo sapiens
gggaatgaatgttggataggtaactaacagtgaactctgtcgtaaagttgctgaggattgccttaccatgtgtgcacacgtgtgtgtaagtcttttcaatgctcctattgctgtgacttcatctctagtacaggaaggattctgtcacatgacgtcatgacaggttttgagatacagtggaattaactgagtttcttgatctgctgatgacagaaaaaggagacaaggatgaggaagtcttgtgtgagtttttctttttttgcggggggtagggtgtctcactccttttgcccaggcttgagtgcagtggggtggtcacagctcactgcagcctcaattctctgggctcaggtgatcctccccccatcagtctcccaagtagctgggactgcaggagtgcatcaccatacccagctaattttttatatttttagtagagatggggcctcgctatgttgccctggctggtcttgaactcctgggctgaagcaatccgcccacctcggctttgcagagtgttgggattacaggtgtgagtcaccatgcccagcaatgagtttttgtttttgttttttgtttttcttaaacaaggcttttcttttatctttaaacactttgttggttctctctgtttggtagttgtactatgtctaagttgtttattttgttaggagcattttgttgtaatcatgaaat

SEQ ID NO: 341223 - DNA, 263 bp, Homo sapiens
tctgtcacaaaaaaaaaagcgttaagttaaggagcgtgaataaaaataatacatttcatattctaagacaatatcatctacaactttattccaatataaattactaaaactttaccatataagtagtagaaagcctgaatagataaaagctatggaagaaaaattaaagatagtgatagatttatcaccaagctcagatggttctgcaaacaaattctaagaaaccgtcagggaacagatcattactgcgttgacacagaagg

SEQ ID NO: 341224 - DNA, 314 bp, Homo sapiens
caaaattgagcaaatatttaaaagtaaaaccaacaaaaccaaaaacctatgccactattattgtttcctttatgtcattaaattgttttggttttatagtgtcatctgttcagtctacaatgcttctatgtcacatcaagtaatagtagcagaatattaggaggagtggttattcagttttagtttcaaagcttagaagagaagacgctgcattgtactgcaggtcagtatcaaggagatcaggttgagtcaagagtacaataatagaaaaggctggtggaattgaggatccgaattgtagggctctctgtagg

SEQ ID NO: 341225 - DNA, 181 bp, Homo sapiens
ttttcagttagacaaaatggcttaggaagcaggtactaaagggtcagacttccaccaatgcctgatggtctcaaggtactccagtcaagtgtgggaggagctgggggagacctatctttaaaaattgtggtgtgcctcttggctcattgctgactcaaatcatataaacaaaaaacaaact

SEQ ID NO: 341226 - DNA, 462 bp, Homo sapiens
ttcaaaaaatacagaagaaaaatttgccccccatctaagcccagaccttcaaactacttctcaataggtgatgcaaactgatggtttgataagatgatgatttccttttaatgaatccctggaaggatatcgagttgcaggtgaggatggaaaaatttataccttaccaaagccccactacaagtctttcatgtaggagcattaaattcactcatgccacaaaatgtactgaaggcctactattgccaggcattctgctgggctatagtaaacaaagcagacaaacacacctgctcgcagcagaaaataaacaataaacataacatataagtaaatcatatagtatgttacagggtgataagcgttgtgactaaagggaaacatagggcaggataagggaggtcaggaggttgagtgttggaagtacatttaaataggatgatcaggaaaagcctcactgaa

SEQ ID NO: 341227 - DNA, 339 bp, Homo sapiens
taccattgaagtcttctggaagcagaagggtctggggagctgccagctccctgctggcgggggtgtccttttgaggcctgatggagacaggcttaggtgtggggttgactcagtgtccctggacttgcccctttggacctgggcctgtgggtgtggttcttggctcaggccttttaaactctgctcttacagtttctctggtggtgaaaagctaaactctgtgttagtgtgttttcacgctgctgataaagacatacctgagactggcgctttacaaacaaaagcggtttaatggactcacagttccacatggctggggaggcctcacaatcatggcgg

SEQ ID NO: 341228 - DNA, 97 bp, Homo sapiens
ggcttctgcagcgagaggctggagctggcactgggaacactacccctcatggtcaagagcaccagcgcccctgggggctgcaacctctgccctcccg

SEQ ID NO: 341229 - DNA, 359 bp, Homo sapiens
gagaattgcttgaacccaggaggtggaggttgcggtgagccggagatcgcgccattgcactccagcctgggcaataagagcgaaacgccgtctcaaaaaaaaggaaagaaagaaagaaaagaaaaggccggacgcagtggctcacgcctataatcccagcacttcaggagtccaaggcgggcggatcacgaggtcaagagtttgagaccagcctggccaacacagcaaaactgcgtctctactaaaaatacaaaaattggccgggtgcggtggttcacacctgtaattccagcactttgggaggccaaggcaggcggatcacttgaggtcaagagttcaagactagcctggccaacatg

SEQ ID NO: 341230 - DNA, 649 bp, Homo sapiens
gagctgcattgaggtttttgaaatcgttctggtgggtggtgatgaaatcctgaacacaggcggtgtcaatgcaggagacagaagaggccagatgtcttctcgagtcctaaaactatagaatgtatttcattactttcctttcatttgctcttcaacctgtagccctcaactcttgcaagactccaataatcattatttaaggattcgagttatggagaaattcacctggcacacaagaggtgggtcaggaagctcagttaatgagtctgagagagaaagaaaagaattgccaagtttcaggcagtgagctggagacagtctgtactttttgggaactccaaaaggaagtgtgttgacttggctgacatttcagcggggaaaataaggaaggaaggtgatgggtgactgtgaggccagaggcctttgccttttccgtacaccagctccacagtgagcatcctgagggcaggaaccatatctgacacatctctgaatcctaccacccttagctcgtgcaggcatttgaaaggtgctgtaagcgaggggaatgttggagtccattctgactctgctcacaggattgggagccacgctaacccgacaacctctgaactctggatatggaaccaggccgaggctgccagctctt

SEQ ID NO: 341231 - DNA, 160 bp, Homo sapiens
tctaatatttaaaacaaaacataaaatgacattaaagaagtttgtgccatttatttttacaactcaccgaattgactgttttacgaattttattacccaaaactctactgacttgaatgcaagaaaggtcatgtttgaatcagtaaagcccagactgcag

SEQ ID NO: 341232 - DNA, 196 bp, Homo sapiens
ctgcacttgtatgtttattgcaacattattcacaataaaatatatgtaatcaatttaaatgtccatcaaaggatgactgcataaggaaaatctggtgtgcatgtgcgtgtgcatatgtgtgtgtgtgtgtgtgtgtgtgtgtgtatgtgtacatacgctactcagccattaaaaagaacgaaatcatttgccacaa

SEQ ID NO: 341233 - DNA, 170 bp, Homo sapiens
tggataatgaagaaaatattaaaaagaattctatgtcaggaaagttcgaaaaaacggggaatatttagcctgatcaataaaacatttataggggatgcaaaagttgtttttaaactcctaaaagtatgtgtttgaaaaagggattaaatttattttttgagactccaagt

SEQ ID NO: 341234 - DNA, 226 bp, Homo sapiens
cagagtgtctggggtccctttgtgggggaccactaggcttctagagtctgaccctgcccacaggtgggtcagagcctgaatcctggttttatagagttagatcagacctcttaaggcttggaggtcaagagggagagcaattgaagaggaccttgggaggtgggagctctcaccagcccaagtgatgatcacctcccagctcaaatcagagcagctgaaatctgcc

SEQ ID NO: 341235 - DNA, 331 bp, Homo sapiens
aatgtgcccaacaccccatggtttatggcagaagagctcaggctagaacttggagatctgagctgtttctctgcagcagccccaattccccgcctagaaatgtaatggaagaaggatacgagagatttgatgttccatttttttagaactctctcaaataatggaaaaagatacttcctatttaactgcataataatcccgggatgtgactaggagggaggaaagaatggagagagagagagagagagagagagagagagagagagagaaatagttagttaggtggatagtctcacttacttctgaaagtttattgtgaatatgactgtgt

SEQ ID NO: 341236 - DNA, 575 bp, Homo sapiens
tgagggcaggtggcatggggtcctggaatgctgctagctgcttgtgtcaattacatgggtcacaacttgattcccttccgctggaaactgtaagaaaaggggaacggcacacagaaaatgaagagccagacaccagacggcaagagaactggggaaaagaaatcaagttttactcctaactaggtaagtagccttgagcaggccaatttccctctgtggatttctaataccagggatttaactaaaagatgtccaaggaccactctagccatgaccttccagaaatcactctattaccaaatcatgtgagcaaatgtaggtctgagaaatgggagagagctacatgagggagaagaaaatgaaggtattaaatgggattcaagttaatattggccaaaagacagaagatggcagagagcaaaggaagggagcctgaaccagaacgttcccaatcctggcctggctcataacttgctgtgtgatcctggctacatgccaacttcatttcctcatcagcccaatggacctcggggccctatgttctggcctcagctgcccactctccaaccttatct

SEQ ID NO: 341237 - DNA, 440 bp, Homo sapiens
aggctggccaggtcagctgtgtgcggctgcagtgcccaccccttccctgcaagctccaggtcaccgagcgggggagctgctgccctcgctgcagaggctgcctggctcatggggaagagcaccccgaaggcagtagatgggtgccccccgacagtgcctgctcctcctgtgtgtgtcacgagggcgtcgtcacctgtgcacgcatccagtgcatcagctcttgcgcccagccccgccaagggccccatgactgctgtcctcaatgctctgactgtgagcatgagggccggaagtacgagcctggggagagcttccagcctggggcagacccctgtgaagtgtgcatctgcgagccacagcctgaggggcctcccagccttcgctgtcaccggcggcagtgtcccagcctggtgggctgcccccccagccagctcctgccc

SEQ ID NO: 341238 - DNA, 591 bp, Homo sapiens
ctggaattcggcacgagcatctctccaactaaagtcctataacattccaacccattgccttgagttctccttggttgatctcctgggtgtcccaactctcagatagtcctgtcacactcatggggctttattgcctagtttacatgggggtgcttctttcctgcctgctgcttccctctttgtgggtgaagatcagttgctataatggcctggcctttcttcctcttcccctttcactcaattcttctctttcagcccccaggaagacgcagtagcttctctccttggtaaatttgggaaaaataaactggatgtaaaaagatcagctttcacctctatagtttcactctccttttctatgctttcaaggctaaccagcctctctgaagactgctttaaatctttattctaatatgacaatatgttcagtcagctctcccagattttatataactgggagttgtctttttcagctcccctcagtgcctctctgctctgagttaaaatctgttgctttcaaagcttaattgtcagatgccattcattcaaaaaatactaatcagtgcaggtactgtcctgggtttgggaaat

SEQ ID NO: 341239 - DNA, 538 bp, Homo sapiens
ctggaattcggcacgagcatctctccaactaaagtcctataacattccaacccattgccttgagttctccttggttgatctcctgggtgtcccaactctcagatagtcctgtcacactcatggggctttattgcctagtttacatgggggtgcttctttcctgcctgctgcttccctctttgtgggtgaagatcagttgctataatggcctggcctttcttcctcttcccctttcactcaattcttctctttcagcccccaggaagacgcagtagcttctctccttggtaaatttgggaaaaataaactggatgtagctaaccagcctctctgaagactgctttaaatctttattctaatatgacaatatgttcagtcagctctcccagattttatataactgggagttgtctttttcagctcccctcagtgcctctctgctctgagttaaaatctgttgctttcaaagcttaattgtcagatgccattcattcaaaaaatactaatcagtgcaggtactgtcctgggtttgggaaat

SEQ ID NO: 341240 - DNA, 327 bp, Homo sapiens
ttatagtaccaggattgcgtagatcattatatgctctataccattatttgccactaacctggtgacttaagagtacgatagctgtcgttcagatttattaacctttcttcgtatgtttgaaagtcattatgagtgtactggcttaagctaatagcagattagtaaatattgaaagagtcatcttgccatttgaagtgttttctggctagaataaatgtttgttcaggttgtagccctgcccaggtaatcaccaggtaaaaatacaggatcaacttccagtgctggaacaagcaggataaattactaggtgcaggaatgggttttatg

SEQ ID NO: 341241 - DNA, 613 bp, Homo sapiens
ggttacaaggctggtcaccagcagtgagggtgccgctgaggtgggatagcttacacggaaagaacagtcatgtttggtggtttttctagagcaacatcagcagttggtatctggaggaggagtaatgaatggtgggaggacagtgaaaaagggaaactgtcttctaagtggagtgtctgagcaggacatccatgccagggggaaaagatatgagggagtcacaaagagtaggtagactgagaaagggaggaatttaggggctagaggtgacaatgaggacagagagtgattgtgcatatcagtaagaatggaattaggtttggtctagggcgaggagtagatcaatatgtaaatgttttggaaactaaaacaccagataaaaattaccattcctaatctacagctaaaatgtggttccctgttcttaatagatgatattttccctgatcattgttaatttcaacaatattttcttctcttcttgtttggctgaaacatcctgaggttttccactctctcatgttctaaggtcagacttctgaatcctctcattttagtctaggtcagtgatcttcaaccttggctgtgtactggactcacctgaggagattaa

SEQ ID NO: 341242 - DNA, 335 bp, Homo sapiens
tcatcgtttctgtctctctttgctacattctggaaactttcctcaatctctttttcattcagttattttctctttagctttgtcttacctgatgtttgtcctcacctttgagtttttaattccaatgactatatttttcatttgtgtttccatttgctactcttcaaatccaccttttcatcgtgttctattattttgttagaactttaattattttatgtttaatcatttttaacttattttgtagtgtctcccaaattattgtagtaagttcaggggtggaaattctgtttcagaacatactaatctttacaatggtggctgtatgcgtatgt

SEQ ID NO: 341243 - DNA, 184 bp, Homo sapiens
aggaaggcacttaatagggaaaactgacacaaaaagtaacggggaaaaaaagactacggggggaaggaaacttcaaaaataataatcattaatatcctagagagaacagaggtccttaaaagaagagcaggatattattttttaaagaggacaacaccaacaaaaaggcagtggcagtgcaaga

SEQ ID NO: 341244 - DNA, 415 bp, Homo sapiens
ctgaccgcccttgatttttaaaaatttaatgcagcagacatactgagcatatgctgtgtgtaaaacattttacctggcgctggcccacgtgcgtggaagatctataaagtcccgctttttatggagcttatgacattagggagtgagagggagtgcacaagtataaataactaatagacaaaacataacaaatctaggtataaaagtgctatataacaggaagcaaaaaggaaataaggataatagcattcctcctttgtcagctcaaaatttctggttaacctgttgagtaaacttaaatacctgcctttgcagccatagtagaggtcagtacacacacgggtctctcctgttttccctcttctgatttcttttttttttttttttttagtttttattgatcattcttgggtgt

SEQ ID NO: 341245 - DNA, 909 bp, Homo sapiens
aacacaaatagcagagaagaaggggatgcaacctggagcagatcaaatgctgcatcccagtggactaggagatcctcagtgacatgctcttcaagccacactgactcagaatcatccatttttaactctaggacctcaaagcatccttgaaccactttacaataaacagcaagtaatttaggtcatctgagtcaagagaacaatgccatccagggtataccaaaatatcaagccctactgtcaaaaggaccagaaaataaagtacaggtggagaggaagtgatttcacccgctggaaatagaaaaagtagatctgtgtgtcagccaacaactatcacacaatggaacaggatgcttacctctctgctggaggaaaagaagctattctcaagtccttagaataaaaactattgtaatcttactatatctattttatgtcatctgagagcaatccatgaggacaatgcttcctctttcagagaatcttccaactgaaaatctcaaagaattcccaagcaccacttgcccttcaacacctacctacacctcacttctctgccccacactcacaaactttattagcatccacaattaaagaaccatgaggccaggcgcggtagctcatgtctgtaatcgcagcactctgggaggccaaggtagaagaatcacttgagcccagagggttgagaccagcctgggcaacatagggagaccttgtctgtacaaaaaaaaaaaattctcggccaggcacggtggctcacacatgcaatcccagcactttcagagcccaaggcaggcggatcacaagctcaagagatcaagaccattctggccaacatggtgaaaccccgtctctactaaaaatacaaaaattagctgggcatggtggcacacacctgttgtcccagct

SEQ ID NO: 341246 - DNA, 562 bp, Homo sapiens
tcagtcgacgcaaacagtcacagctacgatgtggagatgcaagtccagaatgattcctatgtcatcaactccgaacgtctaggaccaaaggagagcaggccccagtgctgtgcgtcctacgagcaccacctgctgtctcacctcttccaggaagcccaccctgatccctctagtcccagcctcagacactgaagcaacatcaggcggatgtcacccaccccttgggacttcgccatgggtcgctagcccagaccctccccttggttccggtggttccatttctgcccctttgctgctggcccccttctgaggatgcccgtgcatctccaggaccactgctccagtccttggtgtagatcaaagctggccttcacacgcggcctgaaaatgtagagtggccgccttctgggctgggctgccacctccaccacatcacccgtgacagaagccccgtgtttttcggtaaccacgttccacgaacacctcccgactgccttccagaacacacaaagatcaacgaagctcagaatccagtcccgacgtcatttcatgaagagcaggt

SEQ ID NO: 341247 - DNA, 612 bp, Homo sapiens
cccgcccgagcccggagagcctgggctgcaggggagggcgccacaggtgaggacacagctccgtgggcaccaggcaaggtcccaaagcagatccgcagccggtcagaggagcgcacatggctccacgagatgtgactattcctatctgctggagaacagccgtccagggccaccccacgtccttcaaggggactctgagacactctgggccggtgggaccttcagcagcatctggactttggctgcctcacaggcggatgtcacccaccccttgggacttcgccatgggtcgctagcccagaccctccccttggttccggtggttccatttctgcccctttgctgctggcccccttctgaggatgcccgtgcatctccaggaccactgctccagtccttggtgtagatcaaagctggccttcacacgcggcctgaaaatgtagagtggccgccttctgggctgggctgccacctccaccacatcacccgtgacagaagccccgtgtttttcggtaaccacgttccacgaacacctcccgactgccttccagaacacacaaagatcaacgaagctcagaatccagtcccgacgtcatttcatgaagagcaggt

SEQ ID NO: 341248 - DNA, 1397 bp, Homo sapiens
tcaggcgaccggatgtaccagtggtggaagatcctgtccggctgcaccgaggctcacatcagaagccggcttcggtttcaccacaaaataaggcatctagcgcccgattctgcctccaaagcagccctgggtcacactcgctgtaggacagatgttattcttcagaatcacgccctctggcaaatgcccatcgtcggacaaatggacggatgaagtgtgactcagccatgagaagggggatgctctgagccgcgcggccacaccaccaacccggaggacacggtgctgcgaggaaaagccagccaggagttcagaagtaacagggcaaatagggaaagtccttcctggcctgtctacatacccctgcagccctcccggtcctagggtgactgctgacggagagggcactcccttcccgagtcttctctgcacgtccgtgggcacgcacagctgagcggcacacagcagcccggctcgctcctccgcactggggacacaagatttcactgcacctcacccagccctttccacagagcagttcatcttggagactcttcccctcgaagggtctaaaggccagtctccgtgtcctggtgtttgttgtcggggaggatgcaacatcgggggaaggaagtaatcatgtctggtggcagctggcactggcaggcagcgggcactcgaagcctgcacctcgcacctgtccctctggggcctcggctatccctccgcacgacgggcatgaagccccctcctgcctccactgctcggatgaaaggagctcgtagatgacggagttgatgacataggaatcattctggacttgcatctccacatcgtagctgtgactgtttgccacagcgaggaagatcctctccccgatctggaagacctcccagtctgcagcaccgaacgtctaggaccaaaggagagcaggccccagtgctgtgcgtcctacgagcaccacctgctgtctcacctcttccaggaagcccaccctgatccctctagtcccagcctcagacactgaagcaacatcaggcggatgtcacccaccccttgggacttcgccatgggtcgctagcccagaccctccccttggttccggtggttccatttctgcccctttgctgctggcccccttctgaggatgcccgtgcatctccaggaccactgctccagtccttggtgtagatcaaagctggccttcacacgcggcctgaaaatgtagagtggccgccttctgggctgggctgccacctccaccacatcacccgtgacagaagccccgtgtttttcggtaaccacgttccacgaacacctcccgactgccttccagaacacacaaagatcaacgaagctcagaatccagtcccgacgtcatttcatgaagagcaggt

SEQ ID NO: 341249 - DNA, 388 bp, Homo sapiens
aaacagtaaacaaattaagacatctctaggacctaaaaggatttcaacacaatgtgagaaatgttggcaaaacatgaaagtgggctttgtgagttttgaggaattactgagttttgaaagatgaggctcaggccaggtggagaggaagcccgtccatgtgtgcgtggtcccagcgccttcccagggccctcctaaggcaccttcagggcctgggccatgatggcgcccccagcagccaggtccccgttcccggagttctggttctgctttgggagctgcagccgtgcttccttctgtctgctgtggtcctgctctagcccctgctcttctctgatgtttctttcaggcggatgtcacccaccccttgggacttcgccatgggtcgcta

SEQ ID NO: 341250 - DNA, 356 bp, Homo sapiens
cacacgcggcctgaaaatgtagagtggccgccttctgggctgggctgccacctccaccacatcacccgtgacagaagccccgtgtttttcggtaaccacgttccacgaacacctcccgactgccttccagaacacacaaagatcaacgaagctcagaatccagtcccgacgtcatttcatgaagagcaggtagtccatcaaagggatgggccccatgagtgaagggctgagaccccaccatggtgtgaggcgtcccaggcactcccgtcacggcccaaaccaggctgcaggctccatccccatggggcaggcacagaggaggcgattcatgtggacacagggacacctgtggacgc

SEQ ID NO: 341251 - DNA, 284 bp, Homo sapiens
cacagaccggaattccaccccagaggacgccccacactggtcaggatggttgtggattctcagtgcccactgtccaaaatgtggtgcccacgcaacctcctgtggctccacggagcgtgtcggtctggaaccatcactttctcgtacatacagacccaccctccatgttccctggatctcacatctgtctcaacaggccagtctccgtgtcctggtgtttgttgtcggggaggatgcaacatcgggggaaggaagtaatcatgtctggtggcagctggcactgg

SEQ ID NO: 341252 - DNA, 498 bp, Homo sapiens
ctctcatgcgatcctggtatcctaagtgccccatcagagttagctgtgctgccgctgccactcctgctataccaaagacctaaccagtcctgtggaaatgcagatgagagagaatacctgtgttcagggaagtggttggagtttatccttgaagaatcaccaggtgacagcctccctggcatgggggacagtgtaggcaacagcacagaagtggagtgtagcagatgccaggaatctgagccaggcttcaagctggagatggatgaaggggtgatgggagacagagcccaacagcaagagggaaggagatggcaaagcacctgtgcatgttggggtgcagaggggccagctgggctcccacctgaggtgtgctgtggcaagaccactcgatgggggcagtgacccacagaagctgcccgattctgctctggagtccgagtccctggcttagattcttggtctctttttccatctgtctgtccatctctctgttcctgc

SEQ ID NO: 341253 - DNA, 289 bp, Homo sapiens
tctctattctttcctctatgttgtttcacattataattcatttcttggttagctgcagtactattttaagcagttctttgttaaaaggaaaggtatatcaatggtaaagtttgtgagattttgcaatgttagagaatgtgtttatgcttttttttttttttttgctcatgcatccaatcattctacaaatacagtcatgcatcgcttaacaacaggaacacattctgagaaatgcaaccttaagcaatttaatcactctgtgaacacagagtatacttacacacaaatt

SEQ ID NO: 341254 - DNA, 549 bp, Homo sapiens
actcaaaagcacagacagaaaagatttgctaaccaccaatatttattttgcttaaccatacctgccaacctagccaaaatattctttggatataatcgttgttcttcatcattgtctgtaaattaaaagactaatctcaggaaatctataaacttagatatcagaaacatagtcaccggtaaattttaaatcaggataccagtatgttaaacctttaactcaatctcatcaaggtaatttttaagttatagtaaaaagacactgctagcctcatttaccaatcagtgactaaaatttatctggtttttttttttatttttaatttggtatccggaagaacttacatacccaaatagagtacaaagtaattaactttcaggtgcccaccacaagcttcaaaaattactaacatttggctatccttaacagttaatttcaaggtggacaatacagagaacttatgaaaataagtaacaggtgagtgtatctcaaatttgacgtccacgcttctacaattttcctcttgccagcgtgtccctttcatgtggt

SEQ ID NO: 341255 - DNA, 203 bp, Homo sapiens
gctccactcttcccctctcacttgcctctgcctccatccccccttaagcttgaagggctcagagtactccttagccctgctggccaacacttgagtctctgacttaggccacagatgttacaatgcttacagtggccgtttacaacagttaacaaagcaggctttagaaccaagtccagccttgggcatgccggacctttacc

SEQ ID NO: 341256 - DNA, 300 bp, Homo sapiens
acctgtaggaaatttgtatgtcttcttttgagaaatgtatattcatattttttgcccatttttaatgagattattttttgtatttgttgaattgagtttcttgtagattctggatattagtctcctcctgttggatgaatagtttgcaaaaatgttctctcactatgcaggttttctattcaccctattgatcatctgttatactgtgcagaagttttttagtttaatttagtttaattataacccatttgtctttatttatttatttatttatttatttttttatacagagtctcactc

SEQ ID NO: 341257 - DNA, 1471 bp, Homo sapiens
accctcacctcgtgtcactcacacataactggatttttctattttttcaaaaatcattgggatgttgacaggggttgcactgaatctgtagaatactttggtagtactgacatctcacctaaattaagtcttccaatccatgaacatgagaaatctttccagttgtttatatattctttaatttctttcagtaatattttgtagttttcagtttacaaatcttctctttggttaagacaactcctaagtattttactctttttgatgctattgtaaatggaattactggccaggtgcggtggctcacacctgtaatcccagcactttgggaggccgaggcaggtggatcacgaggtcaggagttcaagaccaaactggccaacatggtgaaactctgtcgctactaaaaatacaaaaattagctcggcatagtggcatgagccgataatcccagctactcgagaggctgaggcaggagaatcgctcaaacccaggaggcagaggttgcagtgagccgagatcgtgccactgcactccagcctgggcgatagagcgagactctgtctcaaaaaattccagatcagaactctaggagaaaatgaatttcccaccacctgtctatcaatcaaatacttactgaatgactatcatattgccaacactatgctaggcactaaagatacaaagatcaaaatactgaatccctaccttcaaagagctcatcatctaaggtggtaacatgcaacacatggggcattagggaatatgtactgtgctccaggtcagggttaaggtagtaaggaagacatcaggaaaggaagcagtaaccactgagttgaatcttaaaggatgaataggaggtagaggttataatgtgttgggcactgtgctaagtgttcaagctacaaagattaatcagaggaagtctctgcacatagttctgtaagggaaaaagccacataaaaaaacattttcaaaacaatgagattaaaagttttaagacagacatgttataaaaatagaggagaacaagctcagtagggaaggggaatagagcaaaggaaaagctacacaaagaaactcatgtctgaactgaatcatgaaggataagcagatattcaataggtgggcaacgcagggaggagggcattctaggcagggagaatagtatgagcattggaacaaaggtaccaagtgtgacttgagagagcccaatgtgattaggaacttgcatgtggcttagtttcactgaaatgtaggctatgaaacaaaaaagaggttagaagggaaataaagtaagaaaagtaaaaagaaatgttatgaactaaatcatgaagatactggtattctcatatggttactaaacctttatatttcttttttttctaaaaaaaaacttggctcaagtgttaaaaattttcttgttcatttatacttgattaaataaatatagtaacatttgtcattgcaa

SEQ ID NO: 341258 - DNA, 560 bp, Homo sapiens
aaaggcagaataagctctggtggcttaataaagattctggatttttttctaagtgccaaagaaaatctttaaagaatatttaaaagaatgacacagatttatgtcttttcctctgagcagaaagtggtaagatttgctcaaaagcaaggggtgggggataagcaactagatacagacagtgccattaactaacatgacagagtgaggaaaaacattttgtggcagtgttgtttaggggggaattcagaagcttttgggcatgatacttttgggatgcctgtgagacagccaagaggtacgttgagtagcagctggatgtcagtcaggggctggtagttaggaatattgatcaagttatttaaacttacctagaatgtttataaaatacaaatcaataggccacactccagatctaccgaataagaaagggcttgcacatcattaacattgtcaagtgattctgatgtcaactggaggagtctgggaaccacttacgtaataaattttaacgttcttttttttcttttttctttttttttttgagacagagtctcgctctg

SEQ ID NO: 341259 - DNA, 132 bp, Homo sapiens
tctcaacaacaacaacaacaaaaaaaaaaaaaaaaagaagaaaaagaataacatttttagagcatttgctgtatgccaagaactgctgtaaatgctaccatgtcttaattcattcagttctttgccactcca

SEQ ID NO: 341260 - DNA, 329 bp, Homo sapiens
acattcaatctaggagccaaatctagaatacaaccccatttacaatagccacaaaaaagtacctaagattatatctaaccaaggaagtaaaagatctctacaaggagaaacacaaaacactgctaaaagaaatcacagataacacaaacaaattgaaaaatattttatgttcattcactggaagaatcaatatcatgaatatcatcatactgcccaccaccaatgtcattctttacagtattggaaataactattctaaaattcatatggaaacaaaaaagagcctgagtggccaaagcaatcctaagcaaaaagaacaaagttggagg

SEQ ID NO: 341261 - DNA, 300 bp, Homo sapiens
agccaggctggtctcgaactcctggcctcaagtgatccacctgcctccgtctcccaaagtgctggaattacaggtgtgagccactgcacctggcccccattggactttttctctaactgatttgtacttgtatcaagttctggtgagtccgtgagataatatggccattctatccctgtggacactgaagctcagagaggttgtgtcccttgctcagcatcactcagttgtaagtgctaggactgggatccagagccctcacttttttgtttttggttttttgcttttttgagtcagggt

SEQ ID NO: 341262 - DNA, 816 bp, Homo sapiens
  misc_feature (737)..(737): n is a, c, g, or t
  misc_feature (759)..(759): n is a, c, g, or t
  misc_feature (792)..(792): n is a, c, g, or t
gccacgtgtccggctcggagcccacggctgtcctcccggtccgccgcgcgctgcggttgctgctgggctaacgggctccgatccagcgagcgctgcgtcctcgagtccctgcgcccgtgcgtccgtctgcgacccgaggcctccgctgcgcgtggattctgctgcgaaccggagaccatggccaaaccagcacagggtgccaagtaccggggctccatccatgacttcccaggctttgaccccaaccaggatgccgaggctctgtacactgccatgaagggctttggcagtgacaaggaggccatactggacataatcacctcacggagcaacaggcagaggcaggaggtctgccagagctacaagtccctctacggcaaggacctcattgctgatttaaagtatgaattgacgggcaagtttgaacggttgattgtgggcctgatgaggccacctgcctattgtgatgccaaagaaattaaagatgccatctcgggcattggcactgatgagaagtgcctcattgagatcttggcttcccggaccaatgagcagatgcaccagctggtggcagcatacaaagatgcctacgagcgggacctggaggctgacatcatcggcgacacctctggccacttccagaagatgcttgtggtcctgctccagggaaccagggaggaggatgacgtagtgagcgaggacctggtacaacaggatgtccagacctattaccgaanggccaaggggggggaaaaaaanccttggggaaaaaaaaaaatttggggggggggnggggggaaaaaaaccccaaagggg

SEQ ID NO: 341263 - DNA, 502 bp, Homo sapiens
gatagagcaattctaaataaatatgcacccaaagctaggccacccagattcattaagcagattcctgctatacttaagaaaccagatagtaatacaataatagtggataggggacttcagccccccgctgacagcgctaaatgggtcatcaagacagagagtctgcaaagaacgactgggctttaggtggactttagaaatcttcccatccatttcaccacccatctccatccaggccgcgctagagtactggaccaggaatttggatgcctgggttcaaatctgcatctgccatgcacttgtttctgaccttaggccagcccctttccctccctgagtctctattttcttatctacaatgagacagttggacaaaaaaatcttggcttcccttctaacattaacttcctaaagtatgcctccgattcattcccttgacactttttatttctaaggaagaaataaaaagagatacacaaacacataaacacaaaaaaaatga

SEQ ID NO: 341264 - DNA, 2951 bp, Homo sapiens
gccacgtgtccggctcggagcccacggctgtcctcccggtccgccgcgcgctgcggttgctgctgggctaacgggctccgatccagcgagcgctgcgtcctcgagtccctgcgcccgtgcgtccgtctgcgacccgaggcctccgctgcgcgtggattctgctgcgaaccggagaccatggccaaaccagcacagggtgccaagtaccggggctccatccatgacttcccaggctttgaccccaaccaggatgccgaggctctgtacactgccatgaagggctttggcagtgacaaggaggccatactggacataatcacctcacggagcaacaggcagaggcaggaggtctgccagagctacaagtccctctacggcaaggacctcattgctgatttaaagtatgaattgacgggcaagtttgaacggttgattgtgggcctgatgaggccacctgcctattgtgatgccaaagaaattaaagatgccatctcgggcattggcactgatgagaagtgcctcattgagatcttggcttcccggaccaatgagcagatgcaccagctggtggcagcatacaaagatgcctacgagcgggacctggaggctgacatcatcggcgacacctctggccacttccagaagatgcttgtggtcctgctccagggaaccagggaggaggatgacgtagtgagcgaggacctggtacaacaggatgtccaggacctatacgaggcaggggaactgaaatggggaacagatgaagcccagttcatttacatcttgggaaatcgcagcaagcagcatcttcggttggtgttcgatgagtatctgaagaccacagggaagccgattgaagccagcatccgaggggagctgtctggggactttgagaagctaatgctggccgtagtgaagtgtatccggagcaccccggaatattttgctgaaaggctcttcaaggctatgaagggcctggggactcgggacaacaccctgatccgcatcatggtctcccgtagtgagttggacatgctcgacattcgggagatcttccggaccaagtatgagaagtccctctacagcatgatcaagaatgacacctctggcgagtacaagaagactctgctgaagctgtctgggggagatgatgatgctgctggccagttcttcccggaggcagcgcaggtggcctatcagatgtgggaacttagtgcagtggcccgagtagagctgaagggaactgtgcgcccagccaatgacttcaaccctgacgcagatgccaaagcgctgcggaaagccatgaagggactcgggactgacgaagacacaatcatcgatatcatcacgcaccgcagcaatgtccagcggcagcagatccggcagaccttcaagtctcactttggccgggacttaatgactgacctgaagtctgagatctctggagacctggcaaggctgattctggggctcatgatgccaccggcccattacgatgccaagcagttgaagaaggccatggagggagccggcacagatgaaaaggctcttattgaaatcctggccactcggaccaatgctgaaatccgggccatcaatgaggcctataaggaggactatcacaagtccctggaggatgctctgagctcagacacatctggccacttcaggaggatcctcatttctctggccacggggcatcgtgaggagggaggagaaaacctggaccaggcacgggaagatgcccaggtggctgctgagatcttggaaatagcagacacacccagtggagacaaaacttccttggagacacgtttcatgacgatcctgtgtacccggagctatccgcacctccggagagtcttccaggagttcatcaagatgaccaactatgacgtggagcacaccatcaagaaggagatgtctggggatgtcagggatgcatttgtggccattgttcaaagtgtcaagaacaagcctctcttctttgccgacaaactttacaaatccatgaagggtgctggcacagatgagaagactctgaccaggatcatggtatcccgcagtgagattgacctgctcaacatccggagggaattcattgagaaatatgacaagtctctccaccaagccattgagggtgacacctccggagacttcctgaaggccttgctggctctctgtggtggtgaggactagggccacagctttggcgggcacttctgccaagaaatggttatcagcaccagccgccatggccaagcctgattgttccagctccagagactaaggaaggggcaggggtggggggaggggttgggttgggctcttatcttcagtggagcttaggaaacgctcccactcccacgggccatcgagggcccagcacggctgagcggctgaaaaaccgtagccatagatcctgtccacctccactcccctctgaccctcaggctttcccagcttcctccccttgctacagcctctgccctggtttgggctatgtcagatccaaaaacatcctgaacctctgtctgtaaaatgagtagtgtctgtactttgaatgagggggttggtggcaggggccagttgaatgtgctgggcggggtggtgggaaggatagtaaatgtgctggggcaaactgacaaatcttcccatccatttcaccacccatctccatccaggccgcgctagagtactggaccaggaatttggatgcctgggttcaaatctgcatctgccatgcacttgtttctgaccttaggccagcccctttccctccctgagtctctattttcttatctacaatgagacagttggacaaaaaaatcttggcttcccttctaacattaacttcctaaagtatgcctccgattcattcccttgacactttttatttctaaggaagaaataaaaagagatacacaaacacataaacacaaaaaaaatga

SEQ ID NO: 341265 - DNA, 2792 bp, Homo sapiens
ccgaggctctgtacactgccatgaagggctttggcagtgacaaggaggccatactggacataatcacctcacggagcaacaggcagaggggatgccgaggctctgtacactgccatgaagggctttggcagtgacaaggaggccatactggacataatcacctcacggagcaacaggcagaggcaggaggtctgccagagctacaagtccctctacggcaaggacctcattgctgatttaaagtatgaattgacgggcaagtttgaacggttgattgtgggcctgatgaggccacctgcctattgtgatgccaaagaaattaaagatgccatctcgggcattggcactgatgagaagtgcctcattgagatcttggcttcccggaccaatgagcagatgcaccagctggtggcagcatacaaagatgcctacgagcgggacctggaggctgacatcatcggcgacacctctggccacttccagaagatgcttgtggtcctgctccagggaaccagggaggaggatgacgtagtgagcgaggacctggtacaacaggatgtccaggacctatacgaggcaggggaactgaaatggggaacagatgaagcccagttcatttacatcttgggaaatcgcagcaagcagcatcttcggttggtgttcgatgagtatctgaagaccacagggaagccgattgaagccagcatccgaggggagctgtctggggactttgagaagctaatgctggccgtagtgaagtgtatccggagcaccccggaatattttgctgaaaggctcttcaaggctatgaagggcctggggactcgggacaacaccctgatccgcatcatggtctcccgtagtgagttggacatgctcgacattcgggagatcttccggaccaagtatgagaagtccctctacagcatgatcaagaatgacacctctggcgagtacaagaagactctgctgaagctgtctgggggagatgatgatgctgctggccagttcttcccggaggcagcgcaggtggcctatcagatgtgggaacttagtgcagtggcccgagtagagctgaagggaactgtgcgcccagccaatgacttcaaccctgacgcagatgccaaagcgctgcggaaagccatgaagggactcgggactgacgaagacacaatcatcgatatcatcacgcaccgcagcaatgtccagcggcagcagatccggcagaccttcaagtctcactttggccgggacttaatgactgacctgaagtctgagatctctggagacctggcaaggctgattctggggctcatgatgccaccggcccattacgatgccaagcagttgaagaaggccatggagggagccggcacagatgaaaaggctcttattgaaatcctggccactcggaccaatgctgaaatccgggccatcaatgaggcctataaggaggactatcacaagtccctggaggatgctctgagctcagacacatctggccacttcaggaggatcctcatttctctggccacggggcatcgtgaggagggaggagaaaacctggaccaggcacgggaagatgcccaggtggctgctgagatcttggaaatagcagacacacccagtggagacaaaacttccttggagacacgtttcatgacgatcctgtgtacccggagctatccgcacctccggagagtcttccaggagttcatcaagatgaccaactatgacgtggagcacaccatcaagaaggagatgtctggggatgtcagggatgcatttgtggccattgttcaaagtgtcaagaacaagcctctcttctttgccgacaaactttacaaatccatgaagggtgctggcacagatgagaagactctgaccaggatcatggtatcccgcagtgagattgacctgctcaacatccggagggaattcattgagaaatatgacaagtctctccaccaagccattgagggtgacacctccggagacttcctgaaggccttgctggctctctgtggtggtgaggactagggccacagctttggcgggcacttctgccaagaaatggttatcagcaccagccgccatggccaagcctgattgttccagctccagagactaaggaaggggcaggggtggggggaggggttgggttgggctcttatcttcagtggagcttaggaaacgctcccactcccacgggccatcgagggcccagcacggctgagcggctgaaaaaccgtagccatagatcctgtccacctccactcccctctgaccctcaggctttcccagcttcctccccttgctacagcctctgccctggtttgggctatgtcagatccaaaaacatcctgaacctctgtctgtaaaatgagtagtgtctgtactttgaatgagggggttggtggcaggggccagttgaatgtgctgggcggggtggtgggaaggatagtaaatgtgctggggcaaactgacaaatcttcccatccatttcaccacccatctccatccaggccgcgctagagtactggaccaggaatttggatgcctgggttcaaatctgcatctgccatgcacttgtttctgaccttaggccagcccctttccctccctgagtctctattttcttatctacaatgagacagttggacaaaaaaatcttggcttcccttctaacattaacttcctaaagtatgcctccgattcattcccttgacactttttatttctaaggaagaaataaaaagagatacacaaacacataaacacaaaaaaaatga

SEQ ID NO: 341266 - DNA, 2684 bp, Homo sapiens
ttgctctcccctattccaggcagtgacaaggaggccatactggacataatcacctcacggagcaacaggcagaggcaggaggtctgccagagctacaagtccctctacggcaaggacctcattgctgatttaaagtatgaattgacgggcaagtttgaacggttgattgtgggcctgatgaggccacctgcctattgtgatgccaaagaaattaaagatgccatctcgggcattggcactgatgagaagtgcctcattgagatcttggcttcccggaccaatgagcagatgcaccagctggtggcagcatacaaagatgcctacgagcgggacctggaggctgacatcatcggcgacacctctggccacttccagaagatgcttgtggtcctgctccagggaaccagggaggaggatgacgtagtgagcgaggacctggtacaacaggatgtccaggacctatacgaggcaggggaactgaaatggggaacagatgaagcccagttcatttacatcttgggaaatcgcagcaagcagcatcttcggttggtgttcgatgagtatctgaagaccacagggaagccgattgaagccagcatccgaggggagctgtctggggactttgagaagctaatgctggccgtagtgaagtgtatccggagcaccccggaatattttgctgaaaggctcttcaaggctatgaagggcctggggactcgggacaacaccctgatccgcatcatggtctcccgtagtgagttggacatgctcgacattcgggagatcttccggaccaagtatgagaagtccctctacagcatgatcaagaatgacacctctggcgagtacaagaagactctgctgaagctgtctgggggagatgatgatgctgctggccagttcttcccggaggcagcgcaggtggcctatcagatgtgggaacttagtgcagtggcccgagtagagctgaagggaactgtgcgcccagccaatgacttcaaccctgacgcagatgccaaagcgctgcggaaagccatgaagggactcgggactgacgaagacacaatcatcgatatcatcacgcaccgcagcaatgtccagcggcagcagatccggcagaccttcaagtctcactttggccgggacttaatgactgacctgaagtctgagatctctggagacctggcaaggctgattctggggctcatgatgccaccggcccattacgatgccaagcagttgaagaaggccatggagggagccggcacagatgaaaaggctcttattgaaatcctggccactcggaccaatgctgaaatccgggccatcaatgaggcctataaggaggactatcacaagtccctggaggatgctctgagctcagacacatctggccacttcaggaggatcctcatttctctggccacggggcatcgtgaggagggaggagaaaacctggaccaggcacgggaagatgcccaggtggctgctgagatcttggaaatagcagacacacccagtggagacaaaacttccttggagacacgtttcatgacgatcctgtgtacccggagctatccgcacctccggagagtcttccaggagttcatcaagatgaccaactatgacgtggagcacaccatcaagaaggagatgtctggggatgtcagggatgcatttgtggccattgttcaaagtgtcaagaacaagcctctcttctttgccgacaaactttacaaatccatgaagggtgctggcacagatgagaagactctgaccaggatcatggtatcccgcagtgagattgacctgctcaacatccggagggaattcattgagaaatatgacaagtctctccaccaagccattgagggtgacacctccggagacttcctgaaggccttgctggctctctgtggtggtgaggactagggccacagctttggcgggcacttctgccaagaaatggttatcagcaccagccgccatggccaagcctgattgttccagctccagagactaaggaaggggcaggggtggggggaggggttgggttgggctcttatcttcagtggagcttaggaaacgctcccactcccacgggccatcgagggcccagcacggctgagcggctgaaaaaccgtagccatagatcctgtccacctccactcccctctgaccctcaggctttcccagcttcctccccttgctacagcctctgccctggtttgggctatgtcagatccaaaaacatcctgaacctctgtctgtaaaatgagtagtgtctgtactttgaatgagggggttggtggcaggggccagttgaatgtgctgggcggggtggtgggaaggatagtaaatgtgctggggcaaactgacaaatcttcccatccatttcaccacccatctccatccaggccgcgctagagtactggaccaggaatttggatgcctgggttcaaatctgcatctgccatgcacttgtttctgaccttaggccagcccctttccctccctgagtctctattttcttatctacaatgagacagttggacaaaaaaatcttggcttcccttctaacattaacttcctaaagtatgcctccgattcattcccttgacactttttatttctaaggaagaaataaaaagagatacacaaacacataaacacaaaaaaaatga

SEQ ID NO: 341267 - DNA, 2845 bp, Homo sapiens
gccacgtgtccggctcggagcccacggctgtcctcccggtccgccgcgcgctgcggttgctgctgggctaacgggctccgatccagcgagcgctgcgtcctcgagtccctgcgcccgtgcgtccgtctgcgacccgaggcctccgctgcgcgtggattctgctgcgaaccggagaccatggccaaaccagcacagggtgccaagtaccggggctccatccatgacttcccaggctttgaccccaaccaggatgccgaggctctgtacactgccatgaagggctttggcagtgacaaggaggccatactggacataatcacctcacggagcaacaggcagaggcaggaggtctgccagagctacaagtccctctacggcaaggacctcattgctgatttaaagtatgaattgacgggcaagtttgaacggttgattgtgggcctgatgaggccacctgcctattgtgatgccaaagaaattaaagatgccatctcgggcattggcactgatgagaagtgcctcattgagatcttggcttcccggaccaatgagcagatgcaccagctggtggcagcatacaaagatgcctacgagcgggacctggaggctgacatcatcggcgacacctctggccacttccagaagatgcttgtggtcctgctccagggaaccagggaggaggatgacgtagtgagcgaggacctggtacaacaggatgtccaggacctatacgaggcaggggaactgaaatggggaacagatgaagcccagttcatttacatcttgggaaatcgcagcaagcagcatcttcggttggtgttcgatgagtatctgaagaccacagggaagccgattgaagccagcatccgaggggagctgtctggggactttgagaagctaatgctggccgtagtgaagtgtatccggagcaccccggaatattttgctgaaaggctcttcaaggctatgaagggcctggggactcgggacaacaccctgatccgcatcatggtctcccgtagtgagttggacatgctcgacattcgggagatcttccggaccaagtatgagaagtccctctacagcatgatcaagaatgacacctctggcgagtacaagaagactctgctgaagctgtctgggggagatgatgatgctgctggccagttcttcccggaggcagcgcaggtggcctatcagatgtgggaacttagtgcagtggcccgagtagagctgaagggaactgtgcgcccagccaatgacttcaaccctgacgcagatgccaaagcgctgcggaaagccatgaagggactcgggactgacgaagacacaatcatcgatatcatcacgcaccgcagcaatgtccagcggcagcagatccggcagaccttcaagtctcactttggccgggacttaatgactgacctgaagtctgagatctctggagacctggcaaggctgattctggggctcatgatgccaccggcccattacgatgccaagcagttgaagaaggccatggagggagccggcacagatgaaaaggctcttattgaaatcctggccactcggaccaatgctgaaatccgggccatcaatgaggcctataaggaggactatcacaagtccctggaggatgctctgagctcagacacatctggccacttcaggaggatcctcatttctctggccacggggcatcgtgaggagggaggagaaaacctggaccaggcacgggaagatgcccaggtggctgctgagatcttggaaatagcagacacacccagtggagacaaaacttccttggagacacgtttcatgacgatcctgtgtacccggagctatccgcacctccggagagtcttccaggagttcatcaagatgaccaactatgacgtggagcacaccatcaagaaggagatgtctggggatgtcagggatgcatttgtggccattgttcaaagtgtcaagaacaagcctctcttctttgccgacaaactttacaaatccatgaagggtgctggcacagatgagaagactctgaccaggatcatggtatcccgcagtgagggtgacacctccggagacttcctgaaggccttgctggctctctgtggtggtgaggactagggccacagctttggcgggcacttctgccaagattgttccagctccagagactaaggaaggggcaggggtggggggaggggttgggttgggctcttatcttcagtggagcttaggaaacgctcccactcccacgggccatcgagggcccagcacggctgagcggctgaaaaaccgtagccatagatcctgtccacctccactcccctctgaccctcaggctttcccagcttcctccccttgctacagcctctgccctggtttgggctatgtcagatccaaaaacatcctgaacctctgtctgtaaaatgagtagtgtctgtactttgaatgagggggttggtggcaggggccagttgaatgtgctgggcggggtggtgggaaggatagtaaatgtgctggggcaaactgacaaatcttcccatccatttcaccacccatctccatccaggccgcgctagagtactggaccaggaatttggatgcctgggttcaaatctgcatctgccatgcacttgtttctgaccttaggccagcccctttccctccctgagtctctattttcttatctacaatgagacagttggacaaaaaaatcttggcttcccttctaacattaacttcctaaagtatgcctccgattcattcccttgacactttttatttctaaggaagaaataaaaagagatacacaaacacataaacacaaaaaaaatga

SEQ ID NO: 341268 - DNA, 2906 bp, Homo sapiens
gccacgtgtccggctcggagcccacggctgtcctcccggtccgccgcgcgctgcggttgctgctgggctaacgggctccgatccagcgagcgctgcgtcctcgagtccctgcgcccgtgcgtccgtctgcgacccgaggcctccgctgcgcgtggattctgctgcgaaccggagaccatggccaaaccagcacagggtgccaagtaccggggctccatccatgacttcccaggctttgaccccaaccaggatgccgaggctctgtacactgccatgaagggctttggcagtgacaaggaggccatactggacataatcacctcacggagcaacaggcagaggcaggaggtctgccagagctacaagtccctctacggcaaggacctcattgctgatttaaagtatgaattgacgggcaagtttgaacggttgattgtgggcctgatgaggccacctgcctattgtgatgccaaagaaattaaagatgccatctcgggcattggcactgatgagaagtgcctcattgagatcttggcttcccggaccaatgagcagatgcaccagctggtggcagcatacaaagatgcctacgagcgggacctggaggctgacatcatcggcgacacctctggccacttccagaagatgcttgtggtcctgctccagggaaccagggaggaggatgacgtagtgagcgaggacctggtacaacaggatgtccaggacctatacgaggcaggggaactgaaatggggaacagatgaagcccagttcatttacatcttgggaaatcgcagcaagcagcatcttcggttggtgttcgatgagtatctgaagaccacagggaagccgattgaagccagcatccgaggggagctgtctggggactttgagaagctaatgctggccgtagtgaagtgtatccggagcaccccggaatattttgctgaaaggctcttcaaggctatgaagggcctggggactcgggacaacaccctgatccgcatcatggtctcccgtagtgagttggacatgctcgacattcgggagatcttccggaccaagtatgagaagtccctctacagcatgatcaagaatgacacctctggcgagtacaagaagactctgctgaagctgtctgggggagatgatgatgctgctggccagttcttcccggaggcagcgcaggtggcctatcagatgtgggaacttagtgcagtggcccgagtagagctgaagggaactgtgcgcccagccaatgacttcaaccctgacgcagatgccaaagcgctgcggaaagccatgaagggactcgggactgacgaagacacaatcatcgatatcatcacgcaccgcagcaatgtccagcggcagcagatccggcagaccttcaagtctcactttggccgggacttaatgactgacctgaagtctgagatctctggagacctggcaaggctgattctggggctcatgatgccaccggcccattacgatgccaagcagttgaagaaggccatggagggagccggcacagatgaaaaggctcttattgaaatcctggccactcggaccaatgctgaaatccgggccatcaatgaggcctataaggaggactatcacaagtccctggaggatgctctgagctcagacacatctggccacttcaggaggatcctcatttctctggccacggggcatcgtgaggagggaggagaaaacctggaccaggcacgggaagatgcccaggtggctgctgagatcttggaaatagcagacacacccagtggagacaaaacttccttggagacacgtttcatgacgatcctgtgtacccggagctatccgcacctccggagagtcttccaggagttcatcaagatgaccaactatgacgtggagcacaccatcaagaaggagatgtctggggatgtcagggatgcatttgtggccattgttcaaagtgtcaagaacaagcctctcttctttgccgacaaactttacaaatccatgaagggtgctggcacagatgagaagactctgaccaggatcatggtatcccgcagtgagattgacctgctcaacatccggagggaattcattgagaaatatgacaagtctctccaccaagccattgagggtgacacctccggagacttcctgaaggccttgctggctctctgtggtggtgaggactagggccacagctttggcgggcacttctgccaagaaatggttatcagcaccagccgccatggccaagcctgattgttccagctccagagactaaggaaggggcaggggtggggggaggggttgggttgggctcttatcttcagtggagcttaggaaacgctcccactcccacgggccatcgagggcccagcacggctgagcggctgaaaaaccgtagccatagatcctccccttgctacagcctctgccctggtttgggctatgtcagatccaaaaacatcctgaacctctgtctgtaaaatgagtagtgtctgtactttgaatgagggggttggtggcaggggccagttgaatgtgctgggcggggtggtgggaaggatagtaaatgtgctggggcaaactgacaaatcttcccatccatttcaccacccatctccatccaggccgcgctagagtactggaccaggaatttggatgcctgggttcaaatctgcatctgccatgcacttgtttctgaccttaggccagcccctttccctccctgagtctctattttcttatctacaatgagacagttggacaaaaaaatcttggcttcccttctaacattaacttcctaaagtatgcctccgattcattcccttgacactttttatttctaaggaagaaataaaaagagatacacaaacacataaacacaaaaaaaatga

SEQ ID NO: 341269 - DNA, 2749 bp, Homo sapiens
gccacgtgtccggctcggagcccacggctgtcctcccggtccgccgcgcgctgcggttgctgctgggctaacgggctccgatccagcgagcgctgcgtcctcgagtccctgcgcccgtgcgtccgtctgcgacccgaggcctccgctgcgcgtggattctgctgcgaaccggagaccatggccaaaccagcacagggtgccaagtaccggggctccatccatgacttcccaggctttgaccccaaccaggatgccgaggctctgtacactgccatgaagggctttggcagtgacaaggaggccatactggacataatcacctcacggagcaacaggcagaggcaggaggtctgccagagctacaagtccctctacggcaaggacctcattgctgatttaaagtatgaattgacgggcaagtttgaacggttgattgtgggcctgatgaggccacctgcctattgtgatgccaaagaaattaaagatgccatctcgggcattggcactgatgagaagtgcctcattgagatcttggcttcccggaccaatgagcagatgcaccagctggtggcagcatacaaagatgcctacgagcgggacctggaggctgacatcatcggcgacacctctggccacttccagaagatgcttgtggtcctgctccagggaaccagggaggaggatgacgtagtgagcgaggacctggtacaacaggatgtccaggacctatacgaggcaggggaactgaaatggggaacagatgaagcccagttcatttacatcttgggaaatcgcagcaagcagcatcttcggttggtgttcgatgagtatctgaagaccacagggaagccgattgaagccagcatccgaggggagctgtctggggactttgagaagctaatgctggccgtagtgaagtgtatccggagcaccccggaatattttgctgaaaggctcttcaaggctatgaagggcctggggactcgggacaacaccctgatccgcatcatggtctcccgtagtgagttggacatgctcgacattcgggagatcttccggaccaagtatgagaagtccctctacagcatgatcaagaatgacacctctggcgagtacaagaagactctgctgaagctgtctgggggagatgatgatgctgctggccagttcttcccggaggcagcgcaggtggcctatcagatgtgggaacttagtgcagtggcccgagtagagctgaagggaactgtgcgcccagccaatgacttcaaccctgacgcagatgccaaagcgctgcggaaagccatgaagggactcgggactgacgaagacacaatcatcgatatcatcacgcaccgcagcaatgtccagcggcagcagatccggcagaccttcaagtctcactttggccgggacttaatgactgacctgaagtctgagatctctggagacctggcaaggctgattctggggctcatgatgccaccggcccattacgatgccaagcagttgaagaaggccatggagggagccggcacagatgaaaaggctcttattgaaatcctggccactcggaccaatgctgaaatccgggccatcaatgaggcctataaggaggactatcacaagtccctggaggatgctctgagctcagacacatctggccacttcaggaggatcctcatttctctggccacggggcatcgtgaggagggaggagaaaacctggaccaggcacgggaagatgcccaggtggctgctgagatcttggaaatagcagacacacccagtggagacaaaacttccttggagacacgtttcatgacgatcctgtgtacccggagctatccgcacctccggagagtcttccaggagttcatcaagatgaccaactatgacgtggagcacaccatcaagaaggagatgtctggggatgtcagggatgcatttgtggccattgttcaaagtgtcaagaacaagcctctcttctttgccgacaaactttacaaatccatgaagggtgctggcacagatgagaagactctgaccaggatcatggtatcccgcagtgagattgacctgctcaacatccggagggaattcattgagaaatatgacaagtctctccaccaagccattgagggtgacacctccggagacttcctgaaggccttgctggctctctgtggtggtgaggactagggccacagctttggcgggcacttctgccaagaaatggttatcagcaccagccgccatggccaagcctgccccttgctacagcctctgccctggtttgggctatgtcagatccaaaaacatcctgaacctctgtctgtaaaatgagtagtgtctgtactttgaatgagggggttggtggcaggggccagttgaatgtgctgggcggggtggtgggaaggatagtaaatgtgctggggcaaactgacaaatcttcccatccatttcaccacccatctccatccaggccgcgctagagtactggaccaggaatttggatgcctgggttcaaatctgcatctgccatgcacttgtttctgaccttaggccagcccctttccctccctgagtctctattttcttatctacaatgagacagttggacaaaaaaatcttggcttcccttctaacattaacttcctaaagtatgcctccgattcattcccttgacactttttatttctaaggaagaaataaaaagagatacacaaacacataaacacaaaaaaaatga

SEQ ID NO: 341270 - DNA, 2330 bp, Homo sapiens
gccacgtgtccggctcggagcccacggctgtcctcccggtccgccgcgcgctgcggttgctgctgggctaacgggctccgatccagcgagcgctgcgtcctcgagtccctgcgcccgtgcgtccgtctgcgacccgaggcctccgctgcgcgtggattctgctgcgaaccggagaccatggccaaaccagcacagggtgccaagtaccggggctccatccatgacttcccaggctttgaccccaaccaggatgccgaggctctgtacactgccatgaagggctttggcagtgacaaggaggccatactggacataatcacctcacggagcaacaggcagaggcaggaggtctgccagagctacaagtccctctacggcaaggacctcattgctgatttaaatgagttggacatgctcgacattcgggagatcttccggaccaagtatgagaagtccctctacagcatgatcaagaatgacacctctggcgagtacaagaagactctgctgaagctgtctgggggagatgatgatgctgctggccagttcttcccggaggcagcgcaggtggcctatcagatgtgggaacttagtgcagtggcccgagtagagctgaagggaactgtgcgcccagccaatgacttcaaccctgacgcagatgccaaagcgctgcggaaagccatgaagggactcgggactgacgaagacacaatcatcgatatcatcacgcaccgcagcaatgtccagcggcagcagatccggcagaccttcaagtctcactttggccgggacttaatgactgacctgaagtctgagatctctggagacctggcaaggctgattctggggctcatgatgccaccggcccattacgatgccaagcagttgaagaaggccatggagggagccggcacagatgaaaaggctcttattgaaatcctggccactcggaccaatgctgaaatccgggccatcaatgaggcctataaggaggactatcacaagtccctggaggatgctctgagctcagacacatctggccacttcaggaggatcctcatttctctggccacggggcatcgtgaggagggaggagaaaacctggaccaggcacgggaagatgcccaggtggctgctgagatcttggaaatagcagacacacccagtggagacaaaacttccttggagacacgtttcatgacgatcctgtgtacccggagctatccgcacctccggagagtcttccaggagttcatcaagatgaccaactatgacgtggagcacaccatcaagaaggagatgtctggggatgtcagggatgcatttgtggccattgttcaaagtgtcaagaacaagcctctcttctttgccgacaaactttacaaatccatgaagggtgctggcacagatgagaagactctgaccaggatcatggtatcccgcagtgagattgacctgctcaacatccggagggaattcattgagaaatatgacaagtctctccaccaagccattgagggtgacacctccggagacttcctgaaggccttgctggctctctgtggtggtgaggactagggccacagctttggcgggcacttctgccaagaaatggttatcagcaccagccgccatggccaagcctgattgttccagctccagagactaaggaaggggcaggggtggggggaggggttgggttgggctcttatcttcagtggagcttaggaaacgctcccactcccacgggccatcgagggcccagcacggctgagcggctgaaaaaccgtagccatagatcctgtccacctccactcccctctgaccctcaggctttcccagcttcctccccttgctacagcctctgccctggtttgggctatgtcagatccaaaaacatcctgaacctctgtctgtaaaatgagtagtgtctgtactttgaatgagggggttggtggcaggggccagttgaatgtgctgggcggggtggtgggaaggatagtaaatgtgctggggcaaactgacaaatcttcccatccatttcaccacccatctccatccaggccgcgctagagtactggaccaggaatttggatgcctgggttcaaatctgcatctgccatgcacttgtttctgaccttaggccagcccctttccctccctgagtctctattttcttatctacaatgagacagttggacaaaaaaatcttggcttcccttctaacattaacttcctaaagtatgcctccgattcattcccttgacactttttatttctaaggaagaaataaaaagagatacacaaacacataaacacaaaaaaaatga

SEQ ID NO: 341271 - DNA, 2500 bp, Homo sapiens
gccacgtgtccggctcggagcccacggctgtcctcccggtccgccgcgcgctgcggttgctgctgggctaacgggctccgatccagcgagcgctgcgtcctcgagtccctgcgcccgtgcgtccgtctgcgacccgaggcctccgctgcgcgtggattctgctgcgaaccggagaccatggccaaaccagcacagggtgccaagtaccggggctccatccatgacttcccaggctttgaccccaaccaggatgccgaggctctgtacactgccatgaagggctttggcagtgacaaggaggccatactggacataatcacctcacggagcaacaggcagaggcaggaggtctgccagagctacaagtccctctacggcaaggacctcattgctgatttaaagtatgaattgacgggcaagtttgaacggttgattgtgggcctgatgaggccacctgcctattgtgatgccaaagaaattaaagatgccatctcgggcattggcactgatgagaagtgcctcattgagatcttggcttcccggaccaatgagcagatgcaccagctggtggcagcatacaaagatgcctacgagcgggacctggaggctgacatcatcggcgacacctctggccacttccagaagatgcttgtggtcctgctccagggaaccagggaggaggatgacgtagtgagcgaggacctggtacaacaggatgtccaggacctatacgaggcaggggaactgaaatggggaacagatgaagcccagttcatttacatcttgggaaatcgcagcaagcagcatcttcggttggtgttcgatgagtatctgaagaccacagggaagccgattgaagccagcatccgaggggagctgtctggggactttgagaagctaatgctggccgtagtgaagtgtatccggagcaccccggaatattttgctgaaaggctcttcaaggctatgaagggcctggggactcgggacaacaccctgatccgcatcatggtctcccgtagtgagttggacatgctcgacattcgggagatcttccggaccaagtatgagaagtccctctacagcatgatcaagaatgacacctctggcgagtacaagaagactctgctgaagctgtctgggggagatgatgatgctgctggccagttcttcccggaggcagcgcaggtggcctatcagatgtgggaacttagtgcagtggcccgagtagagctgaagggaactgtgcgcccagccaatgacttcaaccctgacgcagatgccaaagcgctgcggaaagccatgaagggactcgggactgacgaagacacaatcatcgatatcatcacgcaccgcagcaatgtccagcggcagcagatccggcagaccttcaagtctcactttggccgggacttaatgactgacctgaagtctgagatctctggagacctggcaaggctgattctggggctcatgatgccaccggcccattacgatgccaagcagttgaagaaggccatggagggagccggcacagatgaaaaggctcttattgaaatcctggccactcggaccaatgctgaaatccgggccatcaatgaggcctataaggaggactatcacaagtccctggaggatgctctgagctcagacacatctggccacttcaggaggatcctcatttctctggccacggggcatcgtgaggagggaggagaaaacctggaccaggcacgggaagatgcccaggtggctgctgagatcttggaaatagcagacacacccagtggagacaaaacttccttggagacacgtttcatgacgatcctgtgtacccggagctatccgcacctccggagagtcttccaggagttcatcaagatgaccaactatgacgtggagcacaccatcaagaaggagatgtctggggatgtcagggatgcatttgtggccattggtaactggcagggactaagggaagggctgggggcactgggaacttgaacagattctctggaagaatagaaccttggcagcctccgaagctactactggaaagtaaacactgtcacagttcgcctccaggggtgctgccaaatgtgtgattgtgcaggaatgtcatgaggtctgtgcgaggctgcaggagagggtgagaaaataactgttgctagggaagaaccaggaagactggggcaggcaggggagggggcacgctgtcctgcacaactagggtgtatacacacacacaccacacacacacttgacacacacacctaacatatacaagacacatactatacacacacacattctcacatgtgacacacactcatacataaaacacgttacatatgcatgtgacaggtgcacaccacacatacacacatcacacacagaacacattatatatacacatacatgctacacccccacaagacactacacctacacacacaccactcacacactatgcacacatgacccatgcacaccacatata

SEQ ID NO: 341272 - DNA, 1988 bp, Homo sapiens
ggagggccagggctgctatgaataagtgttcattcagccttcccctctttcaggctgtgcagaaccttcacctccttgtctgagaggagcccagggctgggtgagaggtaacctttctttctttctcttcagaatgacacctctggcgagtacaagaagactctgctgaagctgtctgggggagatgatgatgctgctggccagttcttcccggaggcagcgcaggtggcctatcagatgtgggaacttagtgcagtggcccgagtagagctgaagggaactgtgcgcccagccaatgacttcaaccctgacgcagatgccaaagcgctgcggaaagccatgaagggactcgggactgacgaagacacaatcatcgatatcatcacgcaccgcagcaatgtccagcggcagcagatccggcagaccttcaagtctcactttggccgggacttaatgactgacctgaagtctgagatctctggagacctggcaaggctgattctggggctcatgatgccaccggcccattacgatgccaagcagttgaagaaggccatggagggagccggcacagatgaaaaggctcttattgaaatcctggccactcggaccaatgctgaaatccgggccatcaatgaggcctataaggaggactatcacaagtccctggaggatgctctgagctcagacacatctggccacttcaggaggatcctcatttctctggccacggggcatcgtgaggagggaggagaaaacctggaccaggcacgggaagatgcccaggtggctgctgagatcttggaaatagcagacacacccagtggagacaaaacttccttggagacacgtttcatgacgatcctgtgtacccggagctatccgcacctccggagagtcttccaggagttcatcaagatgaccaactatgacgtggagcacaccatcaagaaggagatgtctggggatgtcagggatgcatttgtggccattgttcaaagtgtcaagaacaagcctctcttctttgccgacaaactttacaaatccatgaagggtgctggcacagatgagaagactctgaccaggatcatggtatcccgcagtgagattgacctgctcaacatccggagggaattcattgagaaatatgacaagtctctccaccaagccattgagggtgacacctccggagacttcctgaaggccttgctggctctctgtggtggtgaggactagggccacagctttggcgggcacttctgccaagaaatggttatcagcaccagccgccatggccaagcctgattgttccagctccagagactaaggaaggggcaggggtggggggaggggttgggttgggctcttatcttcagtggagcttaggaaacgctcccactcccacgggccatcgagggcccagcacggctgagcggctgaaaaaccgtagccatagatcctgtccacctccactcccctctgaccctcaggctttcccagcttcctccccttgctacagcctctgccctggtttgggctatgtcagatccaaaaacatcctgaacctctgtctgtaaaatgagtagtgtctgtactttgaatgagggggttggtggcaggggccagttgaatgtgctgggcggggtggtgggaaggatagtaaatgtgctggggcaaactgacaaatcttcccatccatttcaccacccatctccatccaggccgcgctagagtactggaccaggaatttggatgcctgggttcaaatctgcatctgccatgcacttgtttctgaccttaggccagcccctttccctccctgagtctctattttcttatctacaatgagacagttggacaaaaaaatcttggcttcccttctaacattaacttcctaaagtatgcctccgattcattcccttgacactttttatttctaaggaagaaataaaaagagatacacaaacacataaacacaaaaaaaatga

SEQ ID NO: 341273 - DNA, 1950 bp, Homo sapiens
gtgtccatcccccttcgtgtgtccatccccgttcgtgtgtccatcccccttcgtgtgtccatcccccttcgtgtgtccatcccccttcgtcaagaatgacacctctggcgagtacaagaagactctgctgaagctgtctgggggagatgatgatgctgctggccagttcttcccggaggcagcgcaggtggcctatcagatgtgggaacttagtgcagtggcccgagtagagctgaagggaactgtgcgcccagccaatgacttcaaccctgacgcagatgccaaagcgctgcggaaagccatgaagggactcgggactgacgaagacacaatcatcgatatcatcacgcaccgcagcaatgtccagcggcagcagatccggcagaccttcaagtctcactttggccgggacttaatgactgacctgaagtctgagatctctggagacctggcaaggctgattctggggctcatgatgccaccggcccattacgatgccaagcagttgaagaaggccatggagggagccggcacagatgaaaaggctcttattgaaatcctggccactcggaccaatgctgaaatccgggccatcaatgaggcctataaggaggactatcacaagtccctggaggatgctctgagctcagacacatctggccacttcaggaggatcctcatttctctggccacggggcatcgtgaggagggaggagaaaacctggaccaggcacgggaagatgcccaggtggctgctgagatcttggaaatagcagacacacccagtggagacaaaacttccttggagacacgtttcatgacgatcctgtgtacccggagctatccgcacctccggagagtcttccaggagttcatcaagatgaccaactatgacgtggagcacaccatcaagaaggagatgtctggggatgtcagggatgcatttgtggccattgttcaaagtgtcaagaacaagcctctcttctttgccgacaaactttacaaatccatgaagggtgctggcacagatgagaagactctgaccaggatcatggtatcccgcagtgagattgacctgctcaacatccggagggaattcattgagaaatatgacaagtctctccaccaagccattgagggtgacacctccggagacttcctgaaggccttgctggctctctgtggtggtgaggactagggccacagctttggcgggcacttctgccaagaaatggttatcagcaccagccgccatggccaagcctgattgttccagctccagagactaaggaaggggcaggggtggggggaggggttgggttgggctcttatcttcagtggagcttaggaaacgctcccactcccacgggccatcgagggcccagcacggctgagcggctgaaaaaccgtagccatagatcctgtccacctccactcccctctgaccctcaggctttcccagcttcctccccttgctacagcctctgccctggtttgggctatgtcagatccaaaaacatcctgaacctctgtctgtaaaatgagtagtgtctgtactttgaatgagggggttggtggcaggggccagttgaatgtgctgggcggggtggtgggaaggatagtaaatgtgctggggcaaactgacaaatcttcccatccatttcaccacccatctccatccaggccgcgctagagtactggaccaggaatttggatgcctgggttcaaatctgcatctgccatgcacttgtttctgaccttaggccagcccctttccctccctgagtctctattttcttatctacaatgagacagttggacaaaaaaatcttggcttcccttctaacattaacttcctaaagtatgcctccgattcattcccttgacactttttatttctaaggaagaaataaaaagagatacacaaacacataaacacaaaaaaaatga

SEQ ID NO: 341274 - DNA, 2187 bp, Homo sapiens
gccacgtgtccggctcggagcccacggctgtcctcccggtccgccgcgcgctgcggttgctgctgggctaacgggctccgatccagcgagcgctgcgtcctcgagtccctgcgcccgtgcgtccgtctgcgacccgaggcctccgctgcgcgtggattctgctgcgaaccggagaccatggccaaaccagcacagggtgccaagtaccggggctccatccatgacttcccaggctttgaccccaaccaggatgccgaggctctgtacactgccatgaagggctttggcagtgacaaggaggccatactggacataatcacctcacggagcaacaggcagaggcaggaggtctgccagagctacaagtccctctacggcaaggacctcattgctgatttaaagtatgaattgacgggcaagtttgaacggttgattgtgggcctgatgaggccacctgcctattgtgatgccaaagaaattaaagatgccatctcgggcattggcactgatgagaagtgcctcattgagatcttggcttcccggaccaatgagcagatgcaccagctggtggcagcatacaaagatgcctacgagcgggacctggaggctgacatcatcggcgacacctctggccacttccagaagatgcttgtggtcctgctccagggaaccagggaggaggatgacgtagtgagcgaggacctggtacaacaggatgtccaggacctatacgaggcaggggaactgaaatggggaacagatgaagcccagttcatttacatcttgggaaatcgcagcaagcagcatcttcggttggtgttcgatgagtatctgaagaccacagggaagccgattgaagccagcatccgaggggagctgtctggggactttgagaagctaatgctggccgtagtgaagtgtatccggagcaccccggaatattttgctgaaaggctcttcaaggctatgaagggcctggggactcgggacaacaccctgatccgcatcatggtctcccgtagtgagttggacatgctcgacattcgggagatcttccggaccaagtatgagaagtccctctacagcatgatcaagaatgacacctctggcgagtacaagaagactctgctgaagctgtctgggggagatgatgatgctgctggccagttcttcccggaggcagcgcaggtggcctatcagatgtgggaacttagtgcagtggcccgagtagagctgaagggaactgtgcgcccagccaatgacttcaaccctgacgcagatgccaaagcgctgcggaaagccatgaagggactcgggactgacgaagacacaatcatcgatatcatcacgcaccgcagcaatgtccagcggcagcagatccggcagaccttcaagtctcactttggccgggacttaatgactgacctgaagtctgagatctctggagacctggcaaggctgattctggggctcatgatgccaccggcccattacgatgccaagattgttccagctccagagactaaggaaggggcaggggtggggggaggggttgggttgggctcttatcttcagtggagcttaggaaacgctcccactcccacgggccatcgagggcccagcacggctgagcggctgaaaaaccgtagccatagatcctgtccacctccactcccctctgaccctcaggctttcccagcttcctccccttgctacagcctctgccctggtttgggctatgtcagatccaaaaacatcctgaacctctgtctgtaaaatgagtagtgtctgtactttgaatgagggggttggtggcaggggccagttgaatgtgctgggcggggtggtgggaaggatagtaaatgtgctggggcaaactgacaaatcttcccatccatttcaccacccatctccatccaggccgcgctagagtactggaccaggaatttggatgcctgggttcaaatctgcatctgccatgcacttgtttctgaccttaggccagcccctttccctccctgagtctctattttcttatctacaatgagacagttggacaaaaaaatcttggcttcccttctaacattaacttcctaaagtatgcctccgattcattcccttgacactttttatttctaaggaagaaataaaaagagatacacaaacacataaacacaaaaaaaatga

SEQ ID NO: 341275 - DNA, 1348 bp, Homo sapiens
gccacgtgtccggctcggagcccacggctgtcctcccggtccgccgcgcgctgcggttgctgctgggctaacgggctccgatccagcgagcgctgcgtcctcgagtccctgcgcccgtgcgtccgtctgcgacccgaggcctccgctgcgcgtggattctgctgcgaaccggagaccatggccaaaccagcacagggtgccaagtaccggggctccatccatgacttcccaggctttgaccccaaccaggatgccgaggctctgtacactgccatgaagggctttggcagtgacaaggaggccatactggacataatcacctcacggagcaacaggcagaggcaggaggtctgccagagctacaagtccctctacggcaaggacctcattgctgatttaaagtatgaattgacgggcaagtttgaacggttgattgtgggcctgatgaggccacctgcctattgtgatgccaaagaaattaaagatgccatctcgggcattggcactgatgagaagtgcctcattgagatcttggcttcccggaccaatgagcagatgcaccagctggtggcagcatacaaagatgcctacgagcgggacctggaggctgacatcatcggcgacacctctggccacttccagaagatgcttgtggtcctgctccagggaaccagggaggaggatgacgtagtgagcgaggacctggtacaacaggatgtccaggacctatacgaggcaggggaactgaaatggggaacagatgaagcccagttcatttacatcttgggaaatcgcagcaagcagcatcttcggttggtgttcgatgagtatctgaagaccacagggaagccgattgaagccagcatccgaggggagctgtctggggactttgagaagctaatgctggccgtagtgaagtgtatccggagcaccccggaatattttgctgaaaggctcttcaaggctatgaagggcctggggactcgggacaacaccctgatccgcatcatggtctcccgtagtgagttggacatgctcgacattcgggagatcttccggaccaagtatgagaagtccctctacagcatgatcaagaatgacacctctggcgagtacaagaagactctgctgaagctgtctgggggagatgatgatgctgctggccagttcttcccggaggcagcgcaggtggcctatcagatgtgggaacttagtgcagtggcccgagtagagctgaagggaactgtgcgcccagccaatgacttcaaccctgacgcagatgccaaagcgctgcggaaagccatgaagggactcgggactgacgaaacgcatcttcttcggcgcccct

SEQ ID NO: 341276 - DNA, 1691 bp, Homo sapiens
gccacgtgtccggctcggagcccacggctgtcctcccggtccgccgcgcgctgcggttgctgctgggctaacgggctccgatccagcgagcgctgcgtcctcgagtccctgcgcccgtgcgtccgtctgcgacccgaggcctccgctgcgcgtggattctgctgcgaaccggagaccatggccaaaccagcacagggtgccaagtaccggggctccatccatgacttcccaggctttgaccccaaccaggatgccgaggctctgtacactgccatgaagggctttggcagtgacaaggaggccatactggacataatcacctcacggagcaacaggcagaggcaggaggtctgccagagctacaagtccctctacggcaaggacctcattgctgatttaaagtatgaattgacgggcaagtttgaacggttgattgtgggcctgatgaggccacctgcctattgtgatgccaaagaaattaaagatgccatctcgggcattggcactgatgagaagtgcctcattgagatcttggcttcccggaccaatgagcagatgcaccagctggtggcagcatacaaagatgcctacgagcgggacctggaggctgacatcatcggcgacacctctggccacttccagaagatgcttgtggtcctgctccagggaaccagggaggaggatgacgtagtgagcgaggacctggtacaacaggatgtccaggtaaacaagcacaaactttacaaatccatgaagggtgctggcacagatgagaagactctgaccaggatcatggtatcccgcagtgagattgacctgctcaacatccggagggaattcattgagaaatatgacaagtctctccaccaagccattgagggtgacacctccggagacttcctgaaggccttgctggctctctgtggtggtgaggactagggccacagctttggcgggcacttctgccaagaaatggttatcagcaccagccgccatggccaagcctgattgttccagctccagagactaaggaaggggcaggggtggggggaggggttgggttgggctcttatcttcagtggagcttaggaaacgctcccactcccacgggccatcgagggcccagcacggctgagcggctgaaaaaccgtagccatagatcctgtccacctccactcccctctgaccctcaggctttcccagcttcctccccttgctacagcctctgccctggtttgggctatgtcagatccaaaaacatcctgaacctctgtctgtaaaatgagtagtgtctgtactttgaatgagggggttggtggcaggggccagttgaatgtgctgggcggggtggtgggaaggatagtaaatgtgctggggcaaactgacaaatcttcccatccatttcaccacccatctccatccaggccgcgctagagtactggaccaggaatttggatgcctgggttcaaatctgcatctgccatgcacttgtttctgaccttaggccagcccctttccctccctgagtctctattttcttatctacaatgagacagttggacaaaaaaatcttggcttcccttctaacattaacttcctaaagtatgcctccgattcattcccttgacactttttatttctaaggaagaaataaaaagagatacacaaacacataaacacaaaaaaaatga

SEQ ID NO: 341277 - DNA, 1317 bp, Homo sapiens
gccacgtgtccggctcggagcccacggctgtcctcccggtccgccgcgcgctgcggttgctgctgggctaacgggctccgatccagcgagcgctgcgtcctcgagtccctgcgcccgtgcgtccgtctgcgacccgaggcctccgctgcgcgtggattctgctgcgaaccggagaccatggccaaaccagcacagggtgccaagtaccggggctccatccatgacttcccaggctttgaccccaaccaggatgccgaggctctgtacactgccatgaagggctttggcagtgacaaggaggccatactggacataatcacctcacggagcaacaggcagaggcaggaggtctgccagagctacaagtccctctacggcaaggacctcattgctgatttaaagtatgaattgacgggcaagtttgaacggttgattgtgggcctgatgaggccacctgcctattgtgatgccaaagaaattaaagatgccatctcgggcattggcactgatgagaagtgcctcattgagatcttggcttcccggaccaatgagcagatgcaccagctggtggcagcatacaaagatgcctacgagcgggacctggaggctgacatcatcggcgacacctctggccacttccagaagatgcttgtggtcctgctccagggaaccagggaggaggatgacgtagtgagcgaggacctggtacaacaggatgtccaggacctatacgaggcaggggaactgaaatggggaacagatgaagcccagttcatttacatcttgggaaatcgcagcaagcagcatcttcggttggtgttcgatgagtatctgaagaccacagggaagccgattgaagccagcatccgaggggagctgtctggggactttgagaagctaatgctggccgtagtgaagtgtatccggagcaccccggaatattttgctgaaaggctcttcaaggctatgaagggcctggggactcgggacaacaccctgatccgcatcatggtctcccgtagtgagttggacatgctcgacattcgggagatcttccggaccaagtatgagaagtccctctacagcatgatcaagaatgacacctctggcgagtacaagaagaccatttgaccatatgaatggaaaagggaagaaagtataatagaaactttgctagttaaaaaaaaaagaaaaaaaaagaaaaaaaatccctttcttgtaaacttacggacacctctttgtggctgttggagtttagtttttatatacacagagttatcagacattatttataaaacttagtttaaaaaaaaaaaa

SEQ ID NO: 341278 - DNA, 1152 bp, Homo sapiens
catatgatgcgtaccctaagtttatagaatctgccaatattatggatccggatgagcaattggaaacccttcatgaagcactgaaactactgccacctgctcactgcgaaaccctccggtacctcatggcacatttaaagagagtgaccctccacgaaaaggagaatcttatgaatgcagagaaccttggaatcgtctttggacccacccttataagggtgctggcacagatgagaagactctgaccaggatcatggtatcccgcagtgagattgacctgctcaacatccggagggaattcattgagaaatatgacaagtctctccaccaagccattgagggtgacacctccggagacttcctgaaggccttgctggctctctgtggtggtgaggactagggccacagctttggcgggcacttctgccaagaaatggttatcagcaccagccgccatggccaagcctgattgttccagctccagagactaaggaaggggcaggggtggggggaggggttgggttgggctcttatcttcagtggagcttaggaaacgctcccactcccacgggccatcgagggcccagcacggctgagcggctgaaaaaccgtagccatagatcctgtccacctccactcccctctgaccctcaggctttcccagcttcctccccttgctacagcctctgccctggtttgggctatgtcagatccaaaaacatcctgaacctctgtctgtaaaatgagtagtgtctgtactttgaatgagggggttggtggcaggggccagttgaatgtgctgggcggggtggtgggaaggatagtaaatgtgctggggcaaactgacaaatcttcccatccatttcaccacccatctccatccaggccgcgctagagtactggaccaggaatttggatgcctgggttcaaatctgcatctgccatgcacttgtttctgaccttaggccagcccctttccctccctgagtctctattttcttatctacaatgagacagttggacaaaaaaatcttggcttcccttctaacattaacttcctaaagtatgcctccgattcattcccttgacactttttatttctaaggaagaaataaaaagagatacacaaacacataaacacaaaaaaaatga

SEQ ID NO: 341279 - DNA, 1433 bp, Homo sapiens
gccacgtgtccggctcggagcccacggctgtcctcccggtccgccgcgcgctgcggttgctgctgggctaacgggctccgatccagcgagcgctgcgtcctcgagtccctgcgcccgtgcgtccgtctgcgacccgaggcctccgctgcgcgtggattctgctgcgaaccggagaccatggccaaaccagcacagggtgccaagtaccggggctccatccatgacttcccaggctttgaccccaaccaggatgccgaggctctgtacactgccatgaagggctttggcagtgacaaggaggccatactggacataatcacctcacggagcaacaggcagaggcaggaggtctgccagagctacaagtccctctacggcaaggacctcattgctgatttaaagtatgaattgacgggcaagtttgaacggttgattgtgggcctgatgaggccacctgcctattgtgatgccaaagaaattaaagatgccatctcgggcattggcactgatgagaagtgcctcattgagatcttggcttcccggaccaatgagcagatgcaccagctggtggcagcatacaaagatgcctacgagcgggacctggaggctgacatcatcggcgacacctctggccacttccagaagatgcttgtggtcctgctccagggaaccagggaggaggatgacgtagtgagcgaggacctggtacaacaggatgtccaggtaaacaagcacaaactttacaaatccatgaagggtgctggcacagatgagaagactctgaccaggatcatggtatcccgcagtgagattgacctgctcaacatccggagggaattcattgagaaatatgacaagtctctccaccaagccattgagggtgacacctccggagacttcctgaaggccttgctggctctctgtggtggtgaggactagggccacagctttggcgggcacttctgccaagaaatggttatcagcaccagccgccatggccaagcctgattgttccagctccagagactaaggaaggggcaggggtgggcgttgcaagttcgtgtcaataaccataatcaagtaaactatcaagagaagccgtgatatggaaagtgtgaaaaatgtatatgggctggctggagagaagaacggtgatccattactgtattacaacaggactctcgagggggatcacaaactcagagtcctaagtgatgcatgatcttgctgttcaccagcccgtcacagatacggaaccagtagtgagatcactgtcgtccagacacgagcgatatccgaatggcgcaacattcttaaggacggtcgacatcacgatacccagcagaccgcctctggatcaacccccctgcaactgcttcgggcgccctggtcggcaacccccaacgagtgcgcagagggtcctgctcgagctc

SEQ ID NO: 341280 - DNA, 759 bp, Homo sapiens
  misc_feature (161)..(161): n is a, c, g, or t
aatttgctggtatccgaagggccggaaaaagtactcggacccacgatgatttaaatacataaaaggatgggtgattccttaccgtatcaaatgtcttatttttcagttctgaagtggcatccatgtctttaaactctcctgcaatatgaactataccgtanactctgccgaattcggcacgagcgagggcccagcacggctgagcggctgaaaaaccgtagccatagatcctgtccacctccactcccctctgaccctcaggctttcccagcttcctccccttgctacagcctctgccctggtttgggctatgtcagatccaaaaacatcctgaacctctgtctgtaaaatgagtagtgtctgtactttgaatgagggggttggtggcaggggccagttgaatgtgctgggcggggtggtgggaaggatagtaaatgtgctggggcaaactgacaaatcttcccatccatttcaccacccatctccatccaggccgcgctagagtactggaccaggaatttggatgcctgggttcaaatctgcatctgccatgcacttgtttctgaccttaggccagcccctttccctccctgagtctctattttcttatctacaatgagacagttggacaaaaaaatcttggcttcccttctaacattaacttcctaaagtatgcctccgattcattcccttgacactttttatttctaaggaagaaataaaaagagatacacaaacacataaacacaaaaaaaatga

SEQ ID NO: 341281 - DNA, 730 bp, Homo sapiens
gccacgtgtccggctcggagcccacggctgtcctcccggtccgccgcgcgctgcggttgctgctgggctaacgggctccgatccagcgagcgctgcgtcctcgagtccctgcgcccgtgcgtccgtctgcgacccgaggcctccgctgcgcgtggattctgctgcgaaccggagaccatggccaaaccagcacagggtgccaagtaccggggctccatccatgacttcccaggctttgaccccaaccaccccttgctacagcctctgccctggtttgggctatgtcagatccaaaaacatcctgaacctctgtctgtaaaatgagtagtgtctgtactttgaatgagggggttggtggcaggggccagttgaatgtgctgggcggggtggtgggaaggatagtaaatgtgctggggcaaactgacaaatcttcccatccatttcaccacccatctccatccaggccgcgctagagtactggaccaggaatttggatgcctgggttcaaatctgcatctgccatgcacttgtttctgaccttaggccagcccctttccctccctgagtctctattttcttatctacaatgagacagttggacaaaaaaatcttggcttcccttctaacattaacttcctaaagtatgcctccgattcattcccttgacactttttatttctaaggaagaaataaaaagagatacacaaacacataaacacaaaaaaaatga

SEQ ID NO: 341282 - DNA, 631 bp, Homo sapiens
gccacgtgtccggctcggagcccacggctgtcctcccggtccgccgcgcgctgcggttgctgctgggctaacgggctccgatccagcgagcgctgcgtcctcgagtccctgcgcccgtgcgtccgtctgcgacccgaggcctccgctgcgcggattttctggggaggcccagtggaatcaccagcctcaccccacccagcctctccgatatacttcctgggtggcgacaaagcacaggatgtggtctctaccgtgattcctgagcatgcatgcaccccttctcctgccaatagaggggaggaagtcggaggggtgtctttatgcctataaacttgccttggaatccagcctcactccctttcctcctggagttgagaagcccccacagagactggctatgggggagtgactgtctataggttccttggatgtcctgcctatctgcaaaatgagaatgagatcgataccttcatgaggctgtaagatggcagatataaaagtgctgtgttatctcaaaagggtgtggtgcttgagaaggcaggcgacctgagcctcaagttcctcttctgaaaaatccatgtcctggtggtccttaaataatagcaataaaatggtaaccactattacctct

SEQ ID NO: 341283 - DNA, 321 bp, Homo sapiens
gccacgtgtccggctcggagcccacggctgtcctcccggtccgccgcgcgctgcggttgctgctgggctaacgggctccgatccagcgagcgctgcgtcctcgagtccctgcgcccgtgcgtccgtctgcgacccgaggcctccgctgcgcgtggattctgctgcgaaccggagaccatggccaaaccagcacagagtcagtctcattctgtcgcccaggctggaatgcagtgatgcgatctgagctcactacaacctctgcctcccaggttcaagtgattctcctgacccagcctcctgagtagctgagattacaggtgc

SEQ ID NO: 341284 - DNA, 136 bp, Homo sapiens
agagcattcagagaggtgaaaatgagcagggtgtgtggtggtacagagatggagatgggtcgatgtttggggactgaactttcttgctgctcctgctgcaggggcatcgtgaggagggaggagaaaacctggacca

SEQ ID NO: 341285 - DNA, 526 bp, Homo sapiens
atgtgcgtgacctcccagtcgcctccatcatagcaccagccctagcttcatggtggacagtcgtcctggccactgtgcccccctgctcttgaagtcctcatttcttctcgggggtacagaggcactctcaaacctccctgtctctctgtctgacgcagtgttcgatgagtatctgaagaccacagggaagccgattgaagccagcatccgaggggagctgtctggggactttgagaagctaatgctggccgtaggtatgtcctgacgttgcattcctgggggctttaggggattctggaacactggcctaggaacaaggggctgagaatggaaaggggaattacatggtatagaattgggaaggagaaaaccatgtgggccgtgaattctaaaggtttctccagggcagcatggctgaggctggggacgggaagggggtttgagcctcaggtactgacttcctccagctcccttctccaccactggcagggggacaaagagctctgaacttgggttgaggataatg

SEQ ID NO: 341286 - DNA, 442 bp, Homo sapiens
gtattgagctaggtggccctcaaggaatagaaacaaagagggagtcaggccatcccatcccccttctgaggcagccagaataactctacctcttcctccctcttcacagtgaagtgtatccggagcaccccggaatattttgctgaaaggctcttcaaggctatgaaggtgcgtggtggggctgatgtgaatggggtttggggagaggactattgggagtctttgacaagtccttgggatccagtggccaaagagagcccttcagggatggccacaggactgaccctggtgaaggtgctctgtcgcaggtgagctgtagagccaggaatgctgctggtcacatgtcctgccacctgcatacctgcctgacgtcatgagtcaacagatgaacttagggtggcagcctgcacctgatccctccagccaaatgggttggcggctc

SEQ ID NO: 341287 - DNA, 576 bp, Homo sapiens
  misc_feature (48)..(48): n is a, c, g, or t
  misc_feature (54)..(55): n is a, c, g, or t
tctagaggatccgcgtgtggttctgtctggggatgtcagggatgcatngtggcnnttgttcaaagtgtcaagaacaagcctctcttctttgccgacaaactttacaaatccatgaagggtgctggcacagatgagaagactctgaccaggatcatggtatcccgcagtgagattgacctgctcaacatccggagggaattcattgagaaatatgacaagtctctccaccaagccattgagggtgacacctccggagacttcctgaaggccttgctggctctctgtggtggtgaggactagggccacagctttggcgggcacttctgccaagaaatggttatcagcaccagccgccatggccaagcctgattgttccagctccagagactaaggaaggggcaggggtggggggaggggttgggttgggctcttatcttcagtggagcttaggaaacgctcccactcccacgggccatcgagggcccagcacggctgagcggctgaaaaaccgtagccatagatccttgccccaagtcaaaagaaattagagctgatcctctagagtgaccggtacca

SEQ ID NO: 341288 - DNA, 2808 bp, Homo sapiens
  misc_feature (2546)..(2548): n is a, c, g, or t
gccacgtgtccggctcggagcccacggctgtcctcccggtccgccgcgcgctgcggttgctgctgggctaacgggctccgatccagcgagcgctgcgtcctcgagtccctgcgcccgtgcgtccgtctgcgacccgaggcctccgctgcgcgtggattctgctgcgaaccggagaccatggccaaaccagcacagggtgccaagtaccggggctccatccatgacttcccaggctttgaccccaaccaggatgccgaggctctgtacactgccatgaagggctttggcagtgacaaggaggccatactggacataatcacctcacggagcaacaggcagaggcaggaggtctgccagagctacaagtccctctacggcaaggacctcattgctgatttaaagtatgaattgacgggcaagtttgaacggttgattgtgggcctgatgaggccacctgcctattgtgatgccaaagaaattaaagatgccatctcgggcattggcactgatgagaagtgcctcattgagatcttggcttcccggaccaatgagcagatgcaccagctggtggcagcatacaaagatgcctacgagcgggacctggaggctgacatcatcggcgacacctctggccacttccagaagatgcttgtggtcctgctccagggaaccagggaggaggatgacgtagtgagcgaggacctggtacaacaggatgtccaggacctatacgaggcaggggaactgaaatggggaacagatgaagcccagttcatttacatcttgggaaatcgcagcaagcagcatcttcggttggtgttcgatgagtatctgaagaccacagggaagccgattgaagccagcatccgaggggagctgtctggggactttgagaagctaatgctggccgtagtgaagtgtatccggagcaccccggaatattttgctgaaaggctcttcaaggctatgaagggcctggggactcgggacaacaccctgatccgcatcatggtctcccgtagtgagttggacatgctcgacattcgggagatcttccggaccaagtatgagaagtccctctacagcatgatcaagaatgacacctctggcgagtacaagaagactctgctgaagctgtctgggggagatgatgatgctgctggccagttcttcccggaggcagcgcaggtggcctatcagatgtgggaacttagtgcagtggcccgagtagagctgaagggaactgtgcgcccagccaatgacttcaaccctgacgcagatgccaaagcgctgcggaaagccatgaagggactcgggactgacgaagacacaatcatcgatatcatcacgcaccgcagcaatgtccagcggcagcagatccggcagaccttcaagtctcactttggccgggacttaatgactgacctgaagtctgagatctctggagacctggcaaggctgattctggggctcatgatgccaccggcccattacgatgccaagcagttgaagaaggccatggagggagccggcacagatgaaaaggctcttattgaaatcctggccactcggaccaatgctgaaatccgggccatcaatgaggcctataaggaggactatcacaagtccctggaggatgctctgagctcagacacatctggccacttcaggaggatcctcatttctctggccacggggcatcgtgaggagggaggagaaaacctggaccaggcacgggaagatgcccaggtggctgctgagatcttggaaatagcagacacacccagtggagacaaaacttccttggagacacgtttcatgacgatcctgtgtacccggagctatccgcacctccggagagtcttccaggagttcatcaagatgaccaactatgacgtggagcacaccatcaagaaggagatgtctggggatgtcagggatgcatttgtggccattgttcaaagtgtcaagaacaagcctctcttctttgccgacaaactttacaaatccatgaagggtgctggcacagatgagaagactctgaccaggatcatggtatcccgcagtgagattgacctgctcaacatccggagggaattcattgagaaatatgacaagtctctccaccaagccattgagggtgacacctccggagacttcctgaaggccttgctggctctctgtggtggtgaggactagggccacagctttggcgggcacttctgccaagaaatggttatcagcaccagccgccatggccaagcctgattgttccagctccagagactaaggaaggggcaggggtggggggaggggttgggttgggctcttatcttcagtggagcttaggaaacgctcccactcccacgggccatcgagggcccagcacggctgagcggctgaaaaaccgtagccatagatcctgtccacctccactcccctctgaccctcaggctttcccagcttcctccccttgctacagcctctgccctggtttgggctatgtcagatccaaaaacatcctgaacctctgtctgtaaaatgannntcgtgccgaattcgaggatcatctacaaggctgcggtagagcagtgacagaagagcagaaaatgagttcaaggcagccttcgacatcttcgtgcttggcgctgaggatggctgcatcacaccaaggagctgggcaaggtgatgaggatgctgggcagaaccccaccctgaggagctgcaggagatgatcgatgaggtggacgaggacggcacgcacgttggacttttataagtcctcgtataatggtcgtcataaggacg

SEQ ID NO: 341289 - DNA, 2770 bp, Homo sapiens
gccacgtgtccggctcggagcccacggctgtcctcccggtccgccgcgcgctgcggttgctgctgggctaacgggctccgatccagcgagcgctgcgtcctcgagtccctgcgcccgtgcgtccgtctgcgacccgaggcctccgctgcgcgtggattctgctgcgaaccggagaccatggccaaaccagcacagggtgccaagtaccggggctccatccatgacttcccaggctttgaccccaaccaggatgccgaggctctgtacactgccatgaagggctttggcagtgacaaggaggccatactggacataatcacctcacggagcaacaggcagaggcaggaggtctgccagagctacaagtccctctacggcaaggacctcattgctgatttaaagtatgaattgacgggcaagtttgaacggttgattgtgggcctgatgaggccacctgcctattgtgatgccaaagaaattaaagatgccatctcgggcattggcactgatgagaagtgcctcattgagatcttggcttcccggacctatacgaggcaggggaactgaaatggggaacagatgaagcccagttcatttacatcttgggaaatcgcagcaagcagcatcttcggttggtgttcgatgagtatctgaagaccacagggaagccgattgaagccagcatccgaggggagctgtctggggactttgagaagctaatgctggccgtagtgaagtgtatccggagcaccccggaatattttgctgaaaggctcttcaaggctatgaagggcctggggactcgggacaacaccctgatccgcatcatggtctcccgtagtgagttggacatgctcgacattcgggagatcttccggaccaagtatgagaagtccctctacagcatgatcaagaatgacacctctggcgagtacaagaagactctgctgaagctgtctgggggagatgatgatgctgctggccagttcttcccggaggcagcgcaggtggcctatcagatgtgggaacttagtgcagtggcccgagtagagctgaagggaactgtgcgcccagccaatgacttcaaccctgacgcagatgccaaagcgctgcggaaagccatgaagggactcgggactgacgaagacacaatcatcgatatcatcacgcaccgcagcaatgtccagcggcagcagatccggcagaccttcaagtctcactttggccgggacttaatgactgacctgaagtctgagatctctggagacctggcaaggctgattctggggctcatgatgccaccggcccattacgatgccaagcagttgaagaaggccatggagggagccggcacagatgaaaaggctcttattgaaatcctggccactcggaccaatgctgaaatccgggccatcaatgaggcctataaggaggactatcacaagtccctggaggatgctctgagctcagacacatctggccacttcaggaggatcctcatttctctggccacggggcatcgtgaggagggaggagaaaacctggaccaggcacgggaagatgcccaggtggctgctgagatcttggaaatagcagacacacccagtggagacaaaacttccttggagacacgtttcatgacgatcctgtgtacccggagctatccgcacctccggagagtcttccaggagttcatcaagatgaccaactatgacgtggagcacaccatcaagaaggagatgtctggggatgtcagggatgcatttgtggccattgttcaaagtgtcaagaacaagcctctcttctttgccgacaaactttacaaatccatgaagggtgctggcacagatgagaagactctgaccaggatcatggtatcccgcagtgagattgacctgctcaacatccggagggaattcattgagaaatatgacaagtctctccaccaagccattgagggtgacacctccggagacttcctgaaggccttgctggctctctgtggtggtgaggactagggccacagctttggcgggcacttctgccaagaaatggttatcagcaccagccgccatggccaagcctgattgttccagctccagagactaaggaaggggcaggggtggggggaggggttgggttgggctcttatcttcagtggagcttaggaaacgctcccactcccacgggccatcgagggcccagcacggctgagcggctgaaaaaccgtagccatagatcctgtccacctccactcccctctgaccctcaggctttcccagcttcctccccttgctacagcctctgccctggtttgggctatgtcagatccaaaaacatcctgaacctctgtctgtaaaatgagtagtgtctgtactttgaatgagggggttggtggcaggggccagttgaatgtgctgggcggggtggtgggaaggatagtaaatgtgctggggcaaactgacaaatcttcccatccatttcaccacccatctccatccaggccgcgctagagtactggaccaggaatttggatgcctgggttcaaatctgcatctgccatgcacttgtttctgaccttaggccagcccctttccctccctgagtctctattttcttatctacaatgagacagttggacaaaaaaatcttggcttcccttctaacattaacttcctaaagtatgcctccgattcattcccttgacactttttatttctaaggaagaaataaaaagagatacacaaacacataaacacaaaaaaaatga

SEQ ID NO: 341290 - DNA, 2455 bp, Homo sapiens
gccacgtgtccggctcggagcccacggctgtcctcccggtccgccgcgcgctgcggttgctgctgggctaacgggctccgatccagcgagcgctgcgtcctcgagtccctgcgcccgtgcgtccgtctgcgacccgaggcctccgctgcgcgtggattctgctgcgaaccggagaccatggccaaaccagcacagggtgccaagtaccggggctccatccatgacttcccaggctttgaccccaaccaggatgccgaggctctgtacactgccatgaagggctttggcagtgacaaggaggccatactggacataatcacctcacggagcaacaggcagaggcaggaggtctgccagagctacaagtccctctacggcaaggacctcattgctgatttaaagtatgaattgacgggcaagtttgaacggttgattgtgggcctgatgaggccacctgcctattgtgatgccaaagaaattaaagatgccatctcgggcattggcactgatgagaagtgcctcattgagatcttggcttcccggaccaatgagcagatgcaccagctggtggcagcatacaaagatgcctacgagcgggacctggaggctgacatcatcggcgacacctctggccacttccagaagatgcttgtggtcctgctccagggaaccagggaggaggatgacgtagtgagcgaggacctggtacaacaggatgtccaggacctatacgaggcaggggaactgaaatggggaacagatgaagcccagttcatttacatcttgggaaatcgcagcaagcagcatcttcggttggtgttcgatgagtatctgaagaccacagggaagccgattgaagccagcatccgaggggagctgtctggggactttgagaagctaatgctggccgtagtgaagtgtatccggagcaccccggaatattttgctgaaaggctcttcaaggctatgaagggcctggggactcgggacaacaccctgatccgcatcatggtctcccgtagtgagttggacatgctcgacattcgggagatcttccggaccaagtatgagaagtccctctacagcatgatcaagaatgacacctctggcgagtacaagaagactctgctgaagctgtctgggggagatgatgatgctgctggccagttcttcccggaggcagcgcaggtggcctatcagatgtgggaacttagtgcagtggcccgagtagagctgaagggaactgtgcgcccagccaatgacttcaaccctgacgcagatgccaaagcgctgcggaaagccatgaagggactcgggactgacgaagacacaatcatcgatatcatcacgcaccgcagcaatgtccagcggcagcagatccggcagaccttcaagtctcactttggccgggacttaatgactgacctgaagtctgagatctctggagacctggcaaggctgattctggggctcatgatgccaccggcccattacgatgccaagcagttgaagaaggccatggagggagccggcacagatgaaaaggctcttattgaaatcctggccactcggaccaatgctgaaatccgggccatcaatgaggcctataaggaggactatcacaagtccctggaggatgctctgagctcagacacatctggccacttcaggaggatcctcatttctctggccacggggcatcgtgaggagggaggagaaaacctggaccaggcacgggaagatgcccaggtggctgctgagatcttggaaatagcagacacacccagtggagacaaaacttccttggagacacgtttcatgacgatcctgtgtacccggagctatccgcacctccggagagtcttccaggagttcatcaagatgaccaactatgacgtggagcacaccatcaagaaggagatgtctggggatgtcagggatgcatttgtggccattgttcaaagtgtcaagaacaagcctctcttctttgccgacaaactttacaaatccatgaagggtgctggcacagatgagaagactctgaccaggatcatggtatcccgcagtgagattgacctgctcaacatccggagggaattcattgagaaatatgacaagtctctccaccaagccattgagggtgacacctccggagacttcctgaaggccttgctggctctctgtggtggccgcgctagagtactggaccaggaatttggatgcctgggttcaaatctgcatctgccatgcacttgtttctgaccttaggccagcccctttccctccctgagtctctattttcttatctacaatgagacagttggacaaaaaaatcttggcttcccttctaacattaacttcctaaagtatgcctccgattcattcccttgacactttttatttctaaggaagaaataaaaagagatacacaaacacataaacacaaaaaaaatga

SEQ ID NO: 341291 - DNA, 2199 bp, Homo sapiens
gccacgtgtccggctcggagcccacggctgtcctcccggtccgccgcgcgctgcggttgctgctgggctaacgggctccgatccagcgagcgctgcgtcctcgagtccctgcgcccgtgcgtccgtctgcgacccgaggcctccgctgcgcgtggattctgctgcgaaccggagaccatggccaaaccagcacagggtgccaagtaccggggctccatccatgacttcccaggctttgaccccaaccaggatgccgaggctctgtacactgccatgaagggctttggcagtgacaaggaggccatactggacataatcacctcacggagcaacaggcagaggcaggaggtctgccagagctacaagtccctctacggcaaggacctcattgctgatttaaagtatgaattgacgggcaagtttgaacggttgattgtgggcctatcagatgtgggaacttagtgcagtggcccgagtagagctgaagggaactgtgcgcccagccaatgacttcaaccctgacgcagatgccaaagcgctgcggaaagccatgaagggactcgggactgacgaagacacaatcatcgatatcatcacgcaccgcagcaatgtccagcggcagcagatccggcagaccttcaagtctcactttggccgggacttaatgactgacctgaagtctgagatctctggagacctggcaaggctgattctggggctcatgatgccaccggcccattacgatgccaagcagttgaagaaggccatggagggagccggcacagatgaaaaggctcttattgaaatcctggccactcggaccaatgctgaaatccgggccatcaatgaggcctataaggaggactatcacaagtccctggaggatgctctgagctcagacacatctggccacttcaggaggatcctcatttctctggccacggggcatcgtgaggagggaggagaaaacctggaccaggcacgggaagatgcccaggtggctgctgagatcttggaaatagcagacacacccagtggagacaaaacttccttggagacacgtttcatgacgatcctgtgtacccggagctatccgcacctccggagagtcttccaggagttcatcaagatgaccaactatgacgtggagcacaccatcaagaaggagatgtctggggatgtcagggatgcatttgtggccattgttcaaagtgtcaagaacaagcctctcttctttgccgacaaactttacaaatccatgaagggtgctggcacagatgagaagactctgaccaggatcatggtatcccgcagtgagattgacctgctcaacatccggagggaattcattgagaaatatgacaagtctctccaccaagccattgagggtgacacctccggagacttcctgaaggccttgctggctctctgtggtggtgaggactagggccacagctttggcgggcacttctgccaagaaatggttatcagcaccagccgccatggccaagcctgattgttccagctccagagactaaggaaggggcaggggtggggggaggggttgggttgggctcttatcttcagtggagcttaggaaacgctcccactcccacgggccatcgagggcccagcacggctgagcggctgaaaaaccgtagccatagatcctgtccacctccactcccctctgaccctcaggctttcccagcttcctccccttgctacagcctctgccctggtttgggctatgtcagatccaaaaacatcctgaacctctgtctgtaaaatgagtagtgtctgtactttgaatgagggggttggtggcaggggccagttgaatgtgctgggcggggtggtgggaaggatagtaaatgtgctggggcaaactgacaaatcttcccatccatttcaccacccatctccatccaggccgcgctagagtactggaccaggaatttggatgcctgggttcaaatctgcatctgccatgcacttgtttctgaccttaggccagcccctttccctccctgagtctctattttcttatctacaatgagacagttggacaaaaaaatcttggcttcccttctaacattaacttcctaaagtatgcctccgattcattcccttgacactttttatttctaaggaagaaataaaaagagatacacaaacacataaacacaaaaaaaatga

SEQ ID NO: 341292 - DNA, 1998 bp, Homo sapiens
gccacgtgtccggctcggagcccacggctgtcctcccggtccgccgcgcgctgcggttgctgctgggctaacgggctccgatccagcgagcgctgcgtcctcgagtccctgcgcccgtgcgtccgtctgcgacccgaggcctccgctgcgcgtggattctgctgcgaaccggagaccatggccaaaccagcacagggtgccaagtaccggggctccatccatgacttcccaggctttgaccccaaccaggatgccgaggctctgtacactgccatgaagggctttggcagtgacaaggaggccatactggacataatcacctcacggagcaacaggcagaggcaggaggtctgccagagctacaagtccctctacggcaaggacctcattgctgatttaaagtatgaattgacgggcaagtttgaacggttgattgtgggcctgatgaggccacctgcctattgtgatgccaaagaaattaaagatgccatctcgggcattggcactgatgagaagtgcctcattgagatcttggcttcccggaccaatgagcagatgcaccagctggtggcagcatacaaagatgcctacgagcgggacctggaggctgacatcatcggcgacacctctggccacttccagaagatgcttgtggtcctgctccagggaaccagggaggaggatgacgtagtgagcgaggacctggtacaacaggatgtccaggacctatacgaggcaggggaactgaaatggggaacagatgaagcccagttcatttacatcttgggaaatcgcagcaagcagcatcttcggttggtgttcgatgagtatctgaagaccacagggaagccgattgaagccagcatccgaggggagctgtctggggactttgagaagctaatgctggccgtagtgaagtgtatccggagcaccccggaatattttgctgaaaggctcttcaaggctatgaagggcctggggactcgggacaacaccctgatccgcatcatggtctcccgtagtgagttggacatgctcgacattcgggagatcttccggaccaagtatgagaagtccctctacagcatgatcaagaatgacacctctggcgagtacaagaagactctgctgaagctgtctgggggagatgatgatgctgctggccagttcttcccggaggcagcgcaggtggcctatcagatgtgggaacttagtgcagtggcccgagtagagctgaagggaactgtgcgcccagccaatgacttcaaccctgacgcagatgccaaagcgctgcggaaagccatgaagggactcgggactgacgaagacacaatcatcgatatcatcacgcaccgcagcaatgtccagcggcagcagatccggcagaccttcaagtctcactttggccgggacttaatgactgacctgaagtctgagatctctggagacctggcaaggctgattctggggctcatgatgccaccggcccattacgatgccaagcagttgaagaaggccatggagggagccggcacagatgaaaaggctcttattgaaatcctggccactcggaccaatgctgaaatccgggccatcaatgaggcctataaggaggactatcacaagtccctggaggatgctctgagctcagacacatctggccacttcaggaggatcctcatttctctggccacggggcatcgtgaggagggaggagaaaacctggaccaggcacgggaagatgcccaggtggctgctgagatcttggaaatagcagacacacccagtggagacaaaacttccttggagacacgtttcatgacgatcctgtgtacccggagctatccgcacctccggagagtcttccaggagttcatcaagatgaccaactatgacgtggagcacaccatcaagaaggagatgtctcccactaggtgtgtctgctatttccaagatctcagcagccacctggcatcttcccgtgcctgggtccggcta

SEQ ID NO: 341293 - DNA, 1738 bp, Homo sapiens
tctttctgacctcttctcccctgaagggaactgtgcgcccagccaatgacttcaaccctgacgcagatgccaaagcgctgcggaaagccatgaagggactcgggactgacgaagacacaatcatcgatatcatcacgcaccgcagcaatgtccagcggcagcagatccggcagaccttcaagtctcactttggccgggacttaatgactgacctgaagtctgagatctctggagacctggcaaggctgattctggggctcatgatgccaccggcccattacgatgccaagcagttgaagaaggccatggagggagccggcacagatgaaaaggctcttattgaaatcctggccactcggaccaatgctgaaatccgggccatcaatgaggcctataaggaggactatcacaagtccctggaggatgctctgagctcagacacatctggccacttcaggaggatcctcatttctctggccacggggcatcgtgaggagggaggagaaaacctggaccaggcacgggaagatgcccaggtggctgctgagatcttggaaatagcagacacacccagtggagacaaaacttccttggagacacgtttcatgacgatcctgtgtacccggagctatccgcacctccggagagtcttccaggagttcatcaagatgaccaactatgacgtggagcacaccatcaagaaggagatgtctggggatgtcagggatgcatttgtggccattgttcaaagtgtcaagaacaagcctctcttctttgccgacaaactttacaaatccatgaagggtgctggcacagatgagaagactctgaccaggatcatggtatcccgcagtgagattgacctgctcaacatccggagggaattcattgagaaatatgacaagtctctccaccaagccattgagggtgacacctccggagacttcctgaaggccttgctggctctctgtggtggtgaggactagggccacagctttggcgggcacttctgccaagaaatggttatcagcaccagccgccatggccaagcctgattgttccagctccagagactaaggaaggggcaggggtggggggaggggttgggttgggctcttatcttcagtggagcttaggaaacgctcccactcccacgggccatcgagggcccagcacggctgagcggctgaaaaaccgtagccatagatcctgtccacctccactcccctctgaccctcaggctttcccagcttcctccccttgctacagcctctgccctggtttgggctatgtcagatccaaaaacatcctgaacctctgtctgtaaaatgagtagtgtctgtactttgaatgagggggttggtggcaggggccagttgaatgtgctgggcggggtggtgggaaggatagtaaatgtgctggggcaaactgacaaatcttcccatccatttcaccacccatctccatccaggccgcgctagagtactggaccaggaatttggatgcctgggttcaaatctgcatctgccatgcacttgtttctgaccttaggccagcccctttccctccctgagtctctattttcttatctacaatgagacagttggacaaaaaaatcttggcttcccttctaacattaacttcctaaagtatgcctccgattcattcccttgacactttttatttctaaggaagaaataaaaagagatacacaaacacataaacacaaaaaaaatga

SEQ ID NO: 341294 - DNA, 1804 bp, Homo sapiens
ttcactcacacagagaccaaactgctagttaacactgtgaggcatgtgcgtgtccttctgttctcttccaatacttacaagtagaaatttctattcagatgttcatgtgtatatgtggtgttatacacacacgcctatataccttttctgtttggggggctggaaggcaaagcagttcacatgggaggttctggggatcttgagaggctggcatagtcagccttggttgtgccaaggtcttgggcctgagggccatgtctggaggtgaggagaaaatccaggaatgcttggcctgagctttagccgtccgggccccatggacctctgcacaggaggtcagaactatggctgagatcatctttgccttgacattccagggagccggcacagatgaaaaggctcttattgaaatcctggccactcggaccaatgctgaaatccgggccatcaatgaggcctataaggaggactatcacaagtccctggaggatgctctgagctcagacacatctggccacttcaggaggatcctcatttctctggccacggggcatcgtgaggagggaggagaaaacctggaccaggcacgggaagatgcccaggtggctgctgagatcttggaaatagcagacacacccagtggagacaaaacttccttggagacacgtttcatgacgatcctgtgtacccggagctatccgcacctccggagagtcttccaggagttcatcaagatgaccaactatgacgtggagcacaccatcaagaaggagatgtctggggatgtcagggatgcatttgtggccattgttcaaagtgtcaagaacaagcctctcttctttgccgacaaactttacaaatccatgaagggtgctggcacagatgagaagactctgaccaggatcatggtatcccgcagtgagattgacctgctcaacatccggagggaattcattgagaaatatgacaagtctctccaccaagccattgagggtgacacctccggagacttcctgaaggccttgctggctctctgtggtggtgaggactagggccacagctttggcgggcacttctgccaagaaatggttatcagcaccagccgccatggccaagcctgattgttccagctccagagactaaggaaggggcaggggtggggggaggggttgggttgggctcttatcttcagtggagcttaggaaacgctcccactcccacgggccatcgagggcccagcacggctgagcggctgaaaaaccgtagccatagatcctgtccacctccactcccctctgaccctcaggctttcccagcttcctccccttgctacagcctctgccctggtttgggctatgtcagatccaaaaacatcctgaacctctgtctgtaaaatgagtagtgtctgtactttgaatgagggggttggtggcaggggccagttgaatgtgctgggcggggtggtgggaaggatagtaaatgtgctggggcaaactgacaaatcttcccatccatttcaccacccatctccatccaggccgcgctagagtactggaccaggaatttggatgcctgggttcaaatctgcatctgccatgcacttgtttctgaccttaggccagcccctttccctccctgagtctctattttcttatctacaatgagacagttggacaaaaaaatcttggcttcccttctaacattaacttcctaaagtatgcctccgattcattcccttgacactttttatttctaaggaagaaataaaaagagatacacaaacacataaacacaaaaaaaatga

SEQ ID NO: 341295 - DNA, 1351 bp, Homo sapiens
  misc_feature (1332)..(1332): n is a, c, g, or t
  misc_feature (1337)..(1337): n is a, c, g, or t
gccacgtgtccggctcggagcccacggctgtcctcccggtccgccgcgcgctgcggttgctgctgggctaacgggctccgatccagcgagcgctgcgtcctcgagtccctgcgcccgtgcgtccgtctgcgacccgaggcctccgctgcgcgtggattctgctgcgaaccggagaccatggccaaaccagcacagggtgccaagtaccggggctccatccatgacttcccaggctttgaccccaaccaggatgccgaggctctgtacactgccatgaagggctttggcagtgacaaggaggccatactggacataatcacctcacggagcaacaggcagaggcaggaggtctgccagagctacaagtccctctacggcaaggacctcattgctgatttaaagtatgaattgacgggcaagtttgaacggttgattgtgggcctgatgaggccacctgcctattgtgatgccaaagaaattaaagatgccatctcgggcattggcactgatgagaagtgcctcattgagatcttggcttcccggaccaatgagcagatgcaccagctggtggcagcatacaaagatgcctacgagcgggacctggaggctgacatcatcggcgacacctctggccacttccagaagatgcttgtggtcctgctccagggaaccagggaggaggatgacgtagtgagcgaggacctggtacaacaggatgtccaggacctatacgaggcaggggaactgaaatggggaacagatgaagcccagttcatttacatcttgggaaatcgcagcaagcagcatcttcggttggtgttcgatgagtatctgaagaccacagggaagccgattgaagccagcatccgaggggagctgtctggggactttgagaagctaatgctggccgtagtgaagtgtatccggagcaccccggaatattttgctgaaaggctcttcaaggctatgaagggcctggggactcgggacaacaccctgatccgcatcatggtctcccgtagtgagttggacatgctcgacattcgggagatcttccggaccaagtatgagaagtccctctacagcatgatcaagaatgacacctctggcgagtacaagaagactctgctgaagctgtctgggggagatgatgatgctgctggccagttcttcccggaggcagcgcaggtggcctatcagatgtgggaacttagtgcagtggcccgagtagagctgaagggaactgtgcgcccagccaatgacttcaaccctgacgcagatgccaaagcgctgcggaaagccatgaagggactcgggactgacgaagacacntgcanccagaggacacttt

SEQ ID NO: 341296 - DNA, 1052 bp, Homo sapiens
  misc_feature (48)..(48): n is a, c, g, or t
  misc_feature (54)..(55): n is a, c, g, or t
tctagaggatccgcgtgtggttctgtctggggatgtcagggatgcatngtggcnnttgttcaaagtgtcaagaacaagcctctcttctttgccgacaaactttacaaatccatgaagggtgctggcacagatgagaagactctgaccaggatcatggtatcccgcagtgagattgacctgctcaacatccggagggaattcattgagaaatatgacaagtctctccaccaagccattgagggtgacacctccggagacttcctgaaggccttgctggctctctgtggtggtgaggactagggccacagctttggcgggcacttctgccaagaaatggttatcagcaccagccgccatggccaagcctgattgttccagctccagagactaaggaaggggcaggggtggggggaggggttgggttgggctcttatcttcagtggagcttaggaaacgctcccactcccacgggccatcgagggcccagcacggctgagcggctgaaaaaccgtagccatagatcctgtccacctccactcccctctgaccctcaggctttcccagcttcctccccttgctacagcctctgccctggtttgggctatgtcagatccaaaaacatcctgaacctctgtctgtaaaatgagtagtgtctgtactttgaatgagggggttggtggcaggggccagttgaatgtgctgggcggggtggtgggaaggatagtaaatgtgctggggcaaactgacaaatcttcccatccatttcaccacccatctccatccaggccgcgctagagtactggaccaggaatttggatgcctgggttcaaatctgcatctgccatgcacttgtttctgaccttaggccagcccctttccctccctgagtctctattttcttatctacaatgagacagttggacaaaaaaatcttggcttcccttctaacattaacttcctaaagtatgcctccgattcattcccttgacactttttatttctaaggaagaaataaaaagagatacacaaacacataaacacaaaaaaaatga

SEQ ID NO: 341297 - DNA, 1205 bp, Homo sapiens
gccacgtgtccggctcggagcccacggctgtcctcccggtccgccgcgcgctgcggttgctgctgggctaacgggctccgatccagcgagcgctgcgtcctcgagtccctgcgcccgtgcgtccgtctgcgacccgaggcctccgctgcgcgtggattctgctgcgaaccggagaccatggccaaaccagcacagggtgccaagtaccggggctccatccatgacttcccaggctttgaccccaaccaggatgccgaggctctgtacactgccatgaagggctttggcagtgacaaggaggccatactggacataatcacctcacggagcaacaggcagaggcaggaggtctgccagagctacaagtccctctacggcaaggacctcattgctgatttaaagtatgaattgacgggcaagtttgaacggttgattgtgggcctgatgaggccacctgcctattgtgatgccaaagaaattaaagatgccatctcgggcattggcactgatgagaagtgcctcattgagatcttggcttcccggaccaatgagcagatgcaccagctggtggcagcatacaaagatgcctacgagcgggacctggaggctgacatcatcggcgacacctctggccacttccagaagatgcttgtggtcctgctccagggaaccagggaggaggatgacgtagtgagcgaggacctggtacaacaggatgtccagccccttgctacagcctctgccctggtttgggctatgtcagatccaaaaacatcctgaacctctgtctgtaaaatgagtagtgtctgtactttgaatgagggggttggtggcaggggccagttgaatgtgctgggcggggtggtgggaaggatagtaaatgtgctggggcaaactgacaaatcttcccatccatttcaccacccatctccatccaggccgcgctagagtactggaccaggaatttggatgcctgggttcaaatctgcatctgccatgcacttgtttctgaccttaggccagcccctttccctccctgagtctctattttcttatctacaatgagacagttggacaaaaaaatcttggcttcccttctaacattaacttcctaaagtatgcctccgattcattcccttgacactttttatttctaaggaagaaataaaaagagatacacaaacacataaacacaaaaaaaatga

SEQ ID NO: 341298 - DNA, 721 bp, Homo sapiens
gccacgtgtccggctcggagcccacggctgtcctcccggtccgccgcgcgctgcggttgctgctgggctaacgggctccgatccagcgagcgctgcgtcctcgagtccctgcgcccgtgcgtccgtctgcgacccgaggcctccgctgcgcgtggattctgctgcgaaccggagaccatggccaaaccagcacagggtgccaagtaccggggctccatccatgacttcccaggctttgaccccaaccaggatgccgaggctctgtacactgccatgaagggctttggcagtgacaaggaggccatactggacataatcacctcacggagcaacaggcagaggcaggaggtctgccagagctacaagtccctctacggcaaggacctcattgctgatttaaagtatgaattgacgggcaagtttgaacggttgattgtgggcctgatgaggccacctgcctattgtgatgccaaagaaattaaagatgccatctcgggcattggcactgatgagaagtgcctcattgagatcttggcttcccggaccaatgagcagatgcaccagctggtggcagcatacaaagatgcctacgagcgggacctggaggctgacatcatcggcgacacctctggccacttccagaagatgcttgtggtcctgctccagggaaccagggaggatacatgacgtagtgagcgatcagagaaagtacactctagat

SEQ ID NO: 341299 - DNA, 444 bp, Homo sapiens
ctgtctgggggagatgatgagtaagtggcttcttggcccctggctggagggcatggccttggggtgccaggcggggactctcctggctcgcatcctgatgggtggattggatgagctggggattcccctgagccaggagcgtcgcacaagtgaaaggcggcttttgctggtagctgctgtgcttgtgggtctgtgtgtctgagagtgtgggggtctgaacgtgagcgtggtctcctgtatatggagatgtctgctcttgtgaacttggaaagtcagtctggggttgtggactaggaaccagaatatgagcatccaatccctgctatttcatagccatttctcggtttcatcacctgttaaatgggaaaaggacacattcctgctctgcctactcatttatgcagcatatttgtgttaagtgccttctgggtgcagaccctgtga

SEQ ID NO: 341300 - DNA, 253 bp, Homo sapiens
cagcatagatttaatttgtttgtatataactaaattactacttgaacatgtatagctccttctatagctccctgctcaatgtgcagtttactcataatttttagattggtctccagctgctcctgcctcagggtggcattgaggctacacattaaattttccacctacttccaatcttctaagctttatctatgctgtaagtttttaaacttttttacattaattattactctgagaaattaattaaagagat

SEQ ID NO: 341301 - DNA, 503 bp, Homo sapiens
tctttattccatccacaactttaattctcctttgccaggtaacacaacataggctgtggttttggggattaggatgtggacatatttgagggtcattattctattacagtagcactggggtggtggagcccaggaaattacccttttaacagtcattccagctgattctaatgaaaacaatcatgacaacacaatttgagaaacactcctttggttatttacgcataacagctatatttattcaactttggaattcaaacaaacacagaggtggtttaagactttttaaacagaagatttagtacaaagagaaaagtaaaatcagactctgataaacacggttatctacaaagacctgtttacacagaaagaagagacactggccgatttcttgatctttccctgttttattctgaaaacagcctgaaaaccaaatattaggaataacacctataatataacttaagttatgacattaaattttacttggttttaaaagtata

SEQ ID NO: 341302 - DNA, 422 bp, Homo sapiens
tctttattccatccacaactttaattctcctttgccaggtaacacaacataggctgtggttttggggattaggatgtggacatatttgagggtcattattctattacagtagcactggggtggtggagcccaggaaattacccttttaacagtcattccagctgattctaatgaaaacaatcatgacaacacaatttgagaaacactcctttggttatttacgcataacagctatatttattcaactttggaattcaaacaaacacagaggtggtttaagactttttaaacagaagatttagtacaaagagaaaagtaaaatcagactctgataaacacggttatctacaaagacctgtttacacagaaagaagagacactggccccgcacatccgtactgcccgggatcctctgagtcaac

SEQ ID NO: 341303 - DNA, 402 bp, Homo sapiens
cacagtgaggatgtgggtaaaacatgtcacctggcatggtgcctggcatggtccctgctcaagaaacgcgagctgctgtcaagattaggggaggcggagtagcctagtgtttaagaacccaggcttggccgggcacagtggctcaggcctgtaattctagcactttgggaggccagggagggtggatcacttgaggccaggagttcgagactagcctggccaacatggcgaaaccctatctctattaaaaaggcaaaaattagctgagcatggtggcgggcgcctgtagtcccagctacctggggggctgagacaggagaaatgcttgaacccgggaggtggaggttgcagtgagccgagatcgctctgctgcactccagcctgggggacagagcaagactc

SEQ ID NO: 341304 - DNA, 333 bp, Homo sapiens
tctgcgtacgtgcccatgactgacatcaatgtgtgtccatgtgaggtcatgtgtatggtgtgatatccatgtgtggtgcccatgtgtgccatgtgatacccgtgtgtgtgtgctgtgacatctgtatgtccccgtgcggcccatgtgtgtgctgcgatgtccatgtgtgatgtctgtgtggggtccacgtgtgtgctgtgatgtccgtgtgatgtctatgcaggcctgtgtgagacccatgtgtgctgtgtgaggctgtgtgtactgtgacatctgtgtgttatctgtgcgtgcccatgaggcctgtgtgtgctgtgatgtccgtgtgtgatg

SEQ ID NO: 341305 - DNA, 1122 bp, Homo sapiens
acagggctggaggagcaattggaggagcccagcaggctggacacatgtggagagttgatatggaaactgagccctcacacatggactgaattctgacaagcagaggataaaggcagaacaacatgactgaaggcgatgaggaacagctgatcacctgtggaagtcatttgtcctaaattgtcatggacagaccatgtgccttacagcaagaaaattctgtgaataaacaggaagccagccagccagggaagatgcttttgtgatatatcccagcatgctgatgaccccaaggaggaccactggatacctagcaaggagctggctgcagcataccatgaatcctcacagcaacttaatgaggaaaaagaagaactgattgaagagtggcaaccagaacctcttgttcctcctgtcccaaaagaccatcctgctctcaactacaacatcgtttcagggcaatatgataaaattgaaaaatttcacaaatgtcaggagaacaagatctggtgtctgggtttcaactcttagagcttcccagctcgtagctatgctcctgaattcctctggcagccctcctcaaggacctctgtgagacaaagtcagaaatgacttcactggagaccaagagagcccacagagctcttcctgctgcttcttctacccttgtactcactcggctctctaaatttgtctcagctccagatccttttatcaatattttaatggattcactatgaaagaaggcctttgcattgctgctgactccatcagaatctcagaagtcttcctggatcagaaggggacccaattagaacctggaaggcccgctactcataggcaggaggccagaagacttgccctagtgccgaaatgttgttctgttaatgtgtatctcatgcccagtatttcttattaataaggcactaaataagggacaatccagcgtttccattgccaaaagaacacatctcccttttaattaatcaatgtaaatggccttttactggaaaatagaagtaaagtattcctagaacataggatataatgttacattggggaatatcatgccctctttttattttaaagtggagatttttttttttaatgtagagacactaggtc

SEQ ID NO: 341306 - DNA, 944 bp, Homo sapiens
acagggctggaggagcaattggaggagcccagcaggctggacacatgtggagagttgatatggaaactgagccctcacacatggactgaattctgacaagcagaggataaaggcagaacaacatgactgaaggcgatgaggaacagctgatcacctgtggaagtcatttgtcctaaattgtcatggacagaccatgtgccttacagcaagaaaattctgtgaataaacaggaagccagccagccagggaagatgcttttgtgatatatcccagcatgctgatgaccccaaggaggaccactggatacctagcaaggagctggctgcagcataccatgaatcctcacagcaacttaatgaggaaaaagaagaactgattgaagagtggcaaccagaacctcttgttcctcctgtcccaaaagaccatcctgctctcaactacaacatcgtttcaggaaacatctgcgtgagaagggcccctctcataaaatgaaaacaaaggacagaaagcattgctgagggcttaaggtgtggatgaaatgacacattgaagctgaagaatccccatgttgacagcattcaatccaagaaaagctccactgtacacatgttctaacatatgagtgatccaaaagagagagcttcacatacaatatcctatgcctactttctcagctcagagagagaggctcagtcattcataaactggagcaacattcatgtactgcggaccactttgaaagacttatctgtctcctgtttacagatgtgtacagcaagctgcaaagcactgcctgtccttttactcacaatcaattgcagagaacatgaagtacagaagacaacagctttttttttcttttggaaaatcccttaagtcctttccgtgctgtgctatcattgttcaggtgctaaagtgaaataaatgtgtcgtctaatcactaa

SEQ ID NO: 341307 - DNA, 604 bp, Homo sapiens
gagccctctttgccttcgagatgctctgcaccatgctggggaaactttttgagccgtatgtggttcacgtgctgccccatctgctcctgtgctttggggatggaaaccagtatgtgcgtgaggctgcagatgactgtgccaaggctgtgatgagcaacttgagtgctcacggggtgaagctggtgctcccctccttactggctgccctggaggaggaatcgtggcggaccaaagctgggtcagtggagcttcttggggcaatggcgtactgtgctcctaagcagctgtcatcctgtctacccaacattgtgcccaagcttacggaggtgctgaccgactcccatgtcaaagtccagaaggctggacagcaggcgctcaggcagatcggctccgttatcaggaacccggagatcctggccattgctccagtcctcctggatgccctgacggatccctccaggaagacccagaagtgcttgcagaccctgctggacaccaagtttgtccacttcattgatgccccatccctggccctcatcatgcccattgtccagagagccttccaggaccgttccacggacacgcggaagatggcagcccagat

SEQ ID NO: 341308 - DNA, 297 bp, Homo sapiens
tggacagttccctcctgaaatgcagggatggaggaaacaatcagaatgccttctgctgccatcttcaatgaagcactgactatgtgcctgctgtatgccgggcatgcttccctttgtgtatcctgaattcagcagtattcagcacatatttattgagtgcctgctaccatgtaccacatattcctctagactctgggcacatagcagtgaacaagacagataagacttctgccttgtggaacttaaaatgcattaggaaaaagcacaataatcagataagcatatatatattggata

SEQ ID NO: 341309 - DNA, 146 bp, Homo sapiens
ggaataacggattctgctcttaagggtagtgccagagctaggaggaatgtggagtcagtgccaagcgaggagccttataatcttatgtctttctcttatcttttcctccctctctcctctgcctccatcctccccctgtcctttgt

SEQ ID NO: 341310 - DNA, 390 bp, Homo sapiens
ctcccttgcagaaagtcagctcacaggaagcaggaccaaaatgttttgctcgccgctgtggctttatcaacaaaaatactatctgacactgacttattcgttgcataagtaaaggaaataaacagctggctttcccctatggaaatgaggaactgctgaagattctgaggaggctgggtaacagaactcaggccctaggagatgaatggttggttaagtaagcaacgatatgattgcacacagaggggatggggcactgagagcagttttggaagactcctgccacagtccagcgtgagggagaccaacatgcactggggggtggtagtgacatgtttgacatccttccttctcctctactcggtatacacgtaaggctctgtgttaggc

SEQ ID NO: 341311 - DNA, 1061 bp, Homo sapiens
gcccagaatgcagcgtggaggactcaaaactcagcctggttttagacaaggatgaagtggccccgcagtctgccatccacatggatctgcctcctgagagggatggagagaaggggaggagcacaaagcctggctttgccatgccaaaacttgcacttcccaaaatgaaggcttctaagagtggggtcagcctgccacagagagacgtggatccttccctttctagtgccacagcagggggtagctttcaagacacagaaaaggccagcagtgacggtggtaggggaggacttggtgcaacagcaagtgccacaggaagtgagggtgtgaacctccaccggccacaggtccacattcccagtttgggctttgccaaacctgatctcagatcctccaaggccaaggtggaggtgagccagcctgaagctgacctgcctcttcccaaacatgatctgtctaccgaaggtgacagcagaggatgtgggctcggggatgtcccagtgagccagccttgtggggaggggatagcccccacacctgaagatcccctccagccatcctgtagaaaaccagatgctgaagtcctcacagtggaaagcccagaggaggaagccatgaccaagtactcgcaggaaagctggtttaaaatgcccaagttccgcatgcccagccttaggcgctctttcagggacagaggcggggctggaaagctggaagtggctcagacacaggcaccggcagcaacagggggtgaagcagcagctaaagtcaaagagttccttgtttctgggtcaaacgtggaggcagctatgtccctacagctcccagaggcagatgcagaagtgacagcttctgagagcaaatcatccacagatattctaaggtgtgatcttgacagcacaggcttgaagctgcacctctccactgctgggatgactggggatgagctttccacttctgaggtcaggatccatccatccaaaggacctctcccttttcagatgcctggcatgaggcttccagaaacccaggttcttccaggagaaatagatgagactcct

SEQ ID NO: 341312 - DNA, 1017 bp, Homo sapiens
ttcgtaattgtccagaatctacagtaattctgatgcaggttgactcagtgtccatattttaagaaccactagtttaatgatgattccactggttggaatcatctctttggctggtcccaggataccctgaaggcagtaggttgtgcagaatcagatggaacacacttatggaggcatgagagtcaccaagtgaaccttttgtgcaaaagtgcaaatttgatttggaattctcaaagtcctatttattacaaaaacaaaggaacccagtcaaatgaaatgtgctggatagaaaattgtggtctttccatagaaaaacctgtttcaccagtgctttgttattcgaatatttaaggtattcatatttcaagtttattaaaccagtttaaatgctcctccacctacttatgattaaaactttcaactctttattaccttggttaatgttgactaaggacctccatgttgagggaaagtgctggggttaagcaaattgaacctttgtaggcccagacaggaccttaatcaagatataagaggccaggtgtggtggctcacacccataatcccagttttgggtggccgaggtggaagaatcgctgcagcccagggatgctgaggctgcaatgagccttgatcatgccactgcactccagcctgagcaacaaagccagaccctgtcttaaaagaaaaaacaaagaccctgaactgcagtcacactttcctaaatacctagtaaaattagctggttaaatctagtaagacgttccccaaagatttacggcagatgctgttttatatatattgctgtgtccctctgtgacaggaagttacagggttctttttaccagtagtcctgtacccggggccttgcaaatcagtgtcatatggtagagaacagaatctgatcacatttcctacttcctaagcaagtaccagaatatacttactaagcttgtatactgccctcaactgctatatatttttttcttttttttttttttttggtgatagtagggt

SEQ ID NO: 341313 - DNA, 585 bp, Homo sapiens
aaatcacacacccaaaaagcttaggtgataactgcaaaggatttttttgggggcggttgaaggagaaaaagggaaggagtatttttgcaatttaaacatcctctgtaatttttcccgtaaaatcattcgtaaaataaacattactcattagtgccttatgaagttctccttttggggaatgtgattaaacatatggcctttattttatttttttgagatggagtctcgctcttgcccagaccctgtcttaaaagaaaaaacaaagaccctgaactgcagtcacactttcctaaatacctagtaaaattagctggttaaatctagtaagacgttccccaaagatttacggcagatgctgttttatatatattgctgtgtccctctgtgacaggaagttacagggttctttttaccagtagtcctgtacccggggccttgcaaatcagtgtcatatggtagagaacagaatctgatcacatttcctacttcctaagcaagtaccagaatatacttactaagcttgtatactgccctcaactgctatatatttttttcttttttttttttttttggtgatagtagggt

SEQ ID NO: 341314 - DNA, 492 bp, Homo sapiens
ctctaagagactctgcgaagagacacattgctttggaggaatcagccccaggccaaagcaacaagcaacaccagagtcctgcggagagctgagaagcaactcgcccactcagacatagacacacagatggacaaactgggatgcagtcctggatctaaacaactctgcaacctgcttcctggggacattcacgcccttgccacagttgcaggaagctggatcgggcgtttggggctggtgagggaaatacagcagcctggaaatgtcaatcagtgtttttctcagactttaaggcactgggaagtggggccagggaggcgtccactgtttctctagttgcctcagccacagcacctacattaaggaggctgcaaaactggtttcaatctgacgtggaaaagatgtctttcagcaattggtgattatatgaattgccactcccttcgatggaagctgccttggaaataaaggcagttgccctagtgagttcag

SEQ ID NO: 341315 - DNA, 312 bp, Homo sapiens
acagaatacaccccgtttttcacctccttcttttaagatgaagttacatactgttcaactataccagaccatttaccactgttgtcagagacacagaaaattagaagttatccccaaaaaactggatcaagtcccctactctcagggatccccaattccaacaaaacctttcagtggctcctcaatgcttaaagaagatgtctctcctcaagtccaaataacatctccttgaaattcccactactccctaacctttctaccattcccaaaggtcactcttagccctactgccacacacacccctccccctcc

SEQ ID NO: 341316 - DNA, 443 bp, Homo sapiens
gcttttcctgttttaagtgtcttttatgtttattttatagtttgtttgtccaaattgggatcttaacattccacttggttggtttgcagtttttggttcaacttttcctttcctacttctttttttaacttaaaatttgagaataagttttttttttccacatttcgaacttttctaattgcagccctgtgataacatttaaaatgtcatctgatagtttttaatgtttttactgtaaacctgggtttgctgtaaaccattagtgatatctagagatttgattagattttaggttttttttttaggtttttctttttggccaaaaacttcataagtggcttgtacttctttctgcatcctctcaggaggcacacaaggctggttgtctttttctttttctttctttccttttttttttttttgtctggctctgctgcctaggc

SEQ ID NO: 341317 - DNA, 152 bp, Homo sapiens
ctgtaccaatgaagttgtcatctttccattccttcaagtaactagggctttatgtcagctgggatggatctttcggaagtccctctattagcactttgccattgtgagtacagagacaccccagaagttcctgcttctgtattcttcccatt

SEQ ID NO: 341318 - DNA, 1021 bp, Homo sapiens
agcggccttttgcaggacgtcacggaggactgcaggggcctgagccgctgctgccgccgccgccgcgcagccccacatcaacgcaccggggtcctgtcaccgccaccgccaaaaaagtcaccgccgctagggtcgccgttgcatcggtgcagggcaagatggcatccgccacagactcgcgctatgggcagaaggagtcctcggatcagaacttcgactacatgttcaagattctcatcatcggcaacagcagcgtgggcaagacgtccttcctcttccgctatgctgacgactcgttcacgcctgccttcgtcagcaccgtgggcatcgacttcaaggtcaagaccatctatcgcaacgacaagaggatcaagctgcagatctgggacacagcagggcaagagcggtaccggaccatcaccaccgcatactaccggggcgctatgggcttcatcctcatgtatgacatcaccaacgaggaatccttcaatgcagtgcaggactggtccacccagatcaagacctactcatgggacaatgcccaggtgctgctggtaggaaacaagtgtgacatggaggatgagcgggtggtgtcatcagaacgtggccggcagctagctgaccaccttgggttcgagttctttgaggcaagcgccaaggacaacattaacgtcaagcagacctttgagcgcctggtggatgtcatctgcgagaagatgtccgagtcgttggacacggcggaccctgcggtcacaggcgccaagcagggcccacagctcagtgaccagcaggtgccaccgcaccaggactgcgcctgctgagagccatcccactccctttcccctcttccctgtcttccccaccttcccccaactacccgggcctgacccggcccctaccagccacgggcacaagacccctgctcctgacttagcccgtcacccttatttattattgtagctatttatttatttattgaagatagggtcttgctatgttgcccaggctggtctcgaacacc

SEQ ID NO: 341319 - DNA, 1269 bp, Homo sapiens
agcggccttttgcaggacgtcacggaggactgcaggggcctgagccgctgctgccgccgccgccgcgcagccccacatcaacgcaccggggtcctgtcaccgccaccgccaaaaaagtcaccgccgctagggtcgccgttgcatcggtgcagggcaaggacacagcagggcaagagcggtaccggaccatcaccaccgcatactaccggggcgctatgggcttcatcctcatgtatgacatcaccaacgaggaatccttcaatgcagtgcaggactggtccacccagatcaagacctactcatgggacaatgcccaggtgctgctggtaggaaacaagtgtgacatggaggatgagcgggtggtgtcatcagaacgtggccggcagctagctgaccaccttgggttcgagttctttgaggcaagcgccaaggacaacattaacgtcaagcagacctttgagcgcctggtggatgtcatctgcgagaagatgtccgagtcgttggacacggcggaccctgcggtcacaggcgccaagcagggcccacagctcagtgaccagcaggtgccaccgcaccaggactgcgcctgctgagagccatcccactccctttcccctcttccctgtcttccccaccttcccccaactacccgggcctgacccggcccctaccagccacgggcacaagacccctgctcctgacttagcccgtcacccttatttattattgtagctatttatttatttattgaagatgtcccccaggggcccaggctcccctgcccgccccaagccctgcccctcctgtacatatagccctttccccactcagctgtggtgtctcgtggccccgtgaactcaccgctcaccctcctgaaccccccccccgcctttttttaaaattcacccccatccacagttgtcagttgtgaagaggggccagatgacaccctaaagcaggctgatcgggcaatgggaggtggccaggcctgccagcccctcggctctgccgcggtgggccgaggccgctgttgggggtttccctgtgtggaccatggggatcagagtctggcctgccaggctcctctccccgttttctcttttggtgggggggtgtgctgtgggtattcaccaccctgggaccccccccccccccgcccaccagacctgttctgacctcatgagtgtcaaacgtgccccccagttccttaggagatgtcatgacaacactacacgcacccaataaagcgaatggaccatcaaaaaaaat

SEQ ID NO: 341320 - DNA, 465 bp, Homo sapiens
gcacgtggggccgcgcggccgggttctgaggaccatgaaagattgatggggggcggagccagccgcagtcaccccctccgggctcagccctgggtttagggttacagccccacctggggcacctgccccttgaagggggctgctggggtgtccccatcggcaaccctctgagcccctcctctgaaacgcccaggatttcaaggtcacaggctgccctctgctgggggcaccaccaattaatactggggctcctgatgggataagggtgtcctccatacaccggccgttttctggagcccttgccatcttctgcctgggcttgggcacatgaggatggagagagcccccctcacggctctgctacacccggtatccccagatggcatccgccacagactcgcgctatgggcagaaggagtcctcggatcagaacttcgactacatgttcaagattctcatcatcgg

SEQ ID NO: 341321 - DNA, 525 bp, Homo sapiens
ttcctcttccgctatgctgacgactcgttcacgcctgccttcgtcagcaccgtgggcatcgacttcaaggtcaagaccatctatcgcaacgacaagaggatcaagctgcagatctgggtgggtcccagctggagggctcccgcccggctcggttggattcccgtacttggaaaagcagccccaacctcgtctatctctttcctgactggagtcattcacttacacactgggcatttatcagtaaggtgcccactgtgtaccggggcagaaacagcacctgtgttctcccataagcacctaatcctggtccctcagtttccccatcttcaagttcttccatgtatgaggtttcagctggatcttggtccccattctctttttttgtttgttttttgagacagggtggtcttgctctgtcccctaggctggaatgcagttacgtgatcacggctctctgcagcctcgacttcccaggctcaaaccattcttccacctgagcctcctgagtagctaggaccacgggct

SEQ ID NO: 341322 - DNA, 1497 bp, Homo sapiens
agcggccttttgcaggacgtcacggaggactgcaggggcctgagccgctgctgccgccgccgccgcgcagccccacatcaacgcaccggggtcctgtcaccgccaccgccaaaaaagtcaccgccgctagggtcgccgttgcatcggtgcagggcaagatggcatccgccacagactcgcgctatgggcagaaggagtcctcggatcagaacttcgactacatgttcaagattctcatcatcggcaacagcagcgtgggcaagacgtccttcctcttccgctatgctgacgactcgttcacgcctgccttcgtcagcaccgtgggcatcgacttcaaggtcaagaccatctatcgcaacgacaagaggatcaagctgcagatctgggacacagcagggcaagagcggtaccggaccatcaccaccgcatactaccggggcgctatgggcttcatcctcatgtatgacatcaccaacgaggaatccttcaatgcagtgcaggactggtccacccagatcaagacctactcatgggacaatgcccaggtgctgctggtaggaaacaagtgtgacatggaggatgagcgggtggtgtcatcagaacgtggccggcagctagctgaccaccttgggttcgagttctttgaggcaagcgccaaggacaacattaacgtcaagcagacctttgagcgcctggtggatgtcatctgcgagaagatgtccgagtcgttggacacggcggaccctgcggtcacaggcgccaagcagggcccacagctcagtgaccagcaggtgccaccgcaccaggactgcgcctgctgagagccatcccactccctttcccctcttccctgtcttccccaccttcccccaactacccgggcctgacccggcccctaccagccacgggcacaagacccctgctcctgacttagcccgtcacccttatttattattgtagctatttatttatttattgaagatgtcccccaggggcccaggctcccctgcccgccccaagccctgcccctcctgtacatatagccctttccccactcagctgtggtgtctcgtggccccgtgaactcaccgctcaccctcctgaaccccccccccgcctttttttaaaattcacccccatccacagttgtcagttgtgaagaggggccagatgacaccctaaagcaggctgatcgggcaatgggaggtggccaggcctgccagcccctcggctctgccgcggtgggccgaggccgctgttgggggtttccctgtgtggaccatggggatcagagtctggcctgccaggctcctctccccgttttctcttttggtgggggggtgtgctgtgggtattcaccaccctgggaccccccccccccccgcccaccagacctgttctgacctcatgagtgtcaaacgtgccccccagttccttaggagatgtcatgacaacactacacgcacccaataaagcgaatggaccatcaaaaaaaat

SEQ ID NO: 341323 - DNA, 1378 bp, Homo sapiens
gaattccgcgtagtcgccgttgcatcggtgcagggcaagatggcatccgccacagactcgcgctatgggcagaaggagtcctcggatcagaacttcgactacatgttcaagattctcatcatcggcaacagcagcgtgggcaagacgtccttcctcttccgctatgctgacgactcgttcacgcctgccttcgtcagcaccgtgggcatcgacttcaaggtcaagaccatctatcgcaacgacaagaggatcaagctgcagatctgggacacagcagggcaagagcggtaccggaccatcaccaccgcatactaccggggcgctatgggcttcatcctcatgtatgacatcaccaacgaggaatccttcaatgcagtgcaggactggtccacccagatcaagacctactcatgggacaatgcccaggtgctgctggtaggaaacaagtgtgacatggaggatgagcgggtggtgtcatcagaacgtggccggcagctagctgaccaccttgggttcgagttctttgaggcaagcgccaaggacaacattaacgtcaagcagacctttgagcgcctggtggatgtcatctgcgagaagatgtccgagtcgttggacacggcggaccctgcggtcacaggcgccaagcagggcccacagctcagtgaccagcaggtgccaccgcaccaggactgcgcctgctgagagccatcccactccctttcccctcttccctgtcttccccaccttcccccaactacccgggcctgacccggcccctaccagccacgggcacaagacccctgctcctgacttagcccgtcacccttatttattattgtagctatttatttatttattgaagatgtcccccaggggcccaggctcccctgcccgccccaagccctgcccctcctgtacatatagccctttccccactcagctgtggtgtctcgtggccccgtgaactcaccgctcaccctcctgaaccccccccccgcctttttttaaaattcacccccatccacagttgtcagttgtgaagaggggccagatgacaccctaaagcaggctgatcgggcaatgggaggtggccaggcctgccagcccctcggctctgccgcggtgggccgaggccgctgttgggggtttccctgtgtggaccatggggatcagagtctggcctgccaggctcctctccccgttttctcttttggtgggggggtgtgctgtgggtattcaccaccctgggaccccccccccccccgcccaccagacctgttctgacctcatgagtgtcaaacgtgccccccagttccttaggagatgtcatgacaacactacacgcacccaataaagcgaatggaccatcaaaaaaaat

SEQ ID NO: 341324 - DNA, 832 bp, Homo sapiens
agcggccttttgcaggacgtcacggaggactgcaggggcctgagccgctgctgccgccgccgccgcgcagccccacatcaacgcaccggggtcctgtcaccgccaccgccaaaaaagtcaccgccgctagggtcgccgttgcatcggtgcagggcaagatggcatccgccacagactcgcgctatgggcagaaggagtcctcggatcagaacttcgactacatgttcaagattctcatcatcggcaacagcagcgtgggcaagacgtccttcctcttccgctatgctgacgactcgttcacgcctgccttcgtcagcaccgtgggcatcgacttcaaggtcaagaccatctatcgcaacgacaagaggatcaagctgcagatctgggacacagcagggcaagagcggtaccggaccatcaccaccgcatactaccggggcgctatgggcttcatcctcatgtatgacatcaccaacgaggaatccttcaatgcagtgcaggactgatgacaccctaaagcaggctgatcgggcaatgggaggtggccaggcctgccagcccctcggctctgccgcggtgggccgaggccgctgttgggggtttccctgtgtggaccatggggatcagagtctggcctgccaggctcctctccccgttttctcttttggtgggggggtgtgctgtgggtattcaccaccctgggaccccccccccccccgcccaccagacctgttctgacctcatgagtgtcaaacgtgccccccagttccttaggagatgtcatgacaacactacacgcacccaataaagcgaatggaccatcaaaaaaaat

SEQ ID NO: 341325 - DNA, 275 bp, Homo sapiens
gaattgatcccccaaaagacatcacaattagcaatgtgaccaaggactcagtgatggtctcctggagccctcctgttgcatctttcgattactaccgagtatcatatcgacccacccaagtgggacgactagacagctcagtggtgcccaacactgtgacagaattcaccatcaccagactgaacccagctaccgaatacgaaatcagcctcaacagcgtgcggggcagggaggaaagcgagcgcatctgtactcttgtgcacacaggtgggaat

SEQ ID NO: 341326 - DNA, 715 bp, Homo sapiens
gggaattccatgcacattctcctagtgacaaaatgacagcccctgccagtctcttccgtctccattcctgcgtcgaggcctgaaatccagtcttccgtacctaccggagaccaaatgtgccaggcttgtcttacaatacttaacatttcctctgcctttctgtcttaaccttctaatcaactacattaaaaacctaggcccggccttcatctctttctttgccctccccaccccattcatcccatacctggttaacaatgatttgtccttcctgtgtgcccataggactcattcctttagtctagcacataccacactcattacttgttcagtgtctttccagctcccacccacagttccatgagaaagggaacagtgttttaatttttgtttccctccttcttactatagttcactatatatgtagtggagcctcaataaatattggttgaatgaatgttaattcgtaagtaaatataaaatgtattctgttactcataattatctgaataatcttaatgtatggactgtttgtaaaattgaacacattggaaaaatgttcatttattctgtaaacatttgcaaatgtctactatgatctggagctataaaaattttaagacaaaattcctgtcttcaaaattttcacagtgggatcagggaacagggaagcccgtatttatcagagtgcttttagtttatcatttgctattaa

SEQ ID NO: 341327 - DNA, 262 bp, Homo sapiens
gcagagcttgcggtgagccgagatgatgccactgcactgcagcctgggagacagcgagactcccgtctcaaaaaacaaaacaaaacaaacacaagacgattatctcagatgtctttacttatcctaaaagccaatgacttctgtacgattgcagcacaccccctgcccaacccaattctatatcctgtaaagaatataaccttgcatctatcaattataaaaatgtccttcatcatctataacccatctatatccttctccc

SEQ ID NO: 341328 - DNA, 658 bp, Homo sapiens
aaagagatgactaggctgagactgcctggaaagaaaaccccttagggaattggaggagaagacttccaagtctacatgcataagtacctccaactttgaccaaccagtgctaaaaacaggagtgggcgttggagctggtggatgggagtggggaaaggagagaggtcagtgccctggtcatctttatttgctagtccatgatgcagagaacgagagctccccctccaagcctacgtccagggcatatggcaaacaagaaaaggggcttcagtggaaggatctcattgtaaagaaacaattacaggaaggggtagtgtctgtggtaactaacttcaggctgcccctcaaaacacctaaaaagccctcttgccacggagaatcttcctgctgcctaattatttcccttccttaactgcccctcataccactgccccacaggtcagacagaactcttatccagccaagtaatgtatgaatatatctaaattctttcctttccctgtgagttggaaatatttaaaataaggacttacatggtaactagcagaatgacccattaaaccagaccatcacacaccacttcttatgaggttgcatgcggaaaggttactggacagatttttaaaaatgctttcattcttattgtaaagaacaaatc

SEQ ID NO: 341329 - DNA, 183 bp, Homo sapiens
agagcacgatcctgtctcaaaataaaaataaagaataaaaccagtgtttccacatctggaactttcttttcaagtttatatcacctctccttccaaatcaggtctcccctcttccaggaagtactccttgattaagccaaaaatgttttaattttcaccacttgtcctattactctgcatccc

SEQ ID NO: 341330 - DNA, 211 bp, Homo sapiens
aggatatttggatagctttgaggatttcgttggaaacgggattgtcttcatataaactctagacagaagcattcccagaagcttcattgggatgtttcaattgaagtcacagtgttgaacagtccctttcatagagcatgtttgaaacaatctttttgtagtatctggaagtggtcatttggagcgttctcaggactacggtgaaaaagga

SEQ ID NO: 341331 - DNA, 674 bp, Homo sapiens
tgagacagagtcttgctctgtcacccgggctggagtacagtggcacaatctcggctccctgcaacctccacctcctaggttcaagtgattctcatgctccagcctccctagtagctgggactacaggcgcacgccaccacgctcagctaatttttgtatttttagcagagagggggtttcaccatgttggccaggctggtctcgaactcctgacctcaagtgagccaccatccttggcttcccaaagtgctgggattacaggcgtgagtcaccatgcctggccttcaaattgtaattagcatgcatcactttatgttatggtctgaatatttgtgatccccaaaatttgtatgttgaaattctgacctccaaagtgataatactaggaggtagagcctttggaaggtgattaggtcagaaggctagagctctcatgaatgggattagtgcccttatggaagaggccccagggagctcccttacccaatgggaagactcagtctgcaaccccttagagagccctcaccagaacctgcccgtattggcaccctgatggtggactttcagcctccagaactgaaggaaatacatttctgttgtttttcagcccccagtctatggtgctttactataacagcccaaaaagactaaactacttgataatttaaaaaatt

SEQ ID NO: 341332 - DNA, 700 bp, Homo sapiens
caagcttggcccagcctcatccacagaaggatctggcagtgatatcttggcattcatagtctcagtgtgcaggacagcattggttccccaccctacagtcccagctctacctaggcagtatcatatgtatcatggtaatggctatggaaaataatatccctccctccctgcctcccttcccctcttcctctttttagagatgaggtcttgctgtgttgcccaggctggtctcaaactcctggcctcaagtgatcctcctatctcagcctcccaaagtgctgggattacaggtgtgagccaccgcatgcagcctctttcttttttgacagggtcttgctctgccatccaggctgaagtgcagtggtgtgatcttgtctcactgtagcctcaacctcctaggctcaagagagcctcccatctcagcctcttgagtatctgggactacaggcatgaactgccatgcctagctaattaaaaaaaaaaatatatatatatattatatatatatacacatacatatatatatatatgtatgtaaaatatatatatattttacagggtctcactttgttgctcaggctagtctagaactcctggtctccagcgattctcctgccttggtggcccaaaatgctgggattataggtgacagctactgtgcccaaccttgtttctttcagtgaccaaatagctttaaata

SEQ ID NO: 341333 - DNA, 355 bp, Homo sapiens
tcttgggttcaagtgatcctcctgcctcagcctcccaaagtgctgggattataggtgtgagcttctccactgactatgatttaattctaatgacagaatttaacccagttttatctttttctttcttagccattaaattttggttcaagcttcagaaattggaattccctattacctaaaagtatatgattttgataatgtgctgaaagttgccattgtttctctttactttttaaaatttcagtctttgttcccttgttttccatacacagcaaattcaatcttattttttttttaatgagccaataaatctagtttgttctgatgctagatttgaaagttaagatgaagatgg

SEQ ID NO: 341334 - DNA, 474 bp, Homo sapiens
gggatggtcgttactggaatgttagtactcctgattgaagttaccacaacttacgacgttgggaatatctttgaataattttttttttaaactaatactgtgccttaaaacccccagtgcgcgtcgtccacctgctctgctctttgccacctgtttgctgagcacctcggtgctttacgtgagcgtggtgtctgtcctgtgtttacaaagacatgagccttagggagtctttgatatgttaatgctcactgaatttctaaacccaaaacatttattttatcttttttccaagagagtctcactctgttgcccaggctggagttcagtggcacgatctcggctcactgcaacctctgcctcccaggttcaagcagttctcctgcctcaagcctcctgagtagctgggactacaggcacacgccaccacgcctggctaatttttgttttttgttttgttttgtttttttgagacag

SEQ ID NO: 341335 - DNA, 266 bp, Homo sapiens
tcaatattctatgaaatgacagattctgataagtgtttctcagtttcagtgggtgtaaatcttttgtttgtgggggttggtttcctttaggagaagttaattgaactgatcctcaaaggatgaaatttaaacacctcaaagtcagcatttctccgtgttgtccagtgcctagtgaagatgaagacttttcttgccattgcttgactccaagtaaagctgtgaatgtagttgagcgattctccagacctgccagctgcagtttccct

SEQ ID NO: 341336 - DNA, 175 bp, Homo sapiens
tggccttgagtcctaccacgctcacctcccagacaaatatacttagcaggtgttttccccacattaataatcagaattgacacattctaaatgaggccctccttgttgtgcagggcagctctgatggatatgtggggaattgacggctcttgagaaatgtttttgccactaccag

SEQ ID NO: 341337 - DNA, 109 bp, Homo sapiens
tggctaaaagagaacactcattctaggttgtctcttgaaaacaaacagcaatcgtcttggactccctcaattcttcttttattgtgaagtatagtgcagatactgaata

SEQ ID NO: 341338 - DNA, 154 bp, Homo sapiens
gtgaacgaatgaagggctagaatggacgccagtccagtttctcagcctcagcagtgttgatatttgttgccgtcctgggcacggcactgcagggtgttaagcatcatccctggcctccgccttttgcaggccagtagcagcccctctcaccatg

SEQ ID NO: 341339 - DNA, 318 bp, Homo sapiens
tcatcaaagtaaaacttttgataaccaaagagaattaggaaagtcctaacagcaagcagaggatgtgaaaaacaaaaagaattgtcttcaaaggagtagtgattagaatgactacttcctttttaacagaaatattacaagtataaagataaaagaaatttaaagtgctgaaagaaaataactgtcaatttagtatatctatatccataaaaaatgtcctccatgaatgtgaaacagatatcttttcagaaattaagagcattctccactggcaaacacatactaacattcagaaagaacaaaagaacatcagtgtac

SEQ ID NO: 341340 - DNA, 707 bp, Homo sapiens
taggcctgagcatcttctaagaacaaatgcaataatagccagtggaatggaatagcttccatattcctttaggtgggactttaaattctctcaataacaattcatattaaacgtcattccctttgtcaagagactgagttctttagttctgaccaccaaaccttactgttcacaagtgttagaattatgtcgtcctagagctggaagaacccactctgaagactacccactcattttgtaaagggtattagaacccaagaaaggggatggacttgaccagtgagtctgaaccaggactggagctaggatattctaccttctagctcagtgcttttgcatctttttgatgactattttgtgatttagttctatgatgaagcattcaaaataaatcccttaactgtccatgccactgtttattcatctgtaaaatgaagattgtaatttccccattgattttttttttttttaagttcctcaagagctgggactgtgccatccatctcagtatttcccaaggcacctaactcataaagtgctctacacacagagctgctcaataaatgttcactattgaatagttgaatgaatgaatgaatatgacttttaattgggctttgcaagtgatgactccttcagaattaaatgatttttcttctaagttgtgtgcacattctcagccattcatttgttaaatatctttcagg

SEQ ID NO: 341341 - DNA, 232 bp, Homo sapiens
atacagatgatggaatagtacccagccttaaaaagagaggaagttccgacgcagggagtgacacggaggggccctgaggaccttgtgctgagtgaaataagccagtcacaaaaggacgcatactgcataatgccacttataggagtccctagagtcatccaaatagagacggaatgtagaatggtgggtaccgggggctggggggaggggaaaagatgagttagtgtttgac

SEQ ID NO: 341342 - DNA, 281 bp, Homo sapiens
cctaacacttacaacccctcgcatacagtgtgttcaacacatgcttgtggaacaatgaatatggaataaaggaatgtccgtaatcacttttaaaaatatacatatatagtgcttgagaaagaaatacactggtgcttcccaaatatctgaaactatttactaagacatgcattagtatgtcttagagttaagagattactaaaactgattttactttagcaaatacccaagaagaaaacctaacctagaaaatggcacaagactgcaaacaaaaattggaa

SEQ ID NO: 341343 - DNA, 731 bp, Homo sapiens
gctctcggcgcgggcccctctgtctgtggtgatcttgtgatgaaccaggccaggtcagcgctccctcggcctcgggagctgaggagagcagttctgtccttagggacacgagccccctgacgctgcagcctctaccttgtggacgggacccctaccccaccccggctgcccacctggcaccgttgactgcagaacacctgcgtcccgtcccccgccccgcccctcgcccttgtccctgagccccatcccaccctctgtggaagagcctcatgctccaggcggggccggtgctgggcaccagccactcaggctctcccagggtgtgcatgtccccatctgccctctgctgtgcacacactgtctgggttgttcttagcgtggaatccgcgtgtgtggtggctacaggaatgtggaagccctgggcagcgtgtggctcacggtgttggtgccactcggcgcagactagggggcggccgcttcctctgctctacgaggctctggtgcccgtgacttacatctccttcttgtttctttctttcctccctccttcccttccttccttccttctgaaaaatgcactgtcttaggtgcacacaggaaaacattgtacacattcaccccatgaacccaccagcacgttgacagagcaggctcctgcacacagacagctccctcgggcccgtatttaccctatagcacccctatctaccccctctagagcagaagtcgac

SEQ ID NO: 341344 - DNA, 958 bp, Homo sapiens
gctctcggcgcgggcccctctgtctgtggtgatcttgtgatgaaccaggccaggtcagcgctccctcggcctcgggagctgaggagagcagttctgtccttagggacacgagccccctgacgctgcagcctctaccttgtggacgggacccctaccccaccccggctgcccacctggcaccgttgactgcagaacacctgcgtcccgtcccccgccccgcccctcgcccttgtccctgagccccatcccaccctctgtggaagagcctcatgctccaggcggggccggtgctgggcaccagccactcaggctctcccagggtgtgcatgtccccatctgccctctgctgtgcacacactgtctgggttgttcttagcgtggaatccgcgtgtgtggtggctacaggaatgtggaagccctgggcagcgtgtggctcacggtgttggtgccactcggcgcagactagggggcggccgcttcctctgctctacgaggctctggtgcccgtgacttacatctccttcccttccttccttccttctgaaaaatgcactgtcttaggtgcacacaggaaaacattgtacacattcaccccatgaacccaccagcacgttgacagagcaggctcctgcacacagacagctccctcgggcccccttctcccgtggcggccccgcgacgaccctgcgaggacccgggtcccgcttcctagagcagagggccttccccagctgtgccgaggtgggatcacgggcacgcagccttctgtgtccgcctcccgtcagtcggggtgatgcctctgggtctcacctgtgttttcatacgacccagcagtttctgataacggttccatcacgtgaacacagcacgatttgcttctccagactcttggtgatgcattttgtaagtttttggctaatattacaaacaaaacttgtgtgaacacatttctgcccgt

SEQ ID NO: 341345 - DNA, 294 bp, Homo sapiens
ctacatgggaggctgatgcaggaggatggcttgagcccaggaggttgaggctgcagtgagccataatcatgccactgcattccatcctgggcaacaaagcgagacccttgtcacaaaaaaacaaagcaaaacaaaaaatatgtatatagtgccaactgcctattagaaataactcccttttagtccttagagtgaagttattcccatttcacagatgagtaaacttggatgtactgaataacttgtccaaggtcacagaagttgtgcaaaattgagatttgaactcagggttgt

SEQ ID NO: 341346 - DNA, 454 bp, Homo sapiens
ctcacaatcaaggtagagatgcttctggagtggtggatggagttacctgtgttctactcccttggcagagcaggcatcagggtattaaaggggcaaagagctgacgtaggagtaggtagagctggaaggcactactgatatcttcccagccccatacagagtgtatttgcatcagacttgtctctaggttggagcggcctttcttgacatggggaaataatgcatctccagctcctggtgatgtcttgtctcgatcctggaaaggttggatcctggccaattgtccctagaagcattttgaggacccacctgtactgaagtccatctccctggggtagttttctaccaaaaccaagtgcccagcactgcctatgtctcttctttccccagcctgtagtcatgaggtgtagtgaagctttcagggaatagccagccacttgcagggcagttacag

SEQ ID NO: 341347 - DNA, 422 bp, Homo sapiens
cgtgtaagcgtggaatccgaccacattttgtacaaaatattagatctataaagtgcagcttttctgatgagatagaataatgaaggcaactgacattagagggctcttactagtttcagaagtatttttcaccccacacgttagatacaagtatacattttctttcctccctagatggacctccagttgtagctcattatgatatgtctgacaccaactctgacccagaagtggtaaatgtggacaatttattggcggctgcagtagttcaagagcacagtaattctgtaggcggccaggacacaggagctacctggaggaccagcgggcttctagaggagctgaatgcagaggcaggttggtcttccccatcccccttctctaacggtgtaatatgcatgtgtcctggagctgttttcctt

SEQ ID NO: 341348 - DNA, 257 bp, Homo sapiens
gttcttcaaacattttcccactgcactccgtccatcattcatttccagaatttcatagttaaatcatggagtagagtctaggaaatgatatcaaagatgcaaacaggaaagcaacctgctgcaggacagtagtaccagtgatagtgacctgacttgtgactcaagcacgagctcatcagatgatgatgaagaggtttcagggagcagcaagacaatcactgcagagataccaggtagaggatgttttttaaactgac

SEQ ID NO: 341349 - DNA, 2999 bp, Homo sapiens
gggcggaagtgaggcgcccagcggaacggcctctggtgacattttcttgggggcggcgcggacgactgaagggacttggtggtagaggctgcggaggcggcgaggttcactttggtcccggcaggggctctgaccgcgacccactgctcgctgccggggcttgttccgaggaggagaaggcggcggtggccgtcgcgtcctgagtcaccgcagcggggaagagtcccggccgggggttcggtgcgtgccccgacggggcgcgcgcgaagcgagcgagaaggcacggagtcgccgcggagcgcaggttgctttcctgttgcatctttgatatcatttcctagactctactccatgatttaacttgaaattctgaaatgaagatggaggaggcagtgggaaaagttgaagaactcattgagtccgaagccccaccaaaagcatctgaacaagagacagccaaggaggaagatggatctgtagaactggaatctcaagttcagaaagatggtgtagcggattctacagttatttcttcaatgccctgcttgttgatggaactgagaagggactcttctgagtctcagttagcatccacagagagtgacaagcctacaactggccgagtttatgagagtgactcctctaatcactgcatgctttccccttcctctagtggtcacctggctgattcagatacgttgtcttccgcagaagagaatgaaccctctcaggcagaaacggcggtagaaggagacccttcaggagtgtctggtgccacagttgggcgcaagtctaggcggtcccgatctgaaagtgaaacttccactatggctgccaagaaaaaccggcaatccagtgataaacagaatggccgagtcgccaaggttaaaggtcatcggagccaaaagcacaaggagaggatcaggctactgaggcagaaacgggaggctgctgcaaggaagaaatataacctgctgcaggacagtagtaccagtgatagtgacctgacttgtgactcaagcacgagctcatcagatgatgatgaagaggtttcagggagcagcaagacaatcactgcagagataccaggtcatttggatccaggattcctagcaagtgacaaaacatctgctggcaatgcgccactcaatgaagaaattaacattgcgtcttcagatagtgaagtagagattgtgggagttcaggaacatgcaaggtgtgttcatcctcgaggtggtgtgattcagagtgtttcttcatggaagcatggctcgggcacgcagtatgttagcaccaggcaaacacagtcatggactgctgtgactccccagcagacttgggcttcaccagcagaagttgttgaccttaccttggatgaggatagcaggcgtaaatacctactgtaatacaatgtcactgtgtttcctctgcactgttcccttccacttcctcatcctctttgtgacatggaagttcattgtcatagcttcagcttcagaagctgtttgtggcatttgtaggattcaaactcatggaaaattccctcctcttcccccctttttttaattaaaagaagtcacttaggaaaataacatcacagagaaaagaatttcttctttccctcagtaggaatatagaatgatgaattttattagacaactttattttacttggtgacttttaatcttaggaaactctgccttccttttagaataatattttaattgccaggcaaaatgggtttcagtttttgaatcttgtatttatttttctgtataatgaaattaatatctagacttgaccactatctgcccaccccattggcactcccatcttagggcattcgcacacatatcagtcaggtccttattggcacctagtagggcatgtgcatttaaaaacttgtccttaaaaatagaagacagaagtattaaaattatattttcttttattttaagtcttctgccttctttcttgagtttgctcctgttgacttcccacagcacagataattgacatgtccctttgtgtttataaatactactaaggtgacctagttggtctccttgttgcaataattaataactctttgcaaaatgtctcctttgagacagaggcatttcagatagatacccaccatgaggtgttctgggcatctgaaggtattaagagttcagtgggaaaaatctctctccctcgcctttttttctggtttagtcaaataacgggtgaacatagaaacctgttgggaagaatatgaaaagttatgtggcctctgaggctacaggcacttgcaaatccgagaggaaagtgccgtctttcatagctggtctctgtataaagagtatgtagcaacaactgtttaacatccgagatgaagtggacctgatgctgtatttgggtatttttctcctctaccttctaaaaaaaaataccataagaagaatcagaatgtaccataagaaatcagatgcaaagcacgttaatgtcattggtaagttttacagagtctaaaaggattagcaaagggtagcaggagcttcagggaattcaggaaatgccagcattggaattttgtggcattagttactaccttctttcttataatatgttgtagttactagtgaattcttttaaaagcaatacctagagttagaacactatgtactctgcacagggggagtgaagtaatattggcttagaagaacttcaccttttgtttttcatggtttttgtttgttttgtttttgtttttgtttccattgttaccgttgctatggccctttgcctgtctctccaaatcccctggtggctcttcttatcattaagagtatgagaattaccattttcagttttcattcagcaaacaaatttaccaagtgcctgctctgcataaggcactgtgaggggtgggtgctctgggggctgctgagatgaatgacacacaccgcacatacacatgcatcagtgtctgcctgcctccacctgcccagcctgtt

SEQ ID NO: 341350 - DNA, 958 bp, Homo sapiens
cgtgtaagcgtggaatccgaccacattttgtacaaaatattagatctataaagtgcagcttttctgatgagatagaataatgaaggcaactgacattagagggctcttactagtttcagaagtatttttcaccccacacgttagatacaagtatacattttctttcctccctagatggacctccagttgtagctcattatgatatgtctgacaccaactctgacccagaagtggtaaatgtggacaatttattggcggctgcagtagttcaagagcacagtaattctgtaggcggccaggacacaggagctacctggaggaccagcgggcttctagaggagctgaatgcagaggcaggtcatttggatccaggattcctagcaagtgacaaaacatctgctggcaatgcgccactcaatgaagaaattaacattgcgtcttcagatagtgaagtagagattgtgggagttcaggaacatgcaaggtgtgttcatcctcgaggtggtgtgattcagagtgtttcttcatggaagcatggctcgggcacgcagtatgttagcaccaggcaaacacagtcatggactgctgtgactccccagcagacttgggcttcaccagcagaagttgttgaccttaccttggatgaggatagcaggcgtaaatacctactgtaatacaatgtcactgtgtttcctctgcactgttcccttccacttcctcatcctctttgtgacatggaagttcattgtcatagcttcagcttcagaagctgtttgtggcatttgtaggattcaaactcatggaaaattccctcctcttcctcctaaaaaagtagtagtatgggccgggcgcagtgtctcacgcctgtaagcccagcactttgggaggccgaggcgggcggatgacgaggtcaggagatcaaaaccattctggctacggtgaaaccccgtctctacta

SEQ ID NO: 341351 - DNA, 1447 bp, Homo sapiens
  misc_feature (1243)..(1243): n is a, c, g, or t
  misc_feature (1313)..(1313): n is a, c, g, or t
  misc_feature (1343)..(1343): n is a, c, g, or t
  misc_feature (1422)..(1422): n is a, c, g, or t
  misc_feature (1437)..(1437): n is a, c, g, or t
gggcggaagtgaggcgcccagcggaacggcctctggtgacattttcttgggggcggcgcggacgactgaagggacttggtggtagaggctgcggaggcggcgaggttcactttggtcccggcaggggctctgaccgcgacccactgctcgctgccggggcttgttccgaggaggagaaggcggcggtggccgtcgcgtcctgagtcaccgcagcggggaagagtcccggccgggggttcggtgcgtgccccgacggggcgcgcgcgaagcgagcgagaaggcacggagtcgccgcggagcgcaggttgctttcctgttgcatctttgatatcatttcctagactctactccatgatttaacttgaaattctgaaatgaagatggaggaggcagtgggaaaagttgaagaactcattgagtccgaagccccaccaaaagcatctgaacaagagacagccaaggaggaagatggatctgtagaactggaatctcaagttcagaaagatggtgtagcggattctacagttatttcttcaatgccctgcttgttgatggaactgagaagggactcttctgagtctcagttagcatccacagagagtgacaagcctacaactggccgagtttatgagagtgactcctctaatcactgcatgctttccccttcctctagtggtcacctggctgattcagatacgttgtcttccgcagaagagaatgaaccctctcaggcagaaacggcggtagaaggagacccttcaggagtgtctggtgccacagttgggcgcaagtctaggcggtcccgatctgaaagtgaaacttccactatggctgccaagaaaaaccggcaatccagtgataaacagaatggccgagtcgccaaggttaaaggtcatcggagccaaaagcacaaggagaggatcaggctactgaggcagaaacgggaggctgctgcaaggaagaaatataacctgctgcaggacagtagtaccagtgatagtgacctgacttgtgactcaagcacgagctcatcagatgatgatgaagaggtttcagggagcagcaagacaatcactgcagagataccaggtcatttggatccaggattcctagcaagtgacaaaacatctgctggcaatgcgccactcaatgaagaaattaacattgcgtcttcagatagtgaagtagagattgtgggagttcaggaacatgcaagatgtgattgaagagcatggtccttcanaaaaggcaataaacggcccaactagtgcttctggcgatgacattttaagctacagcgtctccaggagaanaaaagattaataccttgaagaaacactcanaagcagcagtcctgaatggtgttcatctgaagaagttcctagttacaggtctttacattacattaccatagtgcttgtncaacttgccaagatngtatggtcgc

SEQ ID NO: 341352 - DNA, 284 bp, Homo sapiens
gtgctgggattacaggcgtgagccaccgcacctggccgattgtcccttcttatgtagtgataaagtaacctttcttgaactgtatcaatccatcaccagtcaagttgctgcaacttatccactggtcttgaatggaaaatgtgttgattctggtaaagcttctctgtctttccctgtgtgtgaaaccttaacatctctacttgggaacacagacccccttcatttggagttgatgtttccaggtggctatcctcaagttttgtgttcacataaactctatactt

SEQ ID NO: 341353 - DNA, 183 bp, Homo sapiens
tcaacagccagctcgctttaattgaacaagtcatttgacttcagggttcactgggtttaggtaggacactccaccaggaagcccacaaagcatgaatgtcacagtccgaaccaaactgcagagcaccacagacgtccagagctagaaaacatcatttgaccaggagagccggtccgcatgtct

SEQ ID NO: 341354 - DNA, 253 bp, Homo sapiens
ggtatgtaaccttttgggatttgctgctttactcagcataattctcttggaaataatctgatttgttgtgtttatcaacagttaattcatttttattgctcaggagtatttcatgatatggaatataccatggtttgactcttagccctttggaggacatctaggttactttcagttgttgagctgctgtgaaaatttccatgcaggtttttgtgcagacatcactttccatttctctaggatctgtgcccaa

SEQ ID NO: 341355 - DNA, 530 bp, Homo sapiens
tgcctctccctagccatcaagtgttgccactctacagagctcctcttggccttctcatgcttacctgttccttcttctgtgccctacccatggctcttaccacagtgcactatgactgtctgcctcctgcactaaaatgttagctccttgagagtcaggactgaatcctgctggtacccatagcatccagcacagtgtccaatacatgcagctgttgaatgaaagaatgcatttttaagaacagcatcagtggacttgactgtgttttgaaagctcctattggccctggatcagatgtcacagggtaaggggaaagatttatttatcttttaaaataaacagctttcagagaaccactgacaaaaccatttccacctttggtggaagcagagagttggttgcatgtgtggcagtcatatactttttttgtcttccaaagagcctagggtttttttttgttttgttttgttttgttttttgccaaaagatgagagaaggcaaatatcttggtgcagaaaaggccttgggga

SEQ ID NO: 341356 - DNA, 160 bp, Homo sapiens
gttaataatctgactaggctagtggacaaatttaagtaaggaaaggaacatagttaactatcataggtctgatacacacgtttcagtgttaaagaggaatcactaatagtctattattcacagataaactgaggtacatgaaaatgttaaagagtttatt

SEQ ID NO: 341357 - DNA, 261 bp, Homo sapiens
aaaaagataggcatatcatcaatgcaacaattaaatataaatctaacaccttcagtgcctcaaggatgtgactatgttggggcccgtgctgttgaggagaagttctggaaggattcttgtggtgaattttctgggagaaagtcagtatggaattatgacttaaacaaagaaacataacgtgataggcaaaagaatgaaggcagatgtagagatggaaaatatgatgcggacagccggcttgcccagagcgaaggacagagg

SEQ ID NO: 341358 - DNA, 148 bp, Homo sapiens
tgtggttaaggtctggcttttcctggggagggacctagctcagtccagaacagcatttgtggaactcattttcactatcaactctctgggaagaaaaccctgctgtttgggtttcctgccagcctggtgggaggcttcctggacagca

SEQ ID NO: 341359 - DNA, 484 bp, Homo sapiens
cctgggcaacaagagcgaaactccatctcaaaaaaaaaaaaaaatacaaatcttaaaacaaaaaagctttattttgatttccttattctttattttattgttcaggtaagtagtctgtagtaagagcagtttagagattctgcagtgtgtttccaacaaccaccaattctctgattctaccacatgaactggtgtcctgctattcaatgctattctgacactgactaccctgaattagtatcagactccacaagtttaaggactcattcctacaaaattgccctcacttgagatgccatttgcaagtcctgggtccccaggcttacccacatttctgccttctgtccaagctggctatagattttggggatgccaacaatgccactccatgtgatcatttgctagggtgagtcatagaacttaggaaaatgctatacttgggattacagtttcattataaagtatacaattcaggaacagccaa

SEQ ID NO: 341360 - DNA, 520 bp, Homo sapiens
agcagcatgaaataatgtaggatgaatctagagaagtttgaaagagatcaaagcaggaacgcaggataaatttatctgaaagaatattatccctgctgctgtctgtagaacaaactgaagggaaacaagtagagaagagctgagtattcaggcaagaggttactccagtggtaaaggtaatgtaaccaaatgcaggtccgaatcgttgcagtttgcagagtccaattaacaacgacaaggtctggtagaaagacagacactttattaaccaaaagtaaagggaaggggtcagattcctatccaaaataaccacttcaatttttgaggggaaggcagggatttaaaaagggaaaacttgataaggaagacatacaataattgagctgagtacaatgtgtgcctcaaggttatatcttgataaccaaggaggaaaaaaaagttttaaaatgaattttgaagttaagctgcctggttacagtaatggcttgaactagagataactcaattcctgcctaagctg

SEQ ID NO: 341361 - DNA, 122 bp, Homo sapiens
caagtacagcataacaggtgtgaaagcagggtagcatagaaatgatgtaaaatgaaataaattgttcataagaagtgctgaaactaagctgggcacaggggctcatgccagtaattccagtg

SEQ ID NO: 341362 - DNA, 695 bp, Homo sapiens
aagctgctctggatggctgggtgggtaagtgagtgagtgagtgagtgagtgagtgagtgagtgagtgagtgagaggggcaagtgagtacactgcacagaacacacactgaacaggacattactgacattactatacacagtactgtggacacaaatacacactacattagcctaaagcctgcacagctgccctgggtcaggatcatcaatgtcactgtcttgcgcctgcatatcctgtctccaatgacacatggagctgtcatctcctaaaagatctccttcttcgggaccacttcctgaaggacctggacctgcctgaggctgttttactttttctgtaaggagagatactctctcaaataacaacaggctgggggcggtggctcacgcctgtaatcccagcgctttgggaggccaagatgggcagatcacaaggtcaagtaatggagaccatcctggccaacatggtgaaaccccgtctctacaaaaaaatacaaaaattagcttggcgtggtggtgcgcatctgtagtcccagctactctggaggctgaggcaggagaatcacttgaacccaggagatggaggttacagtgcgccaaaattgcgccactgcactccagcctggcgacagagctagactccatctcaaaaaaaaaaaaaaaaattaacaatatagtgcagtaaatatataaag

SEQ ID NO: 341363 - DNA, 221 bp, Homo sapiens
tggttggagagagtgttttgtggggaaggagcacaggaatcacgtagccagcccagtgtctgcacctcaagttcttctacaaaattggtagagagctctcaggattcgactgtatttagaaatgaggatttacctgaatatactggtctcgtctgtctgataatcagttgcccagattttcagtttgatggggtaagggattatgttgaggggaaagctca

SEQ ID NO: 341364 - DNA, 444 bp, Homo sapiens
cttaccaataattcaccctcaaactcctcggtattcaccagcttttagtaaatttaggatgtgtttttctttcagtttaactctgaaaactggggtttgttccagtgtgactgttgccttctaatcctagtatacagctaacatcttgagattgccttcattatccttgtggtgctgcttttgcttctgttgtttacttttttggtttactctgattcttgtatagcatctttcccagtaaaggtgcatgggagattaaatttttgagttttgcatgtctgaaaatgtctgtatcctcacattcacttgttagactgggcatagaattctagtttggaaaacatatttcttcaaaatgtaaaaattccttttcttctaccttattgtactgcttttgagaaatctaaaactgttttgattattggtcctttaaatgtgatctgg

SEQ ID NO: 341365 - DNA, 1170 bp, Homo sapiens
taaccatttattatacatataatctattgaatataaaaagattcaccttgaaataatatttgactatataggtacatatctgtaaaagatgaccaccttaactaaatcagattttacatttataaattttatatttaattagtcaaatcaatttttaaatcataactccttaatctcataagaagcaataaatgcataaagcattatattaaaataccagggttacttatgtcattgacagggaaaagactttgtataaacaattatgcaccatctatttttgtactcttactcatgatccatttaaaagtctactcagctctagattagataccagaagaccctctaagtaactgataactgagattcgggaccatgtcttgtttgccattgtgcccttggaatttaatacaagtgcctaacccacagtagggttgattgattcactgattagttttactgccatgtgcctataactataggttattctctttccttttctatgttgtgtttattctatttattctctacaatatataaaatgtatttgttctctacaataaatgtgtttattctctacaatatataaaaacatattggactactattacataattaaattactcttttatttgcttaaagagggtgattattttttcacttaccgttccactgagcagcaaccgggactggtcaatagatggaaatcaatcccaatttagagacaatacctggccctgctttgacaatcctgtttcacgtttgccagagtcatgcacttccttacttttgtatataggctccagagaagtttccattaagtgaaacagctatattaattttttaaatatatctttatttaaataattggatgtctggactttatcccaacgtttatttatcaatttttatagttgtcttccaatatatcttttatcatttattttgtaacacattctttggaggtctgtgatttatagtactatgataattcccttattgactcattattcaaagttagatgcagtcttctaatcttagctatttggcataagaagcaatagccaaggggatgtatcctgtactttatgtttaatttgttcttcagtaactacatatcatttatatcagattatcttaagtattaacaggattcacctggatcaaatt

SEQ ID NO: 341366 - DNA, 713 bp, Homo sapiens
aaatggatttgtgctcatttgtctgatagaaagcagtagattaaaaatcatgttgtagtgtccaggcataagggacttggagcagcctctcattatccgagatttccatggaagagcatatgttttctgggcctttaaaggatccaccaactggcctggcaggtaaaaatgtgttttaaggttaagtcagagacaggacatgtggacacatgggcatatggacagttcattgaattctcacataggggtataatcagacaagagagtgtacatatcagtggacgctattttaaattggtagtattgaccagggaccaaatggacaccacttgccatctcaaggctgtaggcccataaatctacgtaaatccttgcaactagtggtcacttcagggtgaaagaggaagagcagaaaaccgttaattgattaaacttaatttgaatttattcagtctacctggaaatgattgtaactgtctccctcaggaagaatgaagatcaaaataaagattatgcaaaattattgaaataattacattttccatatttatgtattcaccccttatattcattcgacaacaaaaagttattgagtccttactatgtcttatgagttatgagtattgataataccaagacaaataagacacagttttgttcctattatattggagcagacagataattaaatggatagacataaatatacaaaa

SEQ ID NO: 341367 - DNA, 772 bp, Homo sapiens
gtctctgtccatatcaaataacgatcaaactcatgaaaattacttctagccacaaatcatcaatcatcatgtccagaaacctatcctgaattctcccaactctcaaagctgggtgttactctatgtgccctgcaatagcagacaagaggctgatggctccattaccagggagtagctaagccagaatctgattcccaagcccccttgctcatgtgctctctcagaatccctgctgctccctgctgcctgcctgcctgcctgcctgaaatgtctcacacccttctctgcctgaactctgcttattgattatctttccaatttgaacctcagctcttcacagcctctcctgacacctatgcttctgggaacaagttggttgctccatcctttgtgatccccaaacactcctttagtaactttatgaaagcactcacactgcagtttagttattcatgtcttccccagcagacagcaaaggtaagccctgggtttattcttccatgtacctctagtacctggcacacagcttatcaaaaaatatttacctaatgaatgaatctccttagtcatctagttcaactttttcctctaaggtttatccttagaatgtctttacttgttccagttgaagactgattcccccagctggactttagatggcctcttgtttaacgtcctggtactgagttgagctttcccacatctaaggagagccaggctggtctcttggggtctcctccaggtctcccaaccttagtctgtttggagaaga

SEQ ID NO: 341368 - DNA, 565 bp, Homo sapiens
cccataacttgagaaaggaatctcaaacagggaatagagttcctcatctctactttgcaccaccactacactatgattcttctgattttaaggaaagagaagatgcacaccctgctaaattacgtagtctatcctctctgccgagtcaccagcatagaacactttctaagtcttcacacaagagaaggagcagctggtcagtgatgattattcattaactggacacaggctgccctggagccaggcactaagcttacgaaagggcatctgtgctgacccagatactgctgatggtcagacccggagcaagtcagcaagctatcctgcctgccctccacctctggcctgcagcaccgccttctactgcctcaccctgccggtgctcaggagctgctcgagccgaccctctgtgcaatgaggcctggaaagtttagctgacctattcaaggtcatgtaacttgttagcagcatacaaacactggaagctttctatttatgtatgcacttatttttgctttcttatctagcacataacccatggtaacaagctcatctctacatatct

SEQ ID NO: 341369 - DNA, 637 bp, Homo sapiens
gatgtggaggaaactacaagaaataaatggaaagactgaagagctgggaggcatctgagctgtcacatgtggagaaattggcctttcagggagataccttctatattttagcaagagggacgaaggggagaatgggcttgcagaatttgcagtgaaattttctcatgtttcctctgtgatggtttatattttctttacaaagaatttatctgtggtctggtatagttatcaggaatggtagagatgggcaaatagcacgaggggtaggcatctaaaatgaaaacatttgttcagcagttatcccatgccaggtactcaactaagagccttttacatccatcattccattcgttgctctcattaacactatgaggtatatattctttcatgatgcctgtaacagtttcctagggccataggaaaataaccaaataccacagactaggtgacttaaataacagaaatgtattttctcccagttctggaggctggtggtccaagagcaggtgtggacaggctggtttctcctgaggcctttctccttggtctgtgggtggctgccctctgcgcatgcacatccctggcatctctctgtgtgcttaatctcctctcctttaaggatacccgtcagactgaa

SEQ ID NO: 341370 - DNA, 882 bp, Homo sapiens
  misc_feature (16)..(16): n is a, c, g, or t
  misc_feature (21)..(21): n is a, c, g, or t
tggcgttctagaggancccanatgatggtccacctctacaaaaaaacaaatttttttaattagctgggcatgacggcacatgcctgtagccccagctactcaggaagctgaggcagaggactgcttgaacccaagaggttgaggcagcagtgagccatgattatgccactttactccagtttgggtgacagggtgagaccctgtctcaaaaaaaggaaagaatgacagaaaaattcaaaggataaaactagtcaaatcatttcatttctgaaattaccggaactctgaaaaaaagacaaaaaccaaagttaaacatttcagtcacttaagagtagaaaataatggcagtaaccaaaatattcatataagggttaatgaaaacctgtaacgtcaatttaatatttttaagaaacgggtaggctgggtgcagtggctcacacctgtaatcccagcactttgggaggccgaggtgggtggatcacttgaggtcaggagttcaagaccagtgtggccaacatcgtgaaaccctgtctctactaaaaatacaaaaattatctggccatggtggcgtgcgcctgtaaccctagctactcaggaggctgaggcaggagaatcgcttgaactcgggaggcggaggttgcagtgagccgagatcgcgccactgcactccagcctgggtgacagagtgagactctgtctcaaaaaaaaaaaaaattttttaatttttttattgaaataagattgccaaaagctagaaacgaaatagctaaattatgaaggagagaaatgtaggtttcctttcttttcctagattttcctctgataagaactatttacaaatgatgaagtccatgtattggcattaaaacattctccggacaa

SEQ ID NO: 341371 - DNA, 851 bp, Homo sapiens
  misc_feature (16)..(16): n is a, c, g, or t
  misc_feature (21)..(21): n is a, c, g, or t
tggcgttctagaggancccanatgatggtccacctctacaaaaaaacaaatttttttaattagctgggcatgacggcacatgcctgtagccccagctactcaggaagctgaggcagaggactgcttgaacccaagaggttgaggcagcagtgagccatgattatgccactttactccagtttgggtgacagggtgagaccctgtctcaaaaaaaggaaagaatgacagaaaaattcaaaggataaaactagtcaaatcatttcatttctgaaattaccggaactctgaaaaaaagacaaaaaccaaagttaaacatttcagtcacttaagagtagaaaataatggcagtaaccaaaatattcatataagggttaatgaaaacctgtaacgtcaatttaatatttttaagaaacgggtaggctgggtgcagtggctcacacctgtaatcccagcactttgggaggccgaggtgggtggatcacttgaggtcaggagttcaagaccagtgtggccaacatcgtgaaaccctgtctctactaaaaatacaaaaattatctggccatggtggcgtgcgcctgtaaccctagctactcaggaggctgaggtaccgggttcatctcactagggagtgccagaccgtgggcgcaggacagtgggtgcagcgcaccatgcgcgagacgactgcactccaccatgggtgatagagtgagactctgtctccaaaataaaataaaataaaataaaatagttggtagaattcagccggaaaataattctagtcccgggatttctttttaagaagctttgaagttagtgatcattcttcagtagtagtagcgcacggggatccc

SEQ ID NO: 341372 - DNA, 635 bp, Homo sapiens
agggcaatacctactacagaaaggatgggaggacttaggcacagtacaggctcatgcctgtactcccaacactgggaggccaaggaaggaggacagcttgagcccagtagttcaagatcagcctgagcaatacagcaagatggtccacctctacaaaaaaacaaatttttttaattagctgggcatgacggcacatgcctgtagccccagctactcaggaagctgaggcagaggactgcttgaacccaagaggttgaggcagcagtgagccatgattatgccactttactccagtttgggtgacagggtgagaccctgtctcaaaaaaaggaaagaatgacagaaaaattcaaaggataaaactagtcaaatcatttcatttctgaaattaccggaactctgaaaaaaagacaaaaaccaaagttaaacatttcagtcacttaagagtagaaaataatggcagtaaccaaaatattcatataagggttaatgaaaacctgtaacgtcaatttaatatttttaagaaacgggtaggctgggtgcagtggctcacacctgtaatcccagcactttgggaggccgaggtgggtggatcacttgaggtcaggagttcaagaccagtgtggccaacatcg

SEQ ID NO: 341373 - DNA, 736 bp, Homo sapiens
acagacatgtgccaccatgtccagctaatttttctatttttaatagagactgggttccaccatgttggtcaggctggtctcaaactcctgatctcaggcgatccacccaccttagcttcccaaaatgctgaacaaacccccctcccaaagtaaggcatgagtcaccatgcccagcccaggagtttttcttaaaatattattttcctttaaataatgaatgtacacatataacatttgataacaatataaaacagattatgattaggtgccaaagtgagtgagtggtgcatgaactatgttaggctttgaaataagagaggccatggtgagctgagcatgtcagagaggctttggcaagagcctggagctcctggagggcaaggactctgtccccttcctatatgtccccagtggcctgttggagcaggtgttcagtaagtattgattatagaaatgattgagacttgaacttaagcttgaagattaagtaaaatttattcaaatctgagagaggttttttctgttttaatgccatctattgtgctttgtctttgatttttggtcactgtgtgaactgttttatactcatctaatgaattaatttaataatcattcaatttctttaaggcaaaatggtgccttgaactcgaggcataagttgcatgaggccagatcattccactacctcaaactggtggtaaatgagactcctctcaaaaaaaaaaaattcaaaaaa

SEQ ID NO: 341374 - DNA, 682 bp, Homo sapiens
acagacatgtgccaccatgtccagctaatttttctatttttaatagagactgggttccaccatgttggtcaggctggtctcaaactcctgatctcaggcgatccacccaccttagcttcccaaaatgctgaacaaacccccctcccaaagtaaggcatgagtcaccatgcccagcccaggagtttttcttaaaatattattttcctttaaataatgaatgtacacatataacatttgataacaatatagctttgaaataagagaggccatggtgagctgagcatgtcagagaggctttggcaagagcctggagctcctggagggcaaggactctgtccccttcctatatgtccccagtggcctgttggagcaggtgttcagtaagtattgattatagaaatgattgagacttgaacttaagcttgaagattaagtaaaatttattcaaatctgagagaggttttttctgttttaatgccatctattgtgctttgtctttgatttttggtcactgtgtgaactgttttatactcatctaatgaattaatttaataatcattcaatttctttaaggcaaaatggtgccttgaactcgaggcataagttgcatgaggccagatcattccactacctcaaactggtggtaaatgagactcctctcaaaaaaaaaaaattcaaaaaa

SEQ ID NO: 341375 - DNA, 685 bp, Homo sapiens
catgcaagtggctgagcgaaaacccctctttgagtgaggaatccccagcacagaatgagagggtcttcatcttgcagcagtggcaagggtgagagtgaaaaggcaccctgcattctgtacctgaaaagaaatgcatttagaggctgggcgtggtggctcgtgcctgtaatgtcagcaatttgggaggctgaagcgggtggatcatgaggttaggagttcgagacaagcctggcaacatggtgaaaccctgcctctactaaaaacacaaaaattagccaggcgtggtggtgcgtgtctgtaatcccagctactcgggaggctgaggcaggagaatggcttgaacccaggaggtggaggttacagtgagccgagattgtgccactgcactccagcctgggcgacagagcaatactcttgtcttgaagaaaaaaaaaaagagaaatgcacttagatttcaaatttagtttggaaagagaaattataattgaatcacctaattcccaggcttgtaaatgttgtgtccttcaaagcttgaaagcaaaataaccacataaatatttgggagtggttcatacaagtaaacgtcaaatacttgagacattttggttgcttggaagcaaggtcaaaggaaatggtttgcatatggtttagctagaagctcttattttggcagattcttgaggta

SEQ ID NO: 341376 - DNA, 347 bp, Homo sapiens
cctatctgtgcaaaaaaaatgagaaagcttgttctaaagagaacatggagggtgtggctgaatacccatttaagaaaaagatcacgggtgcaattcatggacttaatcagacatctcagcagaagccaggaatagagatgggattatatcagcaaagacattgccagtttgaactaaagaggacagagaaagatgcagagaatgaaggaaagctgttggacttcctggattctgtaagcaaatatgtgctacagtggtccctcccttatccatggggaatacattccaagacccccagtagatgcctgaaaccacagatagggcgagccctgggatcctatgttttc

SEQ ID NO: 341377 - DNA, 208 bp, Homo sapiens
ttggaaaagtgacatttgaccatgaattaaatgtgaacactgcaaattttatttgactgtatgtaccaccagtaccctttttggtaaccaaaaaatttagttggtattttcttcctaaacagtcgtttgtaattctaagtctctctaagtaccaaagctctttaaattgcattcatttaatattaattcaataatttttccttaaatg

SEQ ID NO: 341378 - DNA, 342 bp, Homo sapiens
agatctaccctgttctttttaaatatcccagcataagtgtttacttttaaaatccagagctttactaaacattcacattcagggtattttgctttctctggatcagccattgcttgtgaccgtgactctccaatcataacagatttgctgagatacacacacacatacacacacacacgcacactcaaactgtagtgagaaagacttgtgtttaatccttctaaatttgtagatttatagggtcacaatgcagcttcagtaagtttcttatgtagtaaacttgagaaatatctaaattgagcttttaaaataataatagagaaataaaaaataataaaataa

SEQ ID NO: 341379 - DNA, 278 bp, Homo sapiens
ataaaacctttacatgcgtatgttttatcagtgcaagggaatagtattttgaatattagcgataacagtgaacctttggagctctcataaatgggttggttttgagccgaactcatgaaatattattatcagtaagatttgtcattgaggtgtgctggtgaggctctgacacaaactgagtctatcattttgcataaattaatcagtctccgtaagcgtcagctttctcatctgtgaaggggacttgttaatacctatcttatattgtgtaaaatgct

SEQ ID NO: 341380 - DNA, 287 bp, Homo sapiens
ttctgtgccattgaaggctacctcttgaggcaagaggcacaggcaatgtcaagaaaagagagactgaagacaagcaggctgatggcagaagccagagtccagtgtgtggagttggatcacccataggatagactggggcagaggggaagatcagctactgagggagaagaaaggagactacaaatctgagtaaggggataatggctaggcagatcctgagaagcatggtagggagccagtgggaagacaacaacatgccttagagggtacccctttcaaaactttgt

SEQ ID NO: 341381 - DNA, 630 bp, Homo sapiens
ttttgtctttctcacacacaaagtttagtggtaatttcacttacaagtcttaccttaaaaaaagacttgcctagcaacactgttcacatggtttaagaatgagtaatattagtcattatctgactgtcatatgcacgccagtaggctccaaaccattagcctgtactaaagacagaagtaaagcactggccaggcacagtggctcacacctgtaatcccagcactttgggaggctgagacaggtggagcacctgaggtcacgagttcaagaccagcctggccaacatggtgaaaccccgtctccactgaaaattaaaaaaatcagctggatgtggtggtgggcttctataatcccagctacttgggaggctgaggcaggagaatcacttgaacccaggaggtcgaggttgcagtgagccaagatcgtgccactgcactccagccagcctgggtgacaagagcgaaactccgtcacaaaaacaaacgaaaagaagtaaagcactatacaatcctatttaaatctaacagatgttataatgatctctagctactcaggagactgaagtgtgagaacaccctgagcccaggaatacaaggccagcctgggcaacacagcaagaccccatccct

SEQ ID NO: 341382 - DNA, 467 bp, Homo sapiens
gaaatcgcaaaatacaacgttttttaaaaagcacatgaatagcacaaacatcacaaaatccagaaaaataagttattaattaactgcctttcacctctgtaacaattgttttctacatttttgggttgtacactttgattatctcctcatatgaaaaattttgtaacattttctctagagagattgaaaatataattcagttttctctctagcacaatggatggaaaaggaaagttcagaaagctttcttgaagcttcaccactcattactggtaatgtcacatctgagtttctggttcaggcagtgctcggaaaagaagtgggaaaactccagctctttgatatcacggcttatggacaccgatggctgctactatgtatatggtccacttttgttaggtctttactgcccagtaggaacaggaggcagcaaagtcgacgcggccgcgaatttagtagtagtaggc

SEQ ID NO: 341383 - DNA, 174 bp, Homo sapiens
ccactgcactccagtctgggtgacagagtgagactccatctaaaaaagaaaaaaaaaattcccagcttaatagaaacttcagccactctgaaaatcaaaatacgaagatgtgggatagtctctaagggcctagaaggaagaaattcttgttagcaatttatttccctttggata

SEQ ID NO: 341384 - DNA, 769 bp, Homo sapiens
ctgtcatgcagcacatggttagaactggaagtccctaagtgaagtaagccaagcacaaaaagacaaatatcacatgttcccactcatatgtgggagctaaaaaaaaaagtagatctcatggagagagagtagaatggtggttaccagaggctgggaagagtaggggagtagagagttgaagagaagctgatcaacaggtacaaatatatggtttgaaagaagaaataagacctagtagatcagtagggtgactatagtttacaataacctgttgtaaattttaaaatagctagaagagaataatttgaatgtttctagcataaacacatagagtgatgaatattccaagtacactgatttaatatttacagattatataaatgtatattagattatcacatgcatccctaaaccatgtacacctattatgcatcaattcttttttttgaaaaagctacttttgggctgggcacggtggctcatgcctgtaatcctagcactttgggaagctaaggtgggtggatcacgaggtcaggagtttgagaccagcctggctaacatgctgaaaccccgtctctactaaaaatacaaaaaattagccgggcatggtggtgggcgcctgtaatcccagctacttgggcgctgtgccggcacgacgccccaagtgcatgtcagttgtggagaaaacatagcaaaaagagccgtacgccctttacagatactaatgtcaagaagttaaacctctcaggttcaacctgtgataaaagaa

SEQ ID NO: 341385 - DNA, 144 bp, Homo sapiens
ccatacacggatgccatcacttacaccctgtaatttaataacgcagagccaattactgatcaatgttattttttaaaccaatgagaattcctgaaagacaccctttgtaatcactcctccccgatttatccttttgtctttaaa

SEQ ID NO: 341386 - DNA, 582 bp, Homo sapiens
gccaaaagtcttaagggtcacccatgactattttctcactccccaaatctatccactttatctggagaaaaaaaaagtccagaatctaatcccttctccccattttccttgttcccactgagctgtccttttctctgccctggattactgtagtgtcctgctcactgcttcactggtctcccttggtttccctacaaccatagtgattctttcaaaacatgagtcaaataatatattccttagagtaaaagtcaaagtcctaacaggggcctaaagtaatttctgcaggcaaatcctgtaaggcctatttttatcaatctcgtgagctaagaatggtttttacatttacagagttggttaaaaaagcaaagtatatgaggcagagaccttatatggcctgcaaagtctaaaatatttactgtctattcctttacagaagaataaatgccaactcctgccctgagcaatgaggcccatgactttatgatcttgtctcctaatactcttcaccacattggtctcctttcctcatgcactccagtcatactcctgcctgttggagacctttgcatttggcttttt

SEQ ID NO: 341387 - DNA, 138 bp, Homo sapiens
acagaaagatgaaaatttgaactgctttaaatatattaaagaaattgaattcacaatttaaaactttcccaggaaaaatcaccaggcccacatggtttcactggagagctctatcaaacatttaaagaagaaattata

SEQ ID NO: 341388 - DNA, 6482 bp, Homo sapiens
ggccagacgggcccagccagcaccaagatgagtgccacgtcctggttcctggtgagcagcagcggcgcccgccaccggctccctcgggagctcatcttcgtggggcgtgaggagtgtgagctcatgctacagtcccgcagcgtggacaagcagcatgccgtcatcaactacgaccaggacagggacgagcactgggtgaaggacctgggcagcctcaatgggacgtttgtgaatgacatgcgcatcccggaccagaagtacgtcacgctgaagctcaacgatgtcatccgctttggctacgattccaacatgtatgtgctggagcgtgtgcagcaccgagtcccggaggaggcactcaagcatgaaaagtacaccagccagctgcaggtgagcgtgaagggtttggcgcccaagaggagcgaggcactgccggaacacacaccatactgcgaggcctcgaaccccaggccggagaagggggaccggagaccaggaacagaggcagcctcttaccgcacacccctgtatgggcagccctcctggtggggtgaggacgatggtagcacgctgcctgacgcccagcgccagggagagccctacccagagcgccccaagggaccagtgcagcaggacggggagctccacggcttccgcgcccctgctgagcctcagggctgctcgttccggcgggagcccagctacttcgagatccccacgaaggagaccccgcagccgtcgcagccccccgaggtgccggcacacgagatgcccacgaaggatgcagaggcaggtgggggcggagcggcccctgtggtgcagagccacgcctccttcaccatcgagtttgatgactgcagccctggcaagatgaagatcaaggaccatatcaccaagttttccctgcgccagcggcggcccccgggcaaggaggccacacctggcgagatggtgtcggctgagaccaaggtggccgactggctggtgcagaatgacccgagcctgctgcaccgggttggccctggggatgaccgccacagcaccaagagcgacctgcctgtccacacccgcaccctgaagggccacaagcacgaggacggcacgcagagtgactcagaggaccccctggccaaggcggcctcggccgctggggtgcccttggaggccagcggggagcaggtgcggctgcagaggcagatcaagcgggacccccaggagctactacataaccagcaggcctttgtcatcgagttcttcgacgaggacacaccccgaaagaagcgctcccagtccttcacgcacagcccgtccggggaccccaaggccgacaagcgccgtggcccaacgccggccgatagggaccgccccagtgtcccagccccagtccaggcagggggccgcagctcggggccacagagggccggctcgctcaagcgggagaagacagaggaacggctgggcagcccctcgcccgcctcccgaacccctgcccgccccttcggaagcgtggggcgccgctcccgcctggcccaggacttcatggcccagtgtctgcgggagagctccccggccgcccggcccagccccgagaaggttcctccggtgctgcccgctcccctgacaccccatgggaccagccccgtgggccccccgaccccaccgcccgcccccacggacccccagctgaccaaggcacggaaacaggaggaggacgacagcctcagtgacgcagggacatacaccatcgagaccgaggcgcaggacacggaggtggaggaggcccggaagatgatcgaccaggtctttggggtgttggagtcccctgaactctccagggcatcttcggccacctttcgcccagtcatcagaggggacagagatgagtctgatgacgggggcgtggcccagcggatggcgctactgcaggagtttgcctcccggccactgggtgcggccccccaggcggagcaccagggcctcccggtgccgggctcccctgggggtcagaagtgggtgtcccgctgggccagcctggctgacagctactcagacccgggcctcacagaggatggcctgggacgtagaggcggggagccggaggggtccctgcctgtgcgcatgcggcgacggctccctcagctgcccagtgagagggctgacagccctgcgggcccagagagcagcaggaggagtgggcctgggccaccggagctggacagtgagcagcccagccgcctcttcggccaggaggagttggatcctgacagcctcagcgatgccagtgggtcggacgggggccgaggccccgagccaggggtggagccacaggacagcagacgcaggagcccccaggaggggcccacgtggagcaggggtcggcgctcaccaagggcccccggggagccaactcccgcctctttcttcattggggaccagaatggggacgctgtgttatctaggaaaccgcttgcggctccaggggatggggagggcctagggcagacagcccagcccagccccccagcacgggatggcgtctatgtcagtgccaatgggagaatggtcatccagctacggcctggacggtccccagaacccgacggccctgccccagcctttctccggcaagagagcttcactaaggagccagccagtggtcccccagcgcccggcaagcccccccacatctccagccacccgcttctacaggacctggccgctacccgggccgcacgcatggacttccactcccaggacacccacctgatcttgaaggagacggagacggccctggcggccctggaggcccgactcctctctaattctgtggatgccgagtgtgaggggggcagcaccccgaggccgccggaggacgccctgtctggggactcggacgtggacacagccagcaccgtcagcctgcgtagtggcaagagcgggcccagccccacaaccccccagcctctgcgggcacagaaggagatgtcgccatccccgccagctgcacaggacccgggaggcaccgccctggtcagtgcccgtgagcagtcctcagagaggcagcatcacccacttggcccgacggacatgggccgtggagagccggtacggcgctcagccataaggcgtggccacaggccccgagggtccctggattggcccagtgaggagcgtggccctgtcctcgcccacctacccagctcagatgtgatggcctccaaccacgaaacccctgaggccaccggggcaggacggctaggttctcgccggaaaccagcggccccaccgccatccccagctgcccgggaggagcagagccgtagctcagccagctcccagaaggggccgcaggccttgacccgctccaacagcctgtccacccctcgccccacacgggcctcccggctgaggcgggcccggctgggggacgcttcagacactgaggctgcggatggtgagcgggggtccctgggcaaccctgagcccgtgggccggccagctgctgagcaggccaagaagctgtcacgcctggacatcctggccatgccccggaagcgggccggctccttcacagggactagtgaccccgaggcagcccctgcccgcaccagcttctctggccgcagtgtggagttgtgctgtgccagccgcaagcccaccatggccgaagcacgggctgtctccaggaaggctgccaacacagccaccaccacgggtccccgccagcccttcagcagggcccgctcgggcagtgcccgatacacctccaccactcagaccccgagggctggcagctccagccgggctcgttcccgggcccccggcccccgggacacggacgacgatgaggaggagcctgacccttatggtttcatcgtgcagacggcagagattgcggagattgccaggctgagccagacgctggtgaaggacgtggccatcctagcccaggagatccacgatgtggctggggacggtgacacactgggctcctcggagcctgcccacagcgcctccctcagcaacatgcccagcacccccgcctcgaccatctctgcccgggaggagctggtgcagcgcatccccgaggccagcctcaacttccagaaggtgccgcccggctcgctgaactctcgggactttgaccagaacatgaacgacagctgtgaggacgccctggccaacaagacgcggcctcggaaccgagaggaggtgatcttcgataacctgatgctgaacccggtgtcccagctgtcgcaggccatccgtgagaacacagagcaccttgccgagaagatgaagatcctctttcagaacacagggagagcttgggaggacctggaagccaggatcaacgccgagaacgaggtgcccatcctgaagacatctaacaaggaaatcagctccatcctgaaggaactgaggcgggtgcagaaacagctggaagttatcaatgccatcgtggaccccagtgggagcctggacctgctcacaggaaacaggagcttggccagctctgcacagccggggctggggaagggccgcgtggctgcccagagcccaccctcacccgcctcagccgaggccctgctgccagccctgcccctgaggaatttcccacagcgggccagctgtgggcctcccagcctcccggaccccaccttcctccctgatgccgagaggttcctgatctaggccccagacctggccaggccagcctccctgtgcgtgtgcgtctctgccttccgtccgccgcacacccgcctgcctggccgcaggtggttctccctgaagacccccacatgtgccatatccctgtgggcgggtgcctcccacgcccttgccccctcgtcagctcccagccagcaccctactcaccctgtccagccccatggccacccccacccctgcctcgccccctacaggcctctgggcccagctcctggccaggctgctgccaaggtcaagccctcaagggcattaccccgcctcctcttcatcactgttatttttgtctttagctttaaaggaaagagttgttggtgccattgcaggtgccccctccaggcctgactggctccgccaggcactaacctgccataaccctttgtgctggcctgcggccaggcagaggaagagaggtcgactgtggggtcatttggtgccaaacatggaggtgggcaggctcacctgttcctgggactgtctgagatggcagggcacttgccctggtggctcccacctgaccccaggccttttataggcaggagccccactgcttccagcctctggtgccaacacagttgccaaacccattgagcttggggctgccctgtggaggcctcctgggtatggaccaggggcttgttgagagctgagccatgcacacaggtgcagacaccccccaactcccatgcacacggctagtccaggcgcctccacgctgcaccgtgaggactgcagggcatgtccccgtgaggggctatgggcctctgtaggtgggcttccaaggtcctgggtgcagccgggtgcatggcagcccttctggcgggggtgagcgcacgaccaaagtcactggaagccgggtttccggaagctcgcagcttggcctgcaccacacgccctccccttttggcttcacgccatcaggcctcaagtgggcatgggggcagggacgggcccaggaactgttgttttctcaggattctttcagctgggaacatggcaggtgagcagagcttggtgcctctgccgtggcccctgctggggcagcccgtgttgccggagcctctaagccaaagagcccgttggccgtggttggtgggggtggacgtgggggtgtcccacctggaccagactggcgtgggtgagctccacaccctgcctggcaatggtatgagagtcggacctggacagggccagctgctgggggagcggcactggggactggaggctggaagcgggtggtgtgtgtcccctgtttacttttagctgagctggggttgggtgtacgggttctgttcctctgagccctgcggcccacctgatgtttacgtgtgtgtgtgagggggggcgggggtggcaggtgtccccccctggtccccgccccaagagcctgctgtctgtatggaggaggtgctagcccggtccaccgggctgctgcccacccctgcatgccccagttgcccaccccgcctgcccctggacatgaagtggtcacgcttcatccacggctccttcccacccctcggcagtggctgtgcaatgttttaagttcacaagttcctgctcctccccacactgagctcctttgttcctccccctccagcctttgcctgggaactggtccttgtttgccgggcttctcggagggttcactgtacattcgttctcaggtggtcttgtggctgtctttcggaaaatggttattttatatgatttgtcatggaatttgttctaataaatcattcttctatcacatggca

SEQ ID NO: 341389 - DNA, 6587 bp, Homo sapiens
ggccagacgggcccagccagcaccaagatgagtgccacgtcctggttcctggtgagcagcagcggcgcccgccaccggctccctcgggagctcatcttcgtggggcgtgaggagtgtgagctcatgctacagtcccgcagcgtggacaagcagcatgccgtcatcaactacgaccaggacagggacgagcactgggtgaaggacctgggcagcctcaatgggacgtttgtgaatgacatgcgcatcccggaccagaagtacgtcacgctgaagctcaacgatgtcatccgctttggctacgattccaacatgtatgtgctggagcgtgtgcagcaccgagtcccggaggaggcactcaagcatgaaaagtacaccagccagctgcaggtgagcgtgaagggtttggcgcccaagaggagcgaggcactgccggaacacacaccatactgcgaggcctcgaaccccaggccggagaagggggaccggagaccaggaacagaggcagcctcttaccgcacacccctgtatgggcagccctcctggtggggtgaggacgatggtagcacgctgcctgacgcccagcgccagggagagccctacccagagcgccccaagggaccagtgcagcaggacggggagctccacggcttccgcgcccctgctgagcctcagggctgctcgttccggcgggagcccagctacttcgagatccccacgaaggagaccccgcagccgtcgcagccccccgaggtgccggcacacgagatgcccacgaaggatgcagaggcaggtgggggcggagcggcccctgtggtgcagagccacgcctccttcaccatcgagtttgatgactgcagccctggcaagatgaagatcaaggaccatatcaccaagttttccctgcgccagcggcggcccccgggcaaggaggccacacctggcgagatggtgtcggctgagaccaaggtggccgactggctggtgcagaatgacccgagcctgctgcaccgggttggccctggggatgaccgccacagcaccaagagcgacctgcctgtccacacccgcaccctgaagggccacaagcacgaggacggcacgcagagtgactcagaggaccccctggccaaggcggcctcggccgctggggtgcccttggaggccagcggggagcaggtgcggctgcagaggcagatcaagcgggacccccaggagctactacataaccagcaggcctttgtcatcgagttcttcgacgaggacacaccccgaaagaagcgctcccagtccttcacgcacagcccgtccggggaccccaaggccgacaagcgccgtggcccaacgccggccgatagggaccgccccagtgtcccagccccagtccaggcagggggccgcagctcggggccacagagggccggctcgctcaagcgggagaagacagaggaacggctgggcagcccctcgcccgcctcccgaacccctgcccgccccttcggaagcgtggggcgccgctcccgcctggcccaggacttcatggcccagtgtctgcgggagagctccccggccgcccggcccagccccgagaaggttcctccggtgctgcccgctcccctgacaccccatgggaccagccccgtgggccccccgaccccaccgcccgcccccacggacccccagctgaccaaggcacggaaacaggaggaggacgacagcctcagtgacgcagggacatacaccatcgagaccgaggcgcaggacacggaggtggaggaggcccggaagatgatcgaccaggtctttggggtgttggagtcccctgaactctccagggcatcttcggccacctttcgcccagtcatcagaggggacagagatgagtctgatgacgggggcgtggcccagcggatggcgctactgcaggagtttgcctcccggccactgggtgcggccccccaggcggagcaccagggcctcccggtgccgggctcccctgggggtcagaagtgggtgtcccgctgggccagcctggctgacagctactcagacccgggcctcacagaggatggcctgggacgtagaggcggggagccggaggggtccctgcctgtgcgcatgcggcgacggctccctcagctgcccagtgagagggctgacagccctgcgggcccagagagcagcaggaggagtgggcctgggccaccggagctggacagtgagcagcccagccgcctcttcggccaggaggagttggatcctgacagcctcagcgatgccagtgggtcggacgggggccgaggccccgagccaggggtggagccacaggacagcagacgcaggagcccccaggaggggcccacgtggagcaggggtcggcgctcaccaagggcccccggggagccaactcccgcctctttcttcattggggaccagaatggggacgctgtgttatctaggaaaccgcttgcggctccaggggatggggagggcctagggcagacagcccagcccagccccccagcacgggatggcgtctatgtcagtgccaatgggagaatggtcatccagctacggcctggacggtccccagaacccgacggccctgccccagcctttctccggcaagagagcttcactaaggagccagccagtggtcccccagcgcccggcaagcccccccacatctccagccacccgcttctacaggacctggccgctacccgggccgcacgcatggacttccactcccaggacacccacctgatcttgaaggagacggagacggccctggcggccctggaggcccgactcctctctaattctgtggatgccgagtgtgaggggggcagcaccccgaggccgccggaggacgccctgtctggggactcggacgtggacacagccagcaccgtcagcctgcgtagtggcaagagcgggcccagccccacaaccccccagcctctgcgggcacagaaggagatgtcgccatccccgccagctgcacaggacccgggaggcaccgccctggtcagtgcccgtgagcagtcctcagagaggcagcatcacccacttggcccgacggacatgggccgtggagagccggtacggcgctcagccataaggcgtggccacaggccccgagggtccctggattggcccagtgaggagcgtggccctgtcctcgcccacctacccagctcagatgtgatggcctccaaccacgaaacccctgaggccaccggggcaggacggctaggttctcgccggaaaccagcggccccaccgccatccccagctgcccgggaggagcagagccgtagctcagccagctcccagaaggggccgcaggccttgacccgctccaacagcctgtccacccctcgccccacacgggcctcccggctgaggcgggcccggctgggggacgcttcagacactgaggctgcggatggtgagcgggggtccctgggcaaccctgagcccgtgggccggccagctgctgagcaggccaagaagctgtcacgcctggacatcctggccatgccccggaagcgggccggctccttcacagggactagtgaccccgaggcagcccctgcccgcaccagcttctctggccgcagtgtggagttgtgctgtgccagccgcaagcccaccatggccgaagcacgggctgtctccaggaaggctgccaacacagccaccaccacgggtccccgccagcccttcagcagggcccgctcgggcagtgcccgatacacctccaacacgaggcgccggcagcagggctcggattacacgtccacctctgaggaggagtacggctcccgccacggctcccccaaacacacacgctcccacacctcaacagccactcagaccccgagggctggcagctccagccgggctcgttcccgggcccccggcccccgggacacggacgacgatgaggaggagcctgacccttatggtttcatcgtgcagacggcagagattgcggagattgccaggctgagccagacgctggtgaaggacgtggccatcctagcccaggagatccacgatgtggctggggacggtgacacactgggctcctcggagcctgcccacagcgcctccctcagcaacatgcccagcacccccgcctcgaccatctctgcccgggaggagctggtgcagcgcatccccgaggccagcctcaacttccagaaggtgccgcccggctcgctgaactctcgggactttgaccagaacatgaacgacagctgtgaggacgccctggccaacaagacgcggcctcggaaccgagaggaggtgatcttcgataacctgatgctgaacccggtgtcccagctgtcgcaggccatccgtgagaacacagagcaccttgccgagaagatgaagatcctctttcagaacacagggagagcttgggaggacctggaagccaggatcaacgccgagaacgaggtgcccatcctgaagacatctaacaaggaaatcagctccatcctgaaggaactgaggcgggtgcagaaacagctggaagttatcaatgccatcgtggaccccagtgggagcctggacctgctcacaggaaacaggagcttggccagctctgcacagccggggctggggaagggccgcgtggctgcccagagcccaccctcacccgcctcagccgaggccctgctgccagccctgcccctgaggaatttcccacagcgggccagctgtgggcctcccagcctcccggaccccaccttcctccctgatgccgagaggttcctgatctaggccccagacctggccaggccagcctccctgtgcgtgtgcgtctctgccttccgtccgccgcacacccgcctgcctggccgcaggtggttctccctgaagacccccacatgtgccatatccctgtgggcgggtgcctcccacgcccttgccccctcgtcagctcccagccagcaccctactcaccctgtccagccccatggccacccccacccctgcctcgccccctacaggcctctgggcccagctcctggccaggctgctgccaaggtcaagccctcaagggcattaccccgcctcctcttcatcactgttatttttgtctttagctttaaaggaaagagttgttggtgccattgcaggtgccccctccaggcctgactggctccgccaggcactaacctgccataaccctttgtgctggcctgcggccaggcagaggaagagaggtcgactgtggggtcatttggtgccaaacatggaggtgggcaggctcacctgttcctgggactgtctgagatggcagggcacttgccctggtggctcccacctgaccccaggccttttataggcaggagccccactgcttccagcctctggtgccaacacagttgccaaacccattgagcttggggctgccctgtggaggcctcctgggtatggaccaggggcttgttgagagctgagccatgcacacaggtgcagacaccccccaactcccatgcacacggctagtccaggcgcctccacgctgcaccgtgaggactgcagggcatgtccccgtgaggggctatgggcctctgtaggtgggcttccaaggtcctgggtgcagccgggtgcatggcagcccttctggcgggggtgagcgcacgaccaaagtcactggaagccgggtttccggaagctcgcagcttggcctgcaccacacgccctccccttttggcttcacgccatcaggcctcaagtgggcatgggggcagggacgggcccaggaactgttgttttctcaggattctttcagctgggaacatggcaggtgagcagagcttggtgcctctgccgtggcccctgctggggcagcccgtgttgccggagcctctaagccaaagagcccgttggccgtggttggtgggggtggacgtgggggtgtcccacctggaccagactggcgtgggtgagctccacaccctgcctggcaatggtatgagagtcggacctggacagggccagctgctgggggagcggcactggggactggaggctggaagcgggtggtgtgtgtcccctgtttacttttagctgagctggggttgggtgtacgggttctgttcctctgagccctgcggcccacctgatgtttacgtgtgtgtgtgagggggggcgggggtggcaggtgtccccccctggtccccgccccaagagcctgctgtctgtatggaggaggtgctagcccggtccaccgggctgctgcccacccctgcatgccccagttgcccaccccgcctgcccctggacatgaagtggtcacgcttcatccacggctccttcccacccctcggcagtggctgtgcaatgttttaagttcacaagttcctgctcctccccacactgagctcctttgttcctccccctccagcctttgcctgggaactggtccttgtttgccgggcttctcggagggttcactgtacattcgttctcaggtggtcttgtggctgtctttcggaaaatggttattttatatgatttgtcatggaatttgttctaataaatcattcttctatcacatggca

SEQ ID NO: 341390 - DNA, 2986 bp, Homo sapiens
cagctgttgatgtttcaatgaagggctactgggtgggggcaccagcctcgacgctgcccagccctgcagcactgagccctctcccagagggaccctgggactgccacagggtgctgagtgctgctttgttctgttcttgcttctaaaaccaattcactcaccaagacacgaggcgccggcagcagggctcggattacacgtccacctctgaggaggagtacggctcccgccacggctcccccaaacacacacgctcccacacctcaacagccactcagaccccgagggctggcagctccagccgggctcgttcccgggcccccggcccccgggacacggacgacgatgaggaggagcctgacccttatggtttcatcgtgcagacggcagagattgcggagattgccaggctgagccagacgctggtgaaggacgtggccatcctagcccaggagatccacgatgtggctggggacggtgacacactgggctcctcggagcctgcccacagcgcctccctcagcaacatgcccagcacccccgcctcgaccatctctgcccgggaggagctggtgcagcgcatccccgaggccagcctcaacttccagaaggtgccgcccggctcgctgaactctcgggactttgaccagaacatgaacgacagctgtgaggacgccctggccaacaagacgcggcctcggaaccgagaggaggtgatcttcgataacctgatgctgaacccggtgtcccagctgtcgcaggccatccgtgagaacacagagcaccttgccgagaagatgaagatcctctttcagaacacagggagagcttgggaggacctggaagccaggatcaacgccgagaacgaggtgcccatcctgaagacatctaacaaggaaatcagctccatcctgaaggaactgaggcgggtgcagaaacagctggaagttatcaatgccatcgtggaccccagtgggagcctggacctgctcacaggaaacaggagcttggccagctctgcacagccggggctggggaagggccgcgtggctgcccagagcccaccctcacccgcctcagccgaggccctgctgccagccctgcccctgaggaatttcccacagcgggccagctgtgggcctcccagcctcccggaccccaccttcctccctgatgccgagaggttcctgatctaggccccagacctggccaggccagcctccctgtgcgtgtgcgtctctgccttccgtccgccgcacacccgcctgcctggccgcaggtggttctccctgaagacccccacatgtgccatatccctgtgggcgggtgcctcccacgcccttgccccctcgtcagctcccagccagcaccctactcaccctgtccagccccatggccacccccacccctgcctcgccccctacaggcctctgggcccagctcctggccaggctgctgccaaggtcaagccctcaagggcattaccccgcctcctcttcatcactgttatttttgtctttagctttaaaggaaagagttgttggtgccattgcaggtgccccctccaggcctgactggctccgccaggcactaacctgccataaccctttgtgctggcctgcggccaggcagaggaagagaggtcgactgtggggtcatttggtgccaaacatggaggtgggcaggctcacctgttcctgggactgtctgagatggcagggcacttgccctggtggctcccacctgaccccaggccttttataggcaggagccccactgcttccagcctctggtgccaacacagttgccaaacccattgagcttggggctgccctgtggaggcctcctgggtatggaccaggggcttgttgagagctgagccatgcacacaggtgcagacaccccccaactcccatgcacacggctagtccaggcgcctccacgctgcaccgtgaggactgcagggcatgtccccgtgaggggctatgggcctctgtaggtgggcttccaaggtcctgggtgcagccgggtgcatggcagcccttctggcgggggtgagcgcacgaccaaagtcactggaagccgggtttccggaagctcgcagcttggcctgcaccacacgccctccccttttggcttcacgccatcaggcctcaagtgggcatgggggcagggacgggcccaggaactgttgttttctcaggattctttcagctgggaacatggcaggtgagcagagcttggtgcctctgccgtggcccctgctggggcagcccgtgttgccggagcctctaagccaaagagcccgttggccgtggttggtgggggtggacgtgggggtgtcccacctggaccagactggcgtgggtgagctccacaccctgcctggcaatggtatgagagtcggacctggacagggccagctgctgggggagcggcactggggactggaggctggaagcgggtggtgtgtgtcccctgtttacttttagctgagctggggttgggtgtacgggttctgttcctctgagccctgcggcccacctgatgtttacgtgtgtgtgtgagggggggcgggggtggcaggtgtccccccctggtccccgccccaagagcctgctgtctgtatggaggaggtgctagcccggtccaccgggctgctgcccacccctgcatgccccagttgcccaccccgcctgcccctggacatgaagtggtcacgcttcatccacggctccttcccacccctcggcagtggctgtgcaatgttttaagttcacaagttcctgctcctccccacactgagctcctttgttcctccccctccagcctttgcctgggaactggtccttgtttgccgggcttctcggagggttcactgtacattcgttctcaggtggtcttgtggctgtctttcggaaaatggttattttatatgatttgtcatggaatttgttctaataaatcattcttctatcacatggca

SEQ ID NO: 341391 - DNA, 6624 bp, Homo sapiens
ggccagacgggcccagccagcaccaagatgagtgccacgtcctggttcctggtgagcagcagcggcgcccgccaccggctccctcgggagctcatcttcgtggggcgtgaggagtgtgagctcatgctacagtcccgcagcgtggacaagcagcatgccgtcatcaactacgaccaggacagggacgagcactgggtgaaggacctgggcagcctcaatgggacgtttgtgaatgacatgcgcatcccggaccagaagtacgtcacgctgaagctcaacgatgtcatccgctttggctacgattccaacatgtatgtgctggagcgtgtgcagcaccgagtcccggaggaggcactcaagcatgaaaagtacaccagccagctgcaggtgagcgtgaagggtttggcgcccaagaggagcgaggcactgccggaacacacaccatactgcgaggcctcgaaccccaggccggagaagggggaccggagaccaggaacagaggcagcctcttaccgcacacccctgtatgggcagccctcctggtggggtgaggacgatggtagcacgctgcctgacgcccagcgccagggagagccctacccagagcgccccaagggaccagtgcagcaggacggggagctccacggcttccgcgcccctgctgagcctcagggctgctcgttccggcgggagcccagctacttcgagatccccacgaaggagaccccgcagccgtcgcagccccccgaggtgccggcacacgagatgcccacgaaggatgcagaggcaggtgggggcggagcggcccctgtggtgcagagccacgcctccttcaccatcgagtttgatgactgcagccctggcaagatgaagatcaaggaccatatcaccaagttttccctgcgccagcggcggcccccgggcaaggaggccacacctggcgagatggtgtcggctgagaccaaggtggccgactggctggtgcagaatgacccgagcctgctgcaccgggttggccctggggatgaccgccacagcaccaagagcgacctgcctgtccacacccgcaccctgaagggccacaagcacgaggacggcacgcagagtgactcagaggaccccctggccaaggcggcctcggccgctggggtgcccttggaggccagcggggagcaggtgcggctgcagaggcagatcaagcgggacccccaggagctactacataaccagcaggcctttgtcatcgagttcttcgacgaggacacaccccgaaagaagcgctcccagtccttcacgcacagcccgtccggggaccccaaggccgacaagcgccgtggcccaacgccggccgatagggaccgccccagtgtcccagccccagtccaggcagggggccgcagctcggggccacagagggccggctcgctcaagcgggagaagacagaggaacggctgggcagcccctcgcccgcctcccgaacccctgcccgccccttcggaagcgtggggcgccgctcccgcctggcccaggacttcatggcccagtgtctgcgggagagctccccggccgcccggcccagccccgagaaggttcctccggtgctgcccgctcccctgacaccccatgggaccagccccgtgggccccccgaccccaccgcccgcccccacggacccccagctgaccaaggcacggaaacaggaggaggacgacagcctcagtgacgcagggacatacaccatcgagaccgaggcgcaggacacggaggtggaggaggcccggaagatgatcgaccaggtctttggggtgttggagtcccctgaactctccagggcatcttcggccacctttcgcccagtcatcagaggggacagagatgagtctgatgacgggggcgtggcccagcggatggcgctactgcaggagtttgcctcccggccactgggtgcggccccccaggcggagcaccagggcctcccggtgccgggctcccctgggggtcagaagtgggtgtcccgctgggccagcctggctgacagctactcagacccgggcctcacagaggatggcctgggacgtagaggcggggagccggaggggtccctgcctgtgcgcatgcggcgacggctccctcagctgcccagtgagagggctgacagccctgcgggcccagagagcagcaggaggagtgggcctgggccaccggagctggacagtgagcagcccagccgcctcttcggccaggaggagttggatcctgacagcctcagcgatgccagtgggtcggacgggggccgaggccccgagccaggggtggagccacaggacagcagacgcaggagcccccaggaggggcccacgtggagcaggggtcggcgctcaccaagggcccccggggagccaactcccgcctctttcttcattggggaccagaatggggacgctgtgttatctaggaaaccgcttgcggctccaggggatggggagggcctagggcagacagcccagcccagccccccagcacgggatggcgtctatgtcagtgccaatgggagaatggtcatccagctacggcctggacggtccccagaacccgacggccctgccccagcctttctccggcaagagagcttcactaaggagccagccagtggtcccccagcgcccggcaagcccccccacatctccagccacccgcttctacaggacctggccgctacccgggccgcacgcatggacttccactcccaggacacccacctgatcttgaaggagacggagacggccctggcggccctggaggcccgactcctctctaattctgtggatgccgagtgtgaggggggcagcaccccgaggccgccggaggacgccctgtctggggactcggacgtggacacagccagcaccgtcagcctgcgtagtggcaagagcgggcccagccccacaaccccccagcctctgcgggcacagaaggagatgtcgccatccccgccagctgcacaggacccgggaggcaccgccctggtcagtgcccgtgagcagtcctcagagaggcagcatcacccacttggcccgacggacatgggccgtggagagccggtacggcgctcagccataaggcgtggccacaggccccgagggtccctggattggcccagtgaggagcgtggccctgtcctcgcccacctacccagctcagatgtgatggcctccaaccacgaaacccctgaggccaccggggcaggacggctaggttctcgccggaaaccagcggccccaccgccatccccagctgcccgggaggagcagagccgtagctcagccagctcccagaaggggccgcaggccttgacccgctccaacagcctgtccacccctcgccccacacgggcctcccggctgaggcgggcccggctgggggacgcttcagacactgaggctgcggatggtgagcgggggtccctgggcaaccctgagcccgtgggccggccagctgctgagcaggccaagaagctgtcacgcctggacatcctggccatgccccggaagcgggccggctccttcacagggactagtgaccccgaggcagcccctgcccgcaccagcttctctggccgcagtgtggagttgtgctgtgccagccgcaagcccaccatggccgaagcacgggctgtctccaggaaggctgccaacacagccaccaccacgggtccccgccagcccttcagcagggcccgctcgggcagtgcccgatacacctccaacacgaggcgccggcagcagggctcggattacacgtccacctctgaggaggagtacggctcccgccacggctcccccaaacacacacgctcccacacctcaacagccactcagaccccgagggctggcagctccagccgggctcgttcccgggcccccggcccccgggacacggacgacgatgaggaggagcctgacccttatggtttcatcgtgcagacggcagagattgcggagattgccaggctgagccagacgctggtgaaggacgtggccatcctagcccaggagatccacgatgtggctggggacggtgacacactgggctcctcggagcctgcccacagcgcctccctcagcaacatgcccagcacccccgcctcgaccatctctgcccgggaggagctggtgcagcgcatccccgaggccagcctcaacttccagaaggtgccgcccggctcgctgaactctcgggactttgaccagaacatgaacgacagctgtgaggacgccctggccaacaagacgcggcctcggaaccgagaggaggtgatcttcgataacctgatgctgaacccggtgtcccagctgtcgcaggccatccgtgagaacacagagcaccttgccgagaagatgaagatcctctttcagaacacagggagagcttgggaggacctggaagccaggatcaacgccgagaacgaggtgcccatcctgaagacatctaacaaggaaatcagctccatcctgaaggaactgaggcgggtgcagaaacagctggaagttatcaatgccatcgtggaccccagtgggagcctggacctgctcacaggaaacaggagcttggccagctctgcacagccggggctggggaagggccgcgtggctgcccagagcccaccctcacccgcctcagccgaggccctgctgccagccctgcccctgaggaatttcccacagcgggccagctgtgggcctcccagcctcccggaccccaccttcctccctgatgccgagaggttcctgatctaggccccagacctggccaggccagcctccctgtgcgtgtgcgtctctgccttccgtccgccgcacacccgcctgcctggccgcaggtggttctccctgaagacccccacatgtgccatatccctgtgggcgggtgcctcccacgcccttgccccctcgtcagctcccagccagcaccctactcaccctgtccagccccatggccacccccacccctgcctcgccccctacaggcctctgggcccagctcctggccaggctgctgccaaggtcaagccctcaagggcattaccccgcctcctcttcatcactgttatttttgtctttagctttaaaggaaagagttgttggtgccattgcaggtgccccctccaggcctgactggctccgccaggcactaacctgccataaccctttgtgctggcctgcggccaggcagaggaagagaggtcgactgtggggtcatttggtgccaaacatggaggtgggcaggctcacctgttcctgggactgtctgagatggcagggcacttgccctggtggctcccacctgaccccaggccttttataggcaggagccccactgcttccagcctctggtgccaacacagttgccaaacccattgagcttggggctgccctgtggaggcctcctgggtatggaccaggggcttgttgagagctgagccatgcacacaggtgcagacaccccccaactcccatgcacacggctagtccaggcgcctccacgctgcaccgtgaggactgcagggcatgtccccgtgaggggctatgggcctctgtaggtgggcttccaaggtcctgggtgcagccgggtgcatggcagcccttctggcgggggtgagcgcacgaccaaagtcactggaagccgggtttccggaagctcgcagcttggcctgcaccacacgccctccccttttggcttcacgccatcaggcctcaagtgggcatgggggcagggacgggcccaggaactgttgttttctcaggattctttcagctgggaacatggcaggtgagcagagcttggtgcctctgccgtggcccctgctggggcagcccgtgttgccggagcctctaagccaaagagcccgttggccgtggttggtgggggtggacgtgggggtgtcccacctggaccagactggcgtgggtgagctccacaccctgcctggcaatggtatgagagtcggacctggacagggccagctgctgggggagcggcactggggactggaggctggaagcgggtggtgtgtgtcccctgtttacttttagctgagctggggttgggtgtacgggttctgttcctctgagccctgcggcccacctgatgtttacgtgtgtgtgtgagggggggcgggggtggcaggtgtccccccctggtccccgccccaagagcctgctgtctgtatggaggaggtgctagcccggtccaccgggctgctgcccacccctgcatgccccagttgcccaccccgcctgcccctggacatgaagtggtcacgcttcatccacggctccttcccacccctcggcagtggctgtgcaatgttttaagttcacaagttcctgctcctccccacactgagctcctttgttcctccccctccagcctttgcctgggaactggtccttgtttgccgggcttctcggagggttcactgtacattcgttctcaggtggtcttgtggctgtctttcggaaaatggttattttatatgatttgtcatggaatttgttctaataaatcattcttctatcacatggcagcacgctggagcctgtcaccttggccatgtttctcta

SEQ ID NO: 341392 - DNA, 1439 bp, Homo sapiens
ggccagacgggcccagccagcaccaagatgagtgccacgtcctggttcctggtgagcagcagcggcgcccgccaccggctccctcgggagctcatcttcgtggggcgtgaggagtgtgagctcatgctacagtcccgcagcgtggacaagcagcatgccgtcatcaactacgaccaggacagggacgagcactgggtgaaggacctgggcagcctcaatgggacgtttgtgaatgacatgcgcatcccggaccagaagtacgtcacgctgaagctcaacgatgtcatccgctttggctacgattccaacatgtatgtgctggagcgtgtgcagcaccgagtcccggaggaggcactcaagcatgaaaagtacaccagccagctgcaggtgagcgtgaagggtttggcgcccaagaggagcgaggcactgccggaacacacaccatactgcgaggcctcgaaccccaggccggagaagggggaccggagaccaggaacagaggcagcctcttaccgcacacccctgtatgggcagccctcctggtggggtgaggacgatggtagcacgctgcctgacgcccagcgccagggagagccctacccagagcgccccaagggaccagtgcagcaggacggggagctccacggcttccgcgcccctgctgagcctcagggctgctcgttccggcgggagcccagctacttcgagatccccacgaaggagaccccgcagccgtcgcagccccccgaggtgccggcacacgagatgcccacgaaggatgcagaggcaggtgggggcggagcggcccctgtggtgcagagccacgcctccttcaccatcgagtttgatgactgcagccctggcaagatgaagatcaaggaccatatcaccaagttttccctgcgccagcggcggcccccgggcaaggaggccacacctggcgagatggtgtcggctgagaccaaggtggccgactggctggtgcagaatgacccgagcctgctgcaccgggttggccctggggatgaccgccacagcaccaagagcgacctgcctgtccacacccgcaccctgaagggccacaagcacgaggacggcacgcagagtgactcagaggaccccctggccaaggcggcctcggccgctggggtgcccttggaggccagcggggagcaggtgcggctgcagaggcagatcaagcgggacccccaggagctactacataaccagcaggcctttgtcatcgagttcttcgacgaggacacaccccgaaagaagcgctcccagtccttcactgtacattcgttctcaggtggtcttgtggctgtctttcggaaaatggttattttatatgatttgtcatggaatttgttctaataaatcattcttctatcacatggcagcacgctggagcctgtcaccttggccatgtttctcta

SEQ ID NO: 341393 - DNA, 258 bp, Homo sapiens
tgtggggagtttggcctccctttggggccgtggccagtgcctgtgtaaccagtggctaggccggtgtttggggccaggctggggagcacctcccccaggccccacctctggccagcagctgcctgggagctgggaggggctttgaggcctgtctggcccctgctgccccgacttcctctgtgcagaacctgccgtctttcctgccggctgcaggctgagccagacgctggtgaaggacgtggccatcctagcccagga

SEQ ID NO: 341394 - DNA, 626 bp, Homo sapiens
tggagtgggatcccgggaggcaggacactggctgagagttgtgtgtgtcctgtggggctgggccaggagtgggggagggctccctgagacaagccccctcaccgccagcctggctgccgccacctgaccttgggagggagcagcgtgtgccagatgaccagagggctcccagcactcccacggcccagcggggagcatctctggggagggcggtcatgaggggaggcctggggcagcagcagagggtgggggacgtggccctggcgtcttggcgaatcctgctctggagacagggtgggcacagctctgtggtcagaggcctgggggccactgctggtgttgtgctggggcaggggatggagcaggggtgcctctgcctcttgggtgtcacctcctcccctggagcacctgagggctggctgtgtgtctctccagtcccgcagcgtggacaagcagcatgccgtcatcaactacgaccaggacagggacgagcactgggtgaaggacctgggcagcctcaatggggtaagtgtgagaggccctggcctggccttttaacagctcgacccttcagccctggcccctccctctcagttctggctcctcccccagtcatagcccctccc

SEQ ID NO: 341395 - DNA, 6785 bp, Homo sapiens
tggagtgggatcccgggaggcaggacactggctgagagttgtgtgtgtcctgtggggctgggccaggagtgggggagggctccctgagacaagccccctcaccgccagcctggctgccgccacctgaccttgggagggagcagcgtgtgccagatgaccagagggctcccagcactcccacggcccagcggggagcatctctggggagggcggtcatgaggggaggcctggggcagcagcagagggtgggggacgtggccctggcgtcttggcgaatcctgctctggagacagggtgggcacagctctgtggtcagaggcctgggggccactgctggtgttgtgctggggcaggggatggagcaggggtgcctctgcctcttgggtgtcacctcctcccctggagcacctgagggctggctgtgtgtctctccagtcccgcagcgtggacaagcagcatgccgtcatcaactacgaccaggacagggacgagcactgggtgaaggacctgggcagcctcaatgggacgtttgtgaatgacatgcgcatcccggaccagaagtacgtcacgctgaagctcaacgatgtcatccgctttggctacgattccaacatgtatgtgctggagcgtgtgcagcaccgagtcccggaggaggcactcaagcatgaaaagtacaccagccagctgcaggtgagcgtgaagggtttggcgcccaagaggagcgaggcactgccggaacacacaccatactgcgaggcctcgaaccccaggccggagaagggggaccggagaccaggaacagaggcagcctcttaccgcacacccctgtatgggcagccctcctggtggggtgaggacgatggtagcacgctgcctgacgcccagcgccagggagagccctacccagagcgccccaagggaccagtgcagcaggacggggagctccacggcttccgcgcccctgctgagcctcagggctgctcgttccggcgggagcccagctacttcgagatccccacgaaggagaccccgcagccgtcgcagccccccgaggtgccggcacacgagatgcccacgaaggatgcagaggcaggtgggggcggagcggcccctgtggtgcagagccacgcctccttcaccatcgagtttgatgactgcagccctggcaagatgaagatcaaggaccatatcaccaagttttccctgcgccagcggcggcccccgggcaaggaggccacacctggcgagatggtgtcggctgagaccaaggtggccgactggctggtgcagaatgacccgagcctgctgcaccgggttggccctggggatgaccgccacagcaccaagagcgacctgcctgtccacacccgcaccctgaagggccacaagcacgaggacggcacgcagagtgactcagaggaccccctggccaaggcggcctcggccgctggggtgcccttggaggccagcggggagcaggtgcggctgcagaggcagatcaagcgggacccccaggagctactacataaccagcaggcctttgtcatcgagttcttcgacgaggacacaccccgaaagaagcgctcccagtccttcacgcacagcccgtccggggaccccaaggccgacaagcgccgtggcccaacgccggccgatagggaccgccccagtgtcccagccccagtccaggcagggggccgcagctcggggccacagagggccggctcgctcaagcgggagaagacagaggaacggctgggcagcccctcgcccgcctcccgaacccctgcccgccccttcggaagcgtggggcgccgctcccgcctggcccaggacttcatggcccagtgtctgcgggagagctccccggccgcccggcccagccccgagaaggttcctccggtgctgcccgctcccctgacaccccatgggaccagccccgtgggccccccgaccccaccgcccgcccccacggacccccagctgaccaaggcacggaaacaggaggaggacgacagcctcagtgacgcagggacatacaccatcgagaccgaggcgcaggacacggaggtggaggaggcccggaagatgatcgaccaggtctttggggtgttggagtcccctgaactctccagggcatcttcggccacctttcgcccagtcatcagaggggacagagatgagtctgatgacgggggcgtggcccagcggatggcgctactgcaggagtttgcctcccggccactgggtgcggccccccaggcggagcaccagggcctcccggtgccgggctcccctgggggtcagaagtgggtgtcccgctgggccagcctggctgacagctactcagacccgggcctcacagaggatggcctgggacgtagaggcggggagccggaggggtccctgcctgtgcgcatgcggcgacggctccctcagctgcccagtgagagggctgacagccctgcgggcccagagagcagcaggaggagtgggcctgggccaccggagctggacagtgagcagcccagccgcctcttcggccaggaggagttggatcctgacagcctcagcgatgccagtgggtcggacgggggccgaggccccgagccaggggtggagccacaggacagcagacgcaggagcccccaggaggggcccacgtggagcaggggtcggcgctcaccaagggcccccggggagccaactcccgcctctttcttcattggggaccagaatggggacgctgtgttatctaggaaaccgcttgcggctccaggggatggggagggcctagggcagacagcccagcccagccccccagcacgggatggcgtctatgtcagtgccaatgggagaatggtcatccagctacggcctggacggtccccagaacccgacggccctgccccagcctttctccggcaagagagcttcactaaggagccagccagtggtcccccagcgcccggcaagcccccccacatctccagccacccgcttctacaggacctggccgctacccgggccgcacgcatggacttccactcccaggacacccacctgatcttgaaggagacggagacggccctggcggccctggaggcccgactcctctctaattctgtggatgccgagtgtgaggggggcagcaccccgaggccgccggaggacgccctgtctggggactcggacgtggacacagccagcaccgtcagcctgcgtagtggcaagagcgggcccagccccacaaccccccagcctctgcgggcacagaaggagatgtcgccatccccgccagctgcacaggacccgggaggcaccgccctggtcagtgcccgtgagcagtcctcagagaggcagcatcacccacttggcccgacggacatgggccgtggagagccggtacggcgctcagccataaggcgtggccacaggccccgagggtccctggattggcccagtgaggagcgtggccctgtcctcgcccacctacccagctcagatgtgatggcctccaaccacgaaacccctgaggccaccggggcaggacggctaggttctcgccggaaaccagcggccccaccgccatccccagctgcccgggaggagcagagccgtagctcagccagctcccagaaggggccgcaggccttgacccgctccaacagcctgtccacccctcgccccacacgggcctcccggctgaggcgggcccggctgggggacgcttcagacactgaggctgcggatggtgagcgggggtccctgggcaaccctgagcccgtgggccggccagctgctgagcaggccaagaagctgtcacgcctggacatcctggccatgccccggaagcgggccggctccttcacagggactagtgaccccgaggcagcccctgcccgcaccagcttctctggccgcagtgtggagttgtgctgtgccagccgcaagcccaccatggccgaagcacgggctgtctccaggaaggctgccaacacagccaccaccacgggtccccgccagcccttcagcagggcccgctcgggcagtgcccgatacacctccaccactcagaccccgagggctggcagctccagccgggctcgttcccgggcccccggcccccgggacacggacgacgatgaggaggagcctgacccttatggtttcatcgtgcagacggcagagattgcggagattgccaggctgagccagacgctggtgaaggacgtggccatcctagcccaggagatccacgatgtggctggggacggtgacacactgggctcctcggagcctgcccacagcgcctccctcagcaacatgcccagcacccccgcctcgaccatctctgcccgggaggagctggtgcagcgcatccccgaggccagcctcaacttccagaaggtgccgcccggctcgctgaactctcgggactttgaccagaacatgaacgacagctgtgaggacgccctggccaacaagacgcggcctcggaaccgagaggaggtgatcttcgataacctgatgctgaacccggtgtcccagctgtcgcaggccatccgtgagaacacagagcaccttgccgagaagatgaagatcctctttcagaacacagggagagcttgggaggacctggaagccaggatcaacgccgagaacgaggtgcccatcctgaagacatctaacaaggaaatcagctccatcctgaaggaactgaggcgggtgcagaaacagctggaagttatcaatgccatcgtggaccccagtgggagcctggacctgctcacaggaaacaggagcttggccagctctgcacagccggggctggggaagggccgcgtggctgcccagagcccaccctcacccgcctcagccgaggccctgctgccagccctgcccctgaggaatttcccacagcgggccagctgtgggcctcccagcctcccggaccccaccttcctccctgatgccgagaggttcctgatctaggccccagacctggccaggccagcctccctgtgcgtgtgcgtctctgccttccgtccgccgcacacccgcctgcctggccgcaggtggttctccctgaagacccccacatgtgccatatccctgtgggcgggtgcctcccacgcccttgccccctcgtcagctcccagccagcaccctactcaccctgtccagccccatggccacccccacccctgcctcgccccctacaggcctctgggcccagctcctggccaggctgctgccaaggtcaagccctcaagggcattaccccgcctcctcttcatcactgttatttttgtctttagctttaaaggaaagagttgttggtgccattgcaggtgccccctccaggcctgactggctccgccaggcactaacctgccataaccctttgtgctggcctgcggccaggcagaggaagagaggtcgactgtggggtcatttggtgccaaacatggaggtgggcaggctcacctgttcctgggactgtctgagatggcagggcacttgccctggtggctcccacctgaccccaggccttttataggcaggagccccactgcttccagcctctggtgccaacacagttgccaaacccattgagcttggggctgccctgtggaggcctcctgggtatggaccaggggcttgttgagagctgagccatgcacacaggtgcagacaccccccaactcccatgcacacggctagtccaggcgcctccacgctgcaccgtgaggactgcagggcatgtccccgtgaggggctatgggcctctgtaggtgggcttccaaggtcctgggtgcagccgggtgcatggcagcccttctggcgggggtgagcgcacgaccaaagtcactggaagccgggtttccggaagctcgcagcttggcctgcaccacacgccctccccttttggcttcacgccatcaggcctcaagtgggcatgggggcagggacgggcccaggaactgttgttttctcaggattctttcagctgggaacatggcaggtgagcagagcttggtgcctctgccgtggcccctgctggggcagcccgtgttgccggagcctctaagccaaagagcccgttggccgtggttggtgggggtggacgtgggggtgtcccacctggaccagactggcgtgggtgagctccacaccctgcctggcaatggtatgagagtcggacctggacagggccagctgctgggggagcggcactggggactggaggctggaagcgggtggtgtgtgtcccctgtttacttttagctgagctggggttgggtgtacgggttctgttcctctgagccctgcggcccacctgatgtttacgtgtgtgtgtgagggggggcgggggtggcaggtgtccccccctggtccccgccccaagagcctgctgtctgtatggaggaggtgctagcccggtccaccgggctgctgcccacccctgcatgccccagttgcccaccccgcctgcccctggacatgaagtggtcacgcttcatccacggctccttcccacccctcggcagtggctgtgcaatgttttaagttcacaagttcctgctcctccccacactgagctcctttgttcctccccctccagcctttgcctgggaactggtccttgtttgccgggcttctcggagggttcactgtacattcgttctcaggtggtcttgtggctgtctttcggaaaatggttattttatatgatttgtcatggaatttgttctaataaatcattcttctatcacatggca

SEQ ID NO: 341396 - DNA, 6371 bp, Homo sapiens
cctgtgcgcatgcggcgacggctccctcagctgcccagtgagagggctgacagccctgcgggcccagagagcagcaggaggagtgggcctgggccaccggagctggacagtgagcagcaccgagtcccggaggaggcactcaagcatgaaaagtacaccagccagctgcaggtgagcgtgaagggtttggcgcccaagaggagcgaggcactgccggaacacacaccatactgcgaggcctcgaaccccaggccggagaagggggaccggagaccaggaacagaggcagcctcttaccgcacacccctgtatgggcagccctcctggtggggtgaggacgatggtagcacgctgcctgacgcccagcgccagggagagccctacccagagcgccccaagggaccagtgcagcaggacggggagctccacggcttccgcgcccctgctgagcctcagggctgctcgttccggcgggagcccagctacttcgagatccccacgaaggagaccccgcagccgtcgcagccccccgaggtgccggcacacgagatgcccacgaaggatgcagaggcaggtgggggcggagcggcccctgtggtgcagagccacgcctccttcaccatcgagtttgatgactgcagccctggcaagatgaagatcaaggaccatatcaccaagttttccctgcgccagcggcggcccccgggcaaggaggccacacctggcgagatggtgtcggctgagaccaaggtggccgactggctggtgcagaatgacccgagcctgctgcaccgggttggccctggggatgaccgccacagcaccaagagcgacctgcctgtccacacccgcaccctgaagggccacaagcacgaggacggcacgcagagtgactcagaggaccccctggccaaggcggcctcggccgctggggtgcccttggaggccagcggggagcaggtgcggctgcagaggcagatcaagcgggacccccaggagctactacataaccagcaggcctttgtcatcgagttcttcgacgaggacacaccccgaaagaagcgctcccagtccttcacgcacagcccgtccggggaccccaaggccgacaagcgccgtggcccaacgccggccgatagggaccgccccagtgtcccagccccagtccaggcagggggccgcagctcggggccacagagggccggctcgctcaagcgggagaagacagaggaacggctgggcagcccctcgcccgcctcccgaacccctgcccgccccttcggaagcgtggggcgccgctcccgcctggcccaggacttcatggcccagtgtctgcgggagagctccccggccgcccggcccagccccgagaaggttcctccggtgctgcccgctcccctgacaccccatgggaccagccccgtgggccccccgaccccaccgcccgcccccacggacccccagctgaccaaggcacggaaacaggaggaggacgacagcctcagtgacgcagggacatacaccatcgagaccgaggcgcaggacacggaggtggaggaggcccggaagatgatcgaccaggtctttggggtgttggagtcccctgaactctccagggcatcttcggccacctttcgcccagtcatcagaggggacagagatgagtctgatgacgggggcgtggcccagcggatggcgctactgcaggagtttgcctcccggccactgggtgcggccccccaggcggagcaccagggcctcccggtgccgggctcccctgggggtcagaagtgggtgtcccgctgggccagcctggctgacagctactcagacccgggcctcacagaggatggcctgggacgtagaggcggggagccggaggggtccctgcctgtgcgcatgcggcgacggctccctcagctgcccagtgagagggctgacagccctgcgggcccagagagcagcaggaggagtgggcctgggccaccggagctggacagtgagcagcccagccgcctcttcggccaggaggagttggatcctgacagcctcagcgatgccagtgggtcggacgggggccgaggccccgagccaggggtggagccacaggacagcagacgcaggagcccccaggaggggcccacgtggagcaggggtcggcgctcaccaagggcccccggggagccaactcccgcctctttcttcattggggaccagaatggggacgctgtgttatctaggaaaccgcttgcggctccaggggatggggagggcctagggcagacagcccagcccagccccccagcacgggatggcgtctatgtcagtgccaatgggagaatggtcatccagctacggcctggacggtccccagaacccgacggccctgccccagcctttctccggcaagagagcttcactaaggagccagccagtggtcccccagcgcccggcaagcccccccacatctccagccacccgcttctacaggacctggccgctacccgggccgcacgcatggacttccactcccaggacacccacctgatcttgaaggagacggagacggccctggcggccctggaggcccgactcctctctaattctgtggatgccgagtgtgaggggggcagcaccccgaggccgccggaggacgccctgtctggggactcggacgtggacacagccagcaccgtcagcctgcgtagtggcaagagcgggcccagccccacaaccccccagcctctgcgggcacagaaggagatgtcgccatccccgccagctgcacaggacccgggaggcaccgccctggtcagtgcccgtgagcagtcctcagagaggcagcatcacccacttggcccgacggacatgggccgtggagagccggtacggcgctcagccataaggcgtggccacaggccccgagggtccctggattggcccagtgaggagcgtggccctgtcctcgcccacctacccagctcagatgtgatggcctccaaccacgaaacccctgaggccaccggggcaggacggctaggttctcgccggaaaccagcggccccaccgccatccccagctgcccgggaggagcagagccgtagctcagccagctcccagaaggggccgcaggccttgacccgctccaacagcctgtccacccctcgccccacacgggcctcccggctgaggcgggcccggctgggggacgcttcagacactgaggctgcggatggtgagcgggggtccctgggcaaccctgagcccgtgggccggccagctgctgagcaggccaagaagctgtcacgcctggacatcctggccatgccccggaagcgggccggctccttcacagggactagtgaccccgaggcagcccctgcccgcaccagcttctctggccgcagtgtggagttgtgctgtgccagccgcaagcccaccatggccgaagcacgggctgtctccaggaaggctgccaacacagccaccaccacgggtccccgccagcccttcagcagggcccgctcgggcagtgcccgatacacctccaacacgaggcgccggcagcagggctcggattacacgtccacctctgaggaggagtacggctcccgccacggctcccccaaacacacacgctcccacacctcaacagccactcagaccccgagggctggcagctccagccgggctcgttcccgggcccccggcccccgggacacggacgacgatgaggaggagcctgacccttatggtttcatcgtgcagacggcagagattgcggagattgccaggctgagccagacgctggtgaaggacgtggccatcctagcccaggagatccacgatgtggctggggacggtgacacactgggctcctcggagcctgcccacagcgcctccctcagcaacatgcccagcacccccgcctcgaccatctctgcccgggaggagctggtgcagcgcatccccgaggccagcctcaacttccagaaggtgccgcccggctcgctgaactctcgggactttgaccagaacatgaacgacagctgtgaggacgccctggccaacaagacgcggcctcggaaccgagaggaggtgatcttcgataacctgatgctgaacccggtgtcccagctgtcgcaggccatccgtgagaacacagagcaccttgccgagaagatgaagatcctctttcagaacacagggagagcttgggaggacctggaagccaggatcaacgccgagaacgaggtgcccatcctgaagacatctaacaaggaaatcagctccatcctgaaggaactgaggcgggtgcagaaacagctggaagttatcaatgccatcgtggaccccagtgggagcctggacctgctcacaggaaacaggagcttggccagctctgcacagccggggctggggaagggccgcgtggctgcccagagcccaccctcacccgcctcagccgaggccctgctgccagccctgcccctgaggaatttcccacagcgggccagctgtgggcctcccagcctcccggaccccaccttcctccctgatgccgagaggttcctgatctaggccccagacctggccaggccagcctccctgtgcgtgtgcgtctctgccttccgtccgccgcacacccgcctgcctggccgcaggtggttctccctgaagacccccacatgtgccatatccctgtgggcgggtgcctcccacgcccttgccccctcgtcagctcccagccagcaccctactcaccctgtccagccccatggccacccccacccctgcctcgccccctacaggcctctgggcccagctcctggccaggctgctgccaaggtcaagccctcaagggcattaccccgcctcctcttcatcactgttatttttgtctttagctttaaaggaaagagttgttggtgccattgcaggtgccccctccaggcctgactggctccgccaggcactaacctgccataaccctttgtgctggcctgcggccaggcagaggaagagaggtcgactgtggggtcatttggtgccaaacatggaggtgggcaggctcacctgttcctgggactgtctgagatggcagggcacttgccctggtggctcccacctgaccccaggccttttataggcaggagccccactgcttccagcctctggtgccaacacagttgccaaacccattgagcttggggctgccctgtggaggcctcctgggtatggaccaggggcttgttgagagctgagccatgcacacaggtgcagacaccccccaactcccatgcacacggctagtccaggcgcctccacgctgcaccgtgaggactgcagggcatgtccccgtgaggggctatgggcctctgtaggtgggcttccaaggtcctgggtgcagccgggtgcatggcagcccttctggcgggggtgagcgcacgaccaaagtcactggaagccgggtttccggaagctcgcagcttggcctgcaccacacgccctccccttttggcttcacgccatcaggcctcaagtgggcatgggggcagggacgggcccaggaactgttgttttctcaggattctttcagctgggaacatggcaggtgagcagagcttggtgcctctgccgtggcccctgctggggcagcccgtgttgccggagcctctaagccaaagagcccgttggccgtggttggtgggggtggacgtgggggtgtcccacctggaccagactggcgtgggtgagctccacaccctgcctggcaatggtatgagagtcggacctggacagggccagctgctgggggagcggcactggggactggaggctggaagcgggtggtgtgtgtcccctgtttacttttagctgagctggggttgggtgtacgggttctgttcctctgagccctgcggcccacctgatgtttacgtgtgtgtgtgagggggggcgggggtggcaggtgtccccccctggtccccgccccaagagcctgctgtctgtatggaggaggtgctagcccggtccaccgggctgctgcccacccctgcatgccccagttgcccaccccgcctgcccctggacatgaagtggtcacgcttcatccacggctccttcccacccctcggcagtggctgtgcaatgttttaagttcacaagttcctgctcctccccacactgagctcctttgttcctccccctccagcctttgcctgggaactggtccttgtttgccgggcttctcggagggttcactgtacattcgttctcaggtggtcttgtggctgtctttcggaaaatggttattttatatgatttgtcatggaatttgttctaataaatcattcttctatcacatggca

SEQ ID NO: 341397 - DNA, 6358 bp, Homo sapiens
ggccagacgggcccagccagcaccaagatgagtgccacgtcctggttcctggtgagcagcagcggcgcccgccaccggctccctcgggagctcatcttcgtggggcgtgaggagtgtgagctcatgctacagtcccgcagcgtggacaagcagcatgccgtcatcaactacgaccaggacagggacgagcactgggtgaaggacctgggcagcctcaatgggacgtttgtgaatgacatgcgcatcccggaccagaagtacgtcacgctgaagctcaacgatgtcatccgctttggctacgattccaacatgtatgtgctggagcgtgtgcagcaccgagtcccggaggaggcactcaagcatgaaaagtacaccagccagctgcaggtgagcgtgaagggtttggcgcccaagaggagcgaggcactgccggaacacacaccatactgcgaggcctcgaaccccaggccggagaagggggaccggagaccaggaacagaggcagcctcttaccgcacacccctgtatgggcagccctcctggtggggtgaggacgatggtagcacgctgcctgacgcccagcgccagggagagccctacccagagcgccccaagggaccagtgcagcaggacggggagctccacggcttccgcgcccctgctgagcctcagggctgctcgttccggcgggagcccagctacttcgagatccccacgaaggagaccccgcagccgtcgcagccccccgaggtgccggcacacgagatgcccacgaaggatgcagaggcaggtgggggcggagcggcccctgtggtgcagagccacgcctccttcaccatcgagtttgatgactgcagccctggcaagatgaagatcaaggaccatatcaccaagttttccctgcgccagcggcggcccccgggcaaggaggccacacctggcgagatggtgtcggctgagaccaaggtggccgactggctggtgcagaatgacccgagcctgctgcaccgggttggccctggggatgaccgccacagcaccaagagcgacctgcctgtccacacccgcaccctgaagggccacaagcacgaggacggcacgcagagtgactcagaggaccccctggccaaggcggcctcggccgctggggtgcccttggaggccagcggggagcaggtgcggctgcagaggcagatcaagcgggacccccaggagctactacataaccagcaggcctttgtcatcgagttcttcgacgaggacacaccccgaaagaagcgctcccagtccttcacgcacagcccgtccggggaccccaaggccgacaagcgccgtggcccaacgccggccgatagggaccgccccagtgtcccagccccagtccaggcagggggccgcagctcggggccacagagggccggctcgctcaagcgggagaagacagaggaacggctgggcagcccctcgcccgcctcccgaacccctgcccgccccttcggaagcgtggggcgccgctcccgcctggcccaggacttcatggcccagtgtctgcgggagagctccccggccgcccggcccagccccgagaaggttcctccggtgctgcccgctcccctgacaccccatgggaccagccccgtgggccccccgaccccaccgcccgcccccacggacccccagctgaccaaggcacggaaacaggaggaggacgacagcctcagtgacgcagggacatacaccatcgagaccgaggcgcaggacacggaggtggaggaggcccggaagatgatcgaccaggtctttggggtgttggagtcccctgaactctccagggcatcttcggccacctttcgcccagtcatcagaggggacagagatgagtctgatgacgggggcgtggcccagcggatggcgctactgcaggagtttgcctcccggccactgggtgcggccccccaggcggagcaccagggcctcccggtgccgggctcccctgggggtcagaagtgggtgtcccgctgggccagcctggctgacagctactcagacccgggcctcacagaggatggcctgggacgtagaggcggggagccggaggggtccctgcctgtgcgcatgcggcgacggctccctcagctgcccagtgagagggctgacagccctgcgggcccagagagcagcaggaggagtgggcctgggccaccggagctggacagtgagcagcccagccgcctcttcggccaggaggagttggatcctgacagcctcagcgatgccagtgggtcggacgggggccgaggccccgagccaggggtggagccacaggacagcagacgcaggagcccccaggaggggcccacgtggagcaggggtcggcgctcaccaagggcccccggggagccaactcccgcctctttcttcattggggaccagaatggggacgctgtgttatctaggaaaccgcttgcggctccaggggatggggagggcctagggcagacagcccagcccagccccccagcacgggatggcgtctatgtcagtgccaatgggagaatggtcatccagctacggcctggacggtccccagaacccgacggccctgccccagcctttctccggcaagagagcttcactaaggagccagccagtggtcccccagcgcccggcaagcccccccacatctccagccacccgcttctacaggacctggccgctacccgggccgcacgcatggacttccactcccaggacacccacctgatcttgaaggagacggagacggccctggcggccctggaggcccgactcctctctaattctgtggatgccgagtgtgaggggggcagcaccccgaggccgccggaggacgccctgtctggggactcggacgtggacacagccagcaccgtcagcctgcgtagtggcaagagcgggcccagccccacaaccccccagcctctgcgggcacagaaggagatgtcgccatccccgccagctgcacaggacccgggaggcaccgccctggtcagtgcccgtgagcagtcctcagagaggcagcatcacccacttggcccgacggacatgggccgtggagagccggtacggcgctcagccataaggcgtggccacaggccccgagggtccctggattggcccagtgaggagcgtggccctgtcctcgcccacctacccagctcagatgtgatggcctccaaccacgaaacccctgaggccaccggggcaggacggctaggttctcgccggaaaccagcggccccaccgccatccccagctgcccgggaggagcagagccgtagctcagccagctcccagaaggggccgcaggccttgacccgctccaacagcctgtccacccctcgccccacacgggcctcccggctgaggcgggcccggctgggggacgcttcagacactgaggctgcggatggtgagcgggggtccctgggcaaccctgagcccgtgggccggccagctgctgagcaggccaagaagctgtcacgcctggacatcctggccatgccccggaagcgggccggctccttcacagggactagtgaccccgaggcagcccctgcccgcaccagcttctctggccgcagtgtggagttgtgctgtgccagccgcaagcccaccatggccgaagcacgggctgtctccaggaaggctgccaacacagccaccaccacgggtccccgccagcccttcagcagggcccgctcgggcagtgcccgatacacctccaacacgaggcgccggcagcagggctcggattacacgtccacctctgaggaggagtacggctcccgccacggctcccccaaacacacacgctcccacacctcaacagccactcagaccccgagggctggcagctccagccgggctcgttcccgggcccccggcccccgggacacggacgacgatgaggaggagcctgacccttatggtttcatcgtgcagacggcagagattgcggagattgccaggctgagccagacgctggtgaaggacgtggccatcctagcccaggagatccacgatgtggctggggacggtgacacactgggctcctcggagcctgcccacagcgcctccctcagcaacatgcccagcacccccgcctcgaccatctctgcccgggaggagctggtgcagcgcatccccgaggccagcctcaacttccagaaggtgccgcccggctcgctgaactctcgggactttgaccagaacatgaacgacagctgtgaggacgccctggccaacaagacgcggcctcggaaccgagaggaggtgatcttcgataacctgatgctgaacccggtgtcccagctgtcgcaggccatccgtgagaacacagagcaccttgccgagaagatgaagatcctctttcagaacacagggagagcttgggaggacctggaagccaggatcaacgccgagaacgaggtgcccatcctgaagacatctaacaaggaaatcagctccatcctgaaggaactgaggcgggtgcagaaacagctggaagttatcaatgccatcgtggaccccagtgggagcctggacctgctcacaggaaacaggagcttggccagctctgcacagccggggctggggaagggccgcgtggctgcccagagcccaccctcacccgcctcagccgaggccctgctgccagccctgcccctgaggaatttcccacagcgggccagctgtgggcctcccagcctcccggaccccaccttcctccctgatgccgagaggttcctgatctaggccccagacctggccaggccagcctccctgtgcgtgtgcgtctctgccttccgtccgccgcacacccgcctgcctggccgcaggtggttctccctgaagacccccacatgtgccatatccctgtgggcgggtgcctcccacgcccttgccccctcgtcagctcccagccagcaccctactcaccctgtccagccccatggccacccccacccctgcctcgccccctacaggcctctgggcccagctcctggccaggctgctgccaaggtcaagccctcaagggcattaccccgcctcctcttcatcactgttatttttgtctttagctttaaaggaaagagttgttggtgccattgcaggtgccccctccaggcctgactggctccgccaggcactaacctgccataaccctttgtgctggcctgcggccaggcagaggaagagaggtcgactgtggggtcatttggtgccaaacatggaggtgggcaggctcacctgttcctgggactgtctgagatggcagggcacttgccctggtggctcccacctgaccccaggccttttataggcaggagccccactgcttccagcctctggtgccaacacagttgccaaacccattgagcttggggctgccctgtggaggcctcctgggtatggaccaggggcttgttgagagctgagccatgcacacaggtgcagacaccccccaactcccatgcacacggctagtccaggcgcctccacgctgcaccgtgaggactgcagggcatgtccccgtgaggggctatgggcctctgtaggtgggcttccaaggtcctgggtgcagccgggtgcatggcagcccttctggcgggggtgagcgcacgaccaaagtcactggaagccgggtttccggaagctcgcagcttggcctgcaccacacgccctccccttttggcttcacgccatcaggcctcaagtgggcatgggggcagggacgggcccaggaactgttgttttctcaggattctttcagctgggaacatggcaggtgagcagagcttggtgcctctgccgtggcccctgctggggcagcccgtgttgccggagcctctaagccaaagagcccgttggccgtggttggtgggggtggacgtgggggtgtcccacctggaccagactggcgtgggtgagctccacaccctgcctggcaatggtatgagagtcggacctggacagttgcccaccccgcctgcccctggacatgaagtggtcacgcttcatccacggctccttcccacccctcggcagtggctgtgcaatgttttaagttcacaagttcctgctcctccccacactgagctcctttgttcctccccctccagcctttgcctgggaactggtccttgtttgccgggcttctcggagggttcactgtacattcgttctcaggtggtcttgtggctgtctttcggaaaatggttattttatatgatttgtcatggaatttgttctaataaatcattcttctatcacatggcagcacgctggagcctgtcaccttggccatgtttctcta

SEQ ID NO: 341398 - DNA, 233 bp, Homo sapiens
cctggggcccacggtgccggccctccctcttgcagctggtgcagcgcatccccgaggccagcctcaacttccagaaggtgccgcccggctcgctgaactctcgggactttgaccagaacatgaacgacagctgtgaggacgccctggccaacaagacgcggcctcggaaccgagaggaggcacggtgcccactaccgccacggagctgggtgtggggggagcaggggcggggc

SEQ ID NO: 341399 - DNA, 1876 bp, Homo sapiens
gaggcgagtggttctccagccggaaaatcgcggctccggtgccgctctgggctcagccagtgagaggccgggggtgtggtagagagaaggagccggccgggtacttaggaccgcgccagcctctgagcccggcctccttcgcactttcgagtgcgcgtttgctgcccgccgcagcccgggcgttgaaggtagtaaagcggccacccggccgcatcatggtgaccccctgtcccaccagcccctcgagccccgccgcccgagcggggaggcgggacaacgaccagaaccttcgcgccccggtgaagaagagcaggcgtccgcgcctccggaggaagcagccgctgcatcccctgaacccgtgcccgctcccgggagactccggcatttgcgacctgttcgagtcccccagctccggctcagacggcgcagagagcccctctgcggcgcggggtggtagccccctgcccggcccggcccagcccgtggcgcagctagatctacagaccttccgcgactacggccagagctgctacgccttccgcaaggcgcaggagagccacttccacccgcgggaggcgctggcacggcagccacaagtgaggtgctggtagagccagctccacgccgccgctcttcctctcctcccaggctctctcctctcctgccggctcggccctccgagcgcccgggcccgcgacagcccaggtcccgccccgagtcgaagcacaaggggccgtggaggggcgtcaccggcctcattttacagatggagaaaagtggggcgtagacggcttgagggacttgccccgtcccaagctggctactggggcacggtagagaggaattcgtttccgggttgagtctggactcctaccgaactcgggcaagttatttaacacccctgagcttctttcttcatctgcaaaatggaacccctccccttcctttgaattgctgagcccattacgcgaggtgacggcggaatcccgctgtaagctgctcagctggctgatcccggtgcaccgccaattcggcctctccttcgagtcgctgtgcctgacggtgaacactctggaccgcttcctcaccaccacgccggtggctgcagactgcttccagctgcttggggtcacctccttgctcatcgcttgcaaacaggtggaggtgcacccgccgcgcgtgaagcagcttctggccctctgctgcggcgccttctcccggcagcagctctgcaacctcgagtgcatcgtgctgcacaagctgcacttcaccctgggtgcgcccaccattagcttcttcctggagcatttcacgcacgctcgcgtggaggcggggcaggctgaggcctccgaagctctggaagcgcaagccctggcgcggggggtggcagagctgagtctggccgactatgccttcaccagctactccccttccctcctggcgatctgctgcctggcgctggcggaccgcatgctgcgggtctcgcggcccgtggacttgcgactgggagaccacccggaggcggcgctggaggactgtatgggcaagttgcagctgctggtggccataaacagtacttccttgactcacatgctgcccgttcagatctgcgagaagtgcagcctgcccccgagctcgaaataaaacagatccttcgtttccttttagtccctggcccggctgctggacctctcccgtagcctcagaagagtgcagtactggtccacagagaaggcttcaggacctgcttggtcagctgcaggttgtaaatagtgtacgatactagcatctggtattttatttattttgcagcgagcacatgaggaagctgagtctttcaccaataaacagttgtggtttgtctaaaaacctgcaa

SEQ ID NO: 341400 - DNA, 1375 bp, Homo sapiens
gaggcgagtggttctccagccggaaaatcgcggctccggtgccgctctgggctcagccagtgagaggccgggggtgtggtagagagaaggagccggccgggtacttaggaccgcgccagcctctgagcccggcctccttcgcactttcgagtgcgcgtttgctgcccgccgcagcccgggcgttgaaggtagtaaagcggccacccggccgcatcatggtgaccccctgtcccaccagcccctcgagccccgccgcccgagcggggaggcgggacaacgaccagaaccttcgcgccccggtgaagaagagcaggcgtccgcgcctccggaggaagcagccgctgcatcccctgaacccgtgcccgctcccgggagactccggcatttgcgacctgttcgagtcccccagctccggctcagacggcgcagagagcccctctgcggcgcggggtggtagccccctgcccggcccggcccagcccgtggcgcagctagatctacagaccttccgcgactacggccagagctgctacgccttccgcaaggcgcaggagagccacttccacccgcgggaggcgctggcacggcagccacaagtgacggcggaatcccgctgtaagctgctcagctggctgatcccggtgcaccgccaattcggcctctccttcgagtcgctgtgcctgacggtgaacactctggaccgcttcctcaccaccacgccggtggctgcagactgcttccagctgcttggggtcacctccttgctcatcgcttgcaaacaggtggaggtgcacccgccgcgcgtgaagcagcttctggccctctgctgcggcgccttctcccggcagcagctctgcaacctcgagtgcatcgtgctgcacaagctgcacttcaccctgggtgcgcccaccattagcttcttcctggagcatttcacgcacgctcgcgtggaggcggggcaggctgaggcctccgaagctctggaagcgcaagccctggcgcggggggtggcagagctgagtctggccgactatgccttcaccagctactccccttccctcctggcgatctgctgcctggcgctggcggaccgcatgctgcgggtctcgcggcccgtggacttgcgactgggagaccacccggaggcggcgctggaggactgtatggtccctggcccggctgctggacctctcccgtagcctcagaagagtgcagtactggtccacagagaaggcttcaggacctgcttggtcagctgcaggttgtaaatagtgtacgatactagcatctggtattttatttattttgcagcgagcacatgaggaagctgagtctttcaccaataaacagttgtggtttgtctaaaaacctgcaa

SEQ ID NO: 341401 - DNA, 1500 bp, Homo sapiens
gaggcgagtggttctccagccggaaaatcgcggctccggtgccgctctgggctcagccagtgagaggccgggggtgtggtagagagaaggagccggccgggtacttaggaccgcgccagcctctgagcccggcctccttcgcactttcgagtgcgcgtttgctgcccgccgcagcccgggcgttgaaggtagtaaagcggccacccggccgcatcatggtgaccccctgtcccaccagcccctcgagccccgccgcccgagcggggaggcgggacaacgaccagaaccttcgcgccccggtgaagaagagcaggcgtccgcgcctccggaggaagcagccgctgcatcccctgaacccgtgcccgctcccgggagactccggcatttgcgacctgttcgagtcccccagctccggctcagacggcgcagagagcccctctgcggcgcggggtggtagccccctgcccggcccggcccagcccgtggcgcagctagatctacagaccttccgcgactacggccagagctgctacgccttccgcaaggcgcaggagagccacttccacccgcgggaggcgctggcacggcagccacaagtgacggcggaatcccgctgtaagctgctcagctggctgatcccggtgcaccgccaattcggcctctccttcgagtcgctgtgcctgacggtgaacactctggaccgcttcctcaccaccacgccggtggctgcagactgcttccagctgcttggggtcacctccttgctcatcgcttgcaaacaggtggaggtgcacccgccgcgcgtgaagcagcttctggccctctgctgcggcgccttctcccggcagcagctctgcaacctcgagtgcatcgtgctgcacaagctgcacttcaccctgggtgcgcccaccattagcttcttcctggagcatttcacgcacgctcgcgtggaggcggggcaggctgaggcctccgaagctctggaagcgcaagccctggcgcggggggtggcagagctgagtctggccgactatgccttcaccagctactccccttccctcctggcgatctgctgcctggcgctggcggaccgcatgctgcgggtctcgcggcccgtggacttgcgactgggagaccacccggaggcggcgctggaggactgtatgggcaagttgcagctgctggtggccataaacagtacttccttgactcacatgctgcccgttcagatctgcgagaagtgcagcctgcccccgagctcgaaataaaacagatccttcgtttccttttagtccctggcccggctgctggacctctcccgtagcctcagaagagtgcagtactggtccacagagaaggcttcaggacctgcttggtcagctgcaggttgtaaatagtgtacgatactagcatctggtattttatttattttgcagcgagcacatgaggaagctgagtctttcaccaataaacagttgtggtttgtctaaaaacctgcaa

SEQ ID NO: 341402 - DNA, 2096 bp, Homo sapiens
gaggcgagtggttctccagccggaaaatcgcggctccggtgccgctctgggctcagccagtgagaggccgggggtgtggtagagagaaggagccggccgggtacttaggaccgcgccagcctctgagcccggcctccttcgcactttcgagtgcgcgtttgctgcccgccgcagcccgggcgttgaaggtagtaaagcggccacccggccgcatcatggtgaccccctgtcccaccagcccctcgagccccgccgcccgagcggggaggcgggacaacgaccagaaccttcgcgccccggtgaagaagagcaggcgtccgcgcctccggaggaagcagccgctgcatcccctgaacccgtgcccgctcccgggagactccggcatttgcgacctgttcgagtcccccagctccggctcagacggcgcagagagcccctctgcggcgcggggtggtagccccctgcccggcccggcccagcccgtggcgcagctagatctacagaccttccgcgactacggccagagctgctacgccttccgcaaggcgcaggagagccacttccacccgcgggaggcgctggcacggcagccacaagtgaggtgctggtagagccagctccacgccgccgctcttcctctcctcccaggctctctcctctcctgccggctcggccctccgagcgcccgggcccgcgacagcccaggtcccgccccgagtcgaagcacaaggggccgtggaggggcgtcaccggcctcattttacagatggagaaaagtggggcgtagacggcttgagggacttgccccgtcccaagctggctactggggcacggtagagaggaattcgtttccgggttgagtctggactcctaccgaactcgggcaagttatttaacacccctgagcttctttcttcatctgcaaaatggaacccctccccttcctttgaattgctgagcccattacgcgaggtaacgtgtacgacgctctctgcacagcgccaggtcccaatcccggtgttccggctcagcacggccacagcgtttcccagtttccattgcgtttctctttctgaactcttcttgcccctctcctgggaagctccccgattcttcttggcccttccttcccttccacagtccctctccaccctaagcccagcgggcccgcctcccccctccttcccggcaggtgacggcggaatcccgctgtaagctgctcagctggctgatcccggtgcaccgccaattcggcctctccttcgagtcgctgtgcctgacggtgaacactctggaccgcttcctcaccaccacgccggtggctgcagactgcttccagctgcttggggtcacctccttgctcatcgcttgcaaacaggtggaggtgcacccgccgcgcgtgaagcagcttctggccctctgctgcggcgccttctcccggcagcagctctgcaacctcgagtgcatcgtgctgcacaagctgcacttcaccctgggtgcgcccaccattagcttcttcctggagcatttcacgcacgctcgcgtggaggcggggcaggctgaggcctccgaagctctggaagcgcaagccctggcgcggggggtggcagagctgagtctggccgactatgccttcaccagctactccccttccctcctggcgatctgctgcctggcgctggcggaccgcatgctgcgggtctcgcggcccgtggacttgcgactgggagaccacccggaggcggcgctggaggactgtatgggcaagttgcagctgctggtggccataaacagtacttccttgactcacatgctgcccgttcagatctgcgagaagtgcagcctgcccccgagctcgaaataaaacagatccttcgtttccttttagtccctggcccggctgctggacctctcccgtagcctcagaagagtgcagtactggtccacagagaaggcttcaggacctgcttggtcagctgcaggttgtaaatagtgtacgatactagcatctggtattttatttattttgcagcgagcacatgaggaagctgagtctttcaccaataaacagttgtggtttgtctaaaaacctgcaa

SEQ ID NO: 341403 - DNA, 1528 bp, Homo sapiens
gaggcgagtggttctccagccggaaaatcgcggctccggtgccgctctgggctcagccagtgagaggccgggggtgtggtagagagaaggagccggccgggtacttaggaccgcgccagcctctgagcccggcctccttcgcactttcgagtgcgcgtttgctgcccgccgcagcccgggcgttgaaggtagtaaagcggccacccggccgcatcatggtgaccccctgtcccaccagcccctcgagccccgccgcccgagcggggaggcgggacaacgaccagaaccttcgcgccccggtgaagaagagcaggcgtccgcgcctccggaggaagcagccgctgcatcccctgaacccgtgcccgctcccgggagactccggcatttgcgacctgttcgagtcccccagctccggctcagacggcgcagagagcccctctgcggcgcggggtggtagccccctgcccggcccggcccagcccgtggcgcagctagatctacagaccttccgcgactacggccagagctgctacgccttccgcaaggcgcaggagagccacttccacccgcgggaggcgctggcacggcagccacaagtgaggtgctggtagagccagctccacgccgccgctcttcctctcctcccaggctctctcctctcctgccggctcggccctccgagcgcccgggcccgcgacagcccaggtcccgccccgagtcgaagcacaaggggccgtggaggggcgtcaccggcctcattttacagatggagaaaagtggggcgtagacggcttgagggacttgccccgtcccaagctggctactggggcacggtagagaggaattcgtttccgggttgagtctggactcctaccgaactcgggcaagttatttaacacccctgagcttctttcttcatctgcaaaatggaacccctccccttcctttgaattgctgagcccattacgcgaggtaacgtgtacgacgctctctgcacagcgccaggtcccaatcccggtgttccggctcagcacggccacagcgtttcccagtttccattgcgtttctctttctgaactcttcttgcccctctcctgggaagctccccgattcttcttggcccttccttcccttccacagtccctctccaccctaagcccagcgggcccgcctcccccctccttcccggcaggtgacggcggaatcccgctgtaagctgctcagctggctgatcccggtgcaccgccaattcggcctctccttcgagtcgctgtgcctgacggtgaacactctggaccgcttcctcaccaccacgccggtggctgcagactgcttccagctgcttggggtcacctccttgctcatcgcttgcaaacaggtacctggggtatcaaacaggtacacgcggcatctggggacgcagccaaactcccccgccactccctggccgcccgtctttccagcgcccacgattcagtgctgggttcccagaactcattttatcagacatttgcatacgcatatatcc

SEQ ID NO: 341404 - DNA, 387 bp, Homo sapiens
tgaaaggatgtaaaaaaaacccatacaaatagtaaacaaaagagagatgaggtaactatactaatatcagacaaaatagactataagtcaaaaacgattagaagagattaaaaagtacattatgtattaataaaaggataaattcatcaataatatgtaacagttataaacatatatgcaccaaatatcagagcttcaaaatatatgaagcaaacactggcagaattgaagggagaaatagatatctctataataatatatggagacttcaaaacaccactttcagtaagagacagaaccactagacagaagataaatgaggaaacaggacttcaacaacaccgtaagccaattatacctggcagacatacacagaacactccatac

SEQ ID NO: 341405 - DNA, 3693 bp, Homo sapiens
gagaaaatggcggcggcagcagcttcggcgcctcagcagctctcggatgaggagcttttctctcagctccgccgttacggcctgtctcccggaccagtgacggagagcacccgcccggtctacctcaagaagctgaagaagcttcgagaggaagagcagcaacagcaccggtcagggggccgcggcaacaagacgcggaacagtaataacaataacacggcagccgccacggtcgcagccgcgggaccagcggcggcggcggccgcggggatgggggtccggccggtctcgggcgacctctcctacttacggactcctgggggcctgtgccgaatctcggcctctggcccagagagcctcctgggagggcccgggggcgcctccgccgcccccgcggctggcagcaaagtgctgctgggcttcagctcggacgagtcggacgtggaggccagtccccgggaccaggccggcggcggcgggaggaaagaccgggcttcgctccagtaccgcgggctcaaagcgccgccggcgcccctggccgccagcgaggtgactaacagcaactctgcagagcgaaggaagccccactcgtggtggggggccaggaggccggcgggccccgagctgcagaccccgccggggaaagatggagcagtggaggacgaggaaggggagggagaggacggtgaggagagggacccggagaccgaggagccgctctgggcgagccggaccgtgaatggcagccggcttgtcccctacagctgccgggaaaactattcggactcagaggaagaggacgacgacgacgtggcctccagcagacaggtattaaaggacgactccctttcccggcatcggcccagacgaacccatagtaagcctctccccccgctgactgctaaatcggccggcggcaggctggagacttcagttcagggagggggaggactcgcgatgaatgacagggcggcggctgccgggagtctagacaggagccgaaacctcgaagaggcggcggccgcggagcagggaggagggtgtgatcaagtggactccagccccgttcctagataccgtgttaacgctaagaaactgacccctctcctgcccccgccacttactgacatggactcaaccttggattcgtcaacaggctcccttctgaaaaccaataatcatattggcggtggggccttcagtgtggactcccccaggatttattctaacagtctccctcccagtgcggcggtggccgcctctagttcactcaggatcaatcacgccaatcatacgggctccaatcatacctacctgaaaaacacatacaacaaaccgaagctttccgaacccgaagaggaacttctccagcaatttaaacgggaggaggtgtccccaacagggagtttcagtgcccactacttgtcgatgtttctcttaactgctgcctgcttatttttcctaatactgggactgacttacctaggaatgagagggacaggagtatctgaggatggagaactcagcatagaaaacccctttggtgaaacatttggaaaaatacaagaaagtgaaaaaactcttatgatgaacacattatataagcttcatgatcgattggcacagcttgcaggagatcatgaatgtggcagttctagtcaaagaacgctttctgttcaagaggcagctgcgtatttaaaagatttaggtcctgaatatgaaggtatatttaacacttcattgcagtggatcttagaaaatggaaaagatgttggaataaggtgtgttggttttggccctgaggaagaattgacaaatataactgatgtgcagtttttacagtccacaagaccactgatgtctttttggtgtcgttttcgacgtgcttttgttactgtaactcacagattattgttgttatgcttaggtgtagtgatggtttgtgtcgttctgcgttacatgaaatatcgatggacaaaagaagaggaggaaacaaggcagatgtatgatatggtggtaaagattatagatgttttacgaagtcataatgaagcctgccaggaaaacaaagatttacaaccttacatgcctattccacatgtacgcgattccttaatacagcctcatgacaggaaaaaaatgaagaaagtctgggatagagctgttgacttccttgctgctaatgagtctagagttcgcacggaaacacgaagaataggtggtgcagattttctggtttggcggtggatccagccttctgcatcctgtgacaaaatattagttataccttctaaagtatggcaaggtcaagcatttcatttagatagaagaaattcaccaccaaatagtttgacaccgtgtctaaagattcggaatatgtttgatcccgttatggaaataggggatcagtggcatttggcaattcaagaagcaattttagaaaaatgcagtgataatgatggcattgttcacattgcagtagacaaaaattcacgtgagggttgtgtatatgttaaatgtctgtctccagaatatgctggaaaggcttttaaagcattgcatggctcttggtttgatgggaaattggttacagtaaaatatttacgactagatagataccaccatcgctttccccaggctctcacttccaacactccattgaagccatcaaataaacatatgaactccatgtctcatcttcgtcttcggactggcctaaccaattctcaaggaagttcctgaaaagattttcttccatttctaagactgttatttacaataggaaaattcctgtttggctttttgtcttcctttttaaatgctttttgtatgtaatatttttattgatgaatacatctctgaacgttccagaagtcttaaggttccaaagggatttagcagtgaggcagcaatgctgagtaggtaggataattatttcattcagtttttggagctcagttaagccaatacatttaaagttttgcatgaggaacactgactttattaagcattttcagatgtggtggttgtatttttgccccaagaagtgtttggataaccacacaaaagcatgatgaaaaggcttcttgtagtcccataatttcttgtgaactaatgttgtgaatttttgtatacagtcacctgcatagttcctacaggctaatgtggtaaaactgttgatttcccaatttaaccttaggtttctgttgcttataagcgattcatttgctacggctggaatatgggaaaattaatttgggcttagtggttacaaatatgtgtaagtggatgtatatgtacttaaactggctttgtatatatgtataaatgctggtggtggtgaaagtagtcttgttttatgaggatgtctgcattaaagcagtaaaataagctttccattttattcataatctaatgtgtgtgtatatatgtatgtgtgtatgtgtgtgtatatatagatgtatatatatacacacacagagatatatacatatggctgtacttttgcatagatcaaacagccaaacacctggaagtattagatacaagtttaaaatatcttttataggttttatataaaaatgtctgagtatgattttgtgtgaaagttctgataccagttgtaatagagtcaaatttatgtgagcaataaagaagaaattggcagatattggaaaaatattttgtgaaaag

SEQ ID NO: 341406 - DNA, 4744 bp, Homo sapiens
gagaaaatggcggcggcagcagcttcggcgcctcagcagctctcggatgaggagcttttctctcagctccgccgttacggcctgtctcccggaccagtgacggagagcacccgcccggtctacctcaagaagctgaagaagcttcgagaggaagagcagcaacagcaccggtcagggggccgcggcaacaagacgcggaacagtaataacaataacacggcagccgccacggtcgcagccgcgggaccagcggcggcggcggccgcggggatgggggtccggccggtctcgggcgacctctcctacttacggactcctgggggcctgtgccgaatctcggcctctggcccagagagcctcctgggagggcccgggggcgcctccgccgcccccgcggctggcagcaaagtgctgctgggcttcagctcggacgagtcggacgtggaggccagtccccgggaccaggccggcggcggcgggaggaaagaccgggcttcgctccagtaccgcgggctcaaagcgccgccggcgcccctggccgccagcgaggtgactaacagcaactctgcagagcgaaggaagccccactcgtggtggggggccaggaggccggcgggccccgagctgcagaccccgccggggaaagatggagcagtggaggacgaggaaggggagggagaggacggtgaggagagggacccggagaccgaggagccgctctgggcgagccggaccgtgaatggcagccggcttgtcccctacagctgccgggaaaactattcggactcagaggaagaggacgacgacgacgtggcctccagcagacaggtattaaaggacgactccctttcccggcatcggcccagacgaacccatagtaagcctctccccccgctgactgctaaatcggccggcggcaggctggagacttcagttcagggagggggaggactcgcgatgaatgacagggcggcggctgccgggagtctagacaggagccgaaacctcgaagaggcggcggccgcggagcagggaggagggtgtgatcaagtggactccagccccgttcctagataccgtgttaacgctaagaaactgacccctctcctgcccccgccacttactgacatggactcaaccttggattcgtcaacaggctcccttctgaaaaccaataatcatattggcggtggggccttcagtgtggactcccccaggatttattctaacagtctccctcccagtgcggcggtggccgcctctagttcactcaggatcaatcacgccaatcatacgggctccaatcatacctacctgaaaaacacatacaacaaaccgaagctttccgaacccgaagaggaacttctccagcaatttaaacgggaggaggtgtccccaacagggagtttcagtgcccactacttgtcgatgtttctcttaactgctgcctgcttatttttcctaatactgggactgacttacctaggaatgagagggacaggagtatctgaggatggagaactcagcatagaaaacccctttggtgaaacatttggaaaaatacaagaaagtgaaaaaactcttatgatgaacacattatataagcttcatgatcgattggcacagcttgcaggagatcatgaatgtggcagttctagtcaaagaacgctttctgttcaagaggcagctgcgtatttaaaagatttaggtcctgaatatgaaggtatatttaacacttcattgcagtggatcttagaaaatggaaaagatgttggaataaggtgtgttggttttggccctgaggaagaattgacaaatataactgatgtgcagtttttacagtccacaagaccactgatgtctttttggtgtcgttttcgacgtgcttttgttactgtaactcacagattattgttgttatgcttaggtgtagtgatggtttgtgtcgttctgcgttacatgaaatatcgatggacaaaagaagaggaggaaacaaggcagatgtatgatatggtggtaaagattatagatgttttacgaagtcataatgaagcctgccaggaaaacaaagatttacaaccttacatgcctattccacatgtacgcgattccttaatacagcctcatgacaggaaaaaaatgaagaaagtctgggatagagctgttgacttccttgctgctaatgagtctagagttcgcacggaaacacgaagaataggtggtgcagattttctggtttggcggtggatccagccttctgcatcctgtgacaaaatattagttataccttctaaagtatggcaaggtcaagcatttcatttagatagaagaaattcaccaccaaatagtttgacaccgtgtctaaagattcggaatatgtttgatcccgttatggaaataggggatcagtggcatttggcaattcaagaagcaattttagaaaaatgcagtgataatgatggcattgttcacattgcagtagacaaaaattcacgtgagggttgtgtatatgttaaatgtctgtctccagaatatgctggaaaggcttttaaagcattgcatggctcttggtttgatgggaaattggttacagtaaaatatttacgactagatagataccaccatcgctttccccaggctctcacttccaacactccattgaagccatcaaataaacatatgaactccatgtctcatcttcgtcttcggactggcctaaccaattctcaaggaagttcctgaaaagattttcttccatttctaagactgttatttacaataggaaaattcctgtttggctttttgtcttcctttttaaatgctttttgtatgtaatatttttattgatgaatacatctctgaacgttccagaagtcttaaggttccaaagggatttagcagtgaggcagcaatgctgagtaggtaggataattatttcattcagtttttggagctcagttaagccaatacatttaaagttttgcatgaggaacactgactttattaagcattttcagatgtggtggttgtatttttgccccaagaagtgtttggataaccacacaaaagcatgatgaaaaggcttcttgtagtcccataatttcttgtgaactaatgttgtgaatttttgtatacagtcacctgcatagttcctacaggctaatgtggtaaaactgttgatttcccaatttaaccttaggtttctgttgcttataagcgattcatttgctacggctggaatatgggaaaattaatttgggcttagtggttacaaatatgtgtaagtggatgtatatgtacttaaactggctttgtatatatgtataaatgctggtggtggtgaaagtagtcttgttttatgaggatgtctgcattaaagcagtaaaataagctttccattttattcataatctaatgtgtgtgtatatatgtatgtgtgtatgtgtgtgtatatatagatgtatatatatacacacacagagatatatacatatggctgtacttttgcatagatcaaacagccaaacacctggaagtattagatacaagtttaaaatatcttttataggttttatataaaaatgtctgagtatgattttgtgtgaaagttctgataccagttgtaatagagtcaaatttatgtgagcaataaagaagaaattggcagatattggaaaaatattttgtgaaaagctgtatttattataaatactagggccatgacatagtaccattggggttaagtcattttcccaatctatttataatttaatgatatgttagtgcctctgttatatgtcaagtttaaagcagggcacattgttgcagcaaaatgtgtatttgacaaattatacttgcaattttgggtcatgaaagtttgcaatatagtaaatgcacgattgactgttgctttgtgcctcagtatttaatttgtttcagtaaacttactttattactgtttatgatttcagataaaaatagttgctgagtaaattttacttgtaatctacaattggctttttaaaaataacctgttgatatataattgtcagtccaaatgaatatgtgaaacagctggaattgtacaaattttggttgtatttaaagctcagtttcctttttgttttattgtatgcgttgggtttgcagcatgaacttgcacagataatgcacgttttctggttaagtaaacatgatgcacactattctgtaacagaaagccctattgtgccttacctgtgtgcttttgtgggcaccttgtttatgaagaataaaaaatgatttgttatctgaagagaataaattttaaattctcagtttatgtctcagatgctaacgtgtgaaaatataaatatatataatatataaagtaaccagtcttcctgtattttatgtgcatcatagtgatttatctgagcttagtgacccccatcttgtaacctgttgcaagagtgaatgtaaaaaatagttgtggcattttaaaaggtcgcctttgatgcagatgcatctttttcttgcttctaaaacatatttcatgtaaacattgtacatttattattgtaatatatactattatgcagcttattttacctgaaactgttaagccgaccaagatccctccctgcaagacagatgggaatgtgtataataactaggtatttgagaagttctgaagtttgatgtaatctgttacttgtcctgttaaaaaaaggaaaaaattctaattaaaaatttattagttttt

SEQ ID NO: 341407 - DNA, 2708 bp, Homo sapiens
tgtatttttagtagagacggggtttcaccgtgttagtcaggatggtctcgatctcctgacctcatgatccgcctgcctcggcctctcaaagtgctgggattacaggcatgagccaccgcgcctggccagcgctctgcactcttttactggaaagtgggaggagggctgagacttctgaattgtaatttttaaatctacctcctgttagtcaacaagcatttacttaataccaattaaaatcgtatgtggttttaaaactataccaattctagtaatatatatatgttgtaagagacagtgaagaatttttaccgagtaggaatatggttgttgatttttgttttcattaacttttagggaaataggggatcagtggcatttggcaattcaagaagcaattttagaaaaatgcagtgataatgatggcattgttcacattgcagtagacaaaaattcacgtgagggttgtgtatatgttaaatgtctgtctccagaatatgctggaaaggcttttaaagcattgcatggctcttggtttgatgggaaattggttacagtaaaatatttacgactagatagataccaccatcgctttccccaggctctcacttccaacactccattgaagccatcaaataaacatatgaactccatgtctcatcttcgtcttcggactggcctaaccaattctcaaggaagttcctgaaaagattttcttccatttctaagactgttatttacaataggaaaattcctgtttggctttttgtcttcctttttaaatgctttttgtatgtaatatttttattgatgaatacatctctgaacgttccagaagtcttaaggttccaaagggatttagcagtgaggcagcaatgctgagtaggtaggataattatttcattcagtttttggagctcagttaagccaatacatttaaagttttgcatgaggaacactgactttattaagcattttcagatgtggtggttgtatttttgccccaagaagtgtttggataaccacacaaaagcatgatgaaaaggcttcttgtagtcccataatttcttgtgaactaatgttgtgaatttttgtatacagtcacctgcatagttcctacaggctaatgtggtaaaactgttgatttcccaatttaaccttaggtttctgttgcttataagcgattcatttgctacggctggaatatgggaaaattaatttgggcttagtggttacaaatatgtgtaagtggatgtatatgtacttaaactggctttgtatatatgtataaatgctggtggtggtgaaagtagtcttgttttatgaggatgtctgcattaaagcagtaaaataagctttccattttattcataatctaatgtgtgtgtatatatgtatgtgtgtatgtgtgtgtatatatagatgtatatatatacacacacagagatatatacatatggctgtacttttgcatagatcaaacagccaaacacctggaagtattagatacaagtttaaaatatcttttataggttttatataaaaatgtctgagtatgattttgtgtgaaagttctgataccagttgtaatagagtcaaatttatgtgagcaataaagaagaaattggcagatattggaaaaatattttgtgaaaagctgtatttattataaatactagggccatgacatagtaccattggggttaagtcattttcccaatctatttataatttaatgatatgttagtgcctctgttatatgtcaagtttaaagcagggcacattgttgcagcaaaatgtgtatttgacaaattatacttgcaattttgggtcatgaaagtttgcaatatagtaaatgcacgattgactgttgctttgtgcctcagtatttaatttgtttcagtaaacttactttattactgtttatgatttcagataaaaatagttgctgagtaaattttacttgtaatctacaattggctttttaaaaataacctgttgatatataattgtcagtccaaatgaatatgtgaaacagctggaattgtacaaattttggttgtatttaaagctcagtttcctttttgttttattgtatgcgttgggtttgcagcatgaacttgcacagataatgcacgttttctggttaagtaaacatgatgcacactattctgtaacagaaagccctattgtgccttacctgtgtgcttttgtgggcaccttgtttatgaagaataaaaaatgatttgttatctgaagagaataaattttaaattctcagtttatgtctcagatgctaacgtgtgaaaatataaatatatataatatataaagtaaccagtcttcctgtattttatgtgcatcatagtgatttatctgagcttagtgacccccatcttgtaacctgttgcaagagtgaatgtaaaaaatagttgtggcattttaaaaggtcgcctttgatgcagatgcatctttttcttgcttctaaaacatatttcatgtaaacattgtacatttattattgtaatatatactattatgcagcttattttacctgaaactgttaagccgaccaagatccctccctgcaagacagatgggaatgtgtataataactaggtatttgagaagttctgaagtttgatgtaatctgttacttgtcctgttaaaaaaaggaaaaaattctaattaaaaatttattagttttt

SEQ ID NO: 341408 - DNA, 4449 bp, Homo sapiens
gagaaaatggcggcggcagcagcttcggcgcctcagcagctctcggatgaggagcttttctctcagctccgccgttacggcctgtctcccggaccagtgacggagagcacccgcccggtctacctcaagaagctgaagaagcttcgagaggaagagcagcaacagcaccggtcagggggccgcggcaacaagacgcggaacagtaataacaataacacggcagccgccacggtcgcagccgcgggaccagcggcggcggcggccgcggggatgggggtccggccggtctcgggcgacctctcctacttacggactcctgggggcctgtgccgaatctcggcctctggcccagagagcctcctgggagggcccgggggcgcctccgccgcccccgcggctggcagcaaagtgctgctgggcttcagctcggacgagtcggacgtggaggccagtccccgggaccaggccggcggcggcgggaggaaagaccgggcttcgctccagtaccgcgggctcaaagcgccgccggcgcccctggccgccagcgaggtgactaacagcaactctgcagagcgaaggaagccccactcgtggtggggggccaggaggccggcgggccccgagctgcagaccccgccggggaaagatggagcagtggaggacgaggaaggggagggagaggacggtgaggagagggacccggagaccgaggagccgctctgggcgagccggaccgtgaatggcagccggcttgtcccctacagctgccgggaaaactattcggactcagaggaagaggacgacgacgacgtggcctccagcagacaggtattaaaggacgactccctttcccggcatcggcccagacgaacccatagtaagcctctccccccgctgactgctaaatcggccggcggcaggctggagacttcagttcagggagggggaggactcgcgatgaatgacagggcggcggctgccgggagtctagacaggagccgaaacctcgaagaggcggcggccgcggagcagggaggagggtgtgatcaagtggactccagccccgttcctagataccgtgttaacgctaagaaactgacccctctcctgcccccgccacttactgacatggactcaaccttggattcgtcaacaggctcccttctgaaaaccaataatcatattggcggtggggccttcagtgtggactcccccaggatttattctaacagtctccctcccagtgcggcggtggccgcctctagttcactcaggatcaatcacgccaatcatacgggctccaatcatacctacctgaaaaacacatacaacaaaccgaagctttccgaacccgaagaggaacttctccagcaatttaaacgggaggaggtgtccccaacagggagtttcagtgcccactacttgtcgatgtttctcttaactgctgcctgcttatttttcctaatactgggactgacttacctaggaatgagagggacaggagtatctgaggatggagaactcagcatagaaaacccctttggtgaaacatttggaaaaatacaagaaagtgaaaaaactcttatgatgaacacattatataagcttcatgatcgattggcacagcttgcaggagatcatgaatgtggcagttctagtcaaagaacgctttctgttcaagaggcagctgcgtatttaaaagatttaggtcctgaatatgaaggtatatttaacacttcattgcagtggatcttagaaaatggaaaagatgttggaataaggtgtgttggttttggccctgaggaagaattgacaaatataactgatgtgcagtttttacagtccacaagaccactgatgtctttttggtgtcgttttcgacgtgcttttgttactgtaactcacagattattgttgttatgcttaggtgtagtgatggtttgtgtcgttctgcgttacatgaaatatcgatggacaaaagaagaggaggaaacaaggcagatgtatgatatggtggtaaagattatagatgttttacgaagtcataatgaagcctgccaggaaaacaaagatttacaaccttacatgcctattccacatgtacgcgattccttaatacagcctcatgacaggaaaaaaatgaagaaagtctgggatagagctgttgacttccttgctgctaatgagtctagagttcgcacggaaacacgaagaataggtggtgcagattttctggtttggcggtggatccagccttctgcatcctgtgacaaaatattagttataccttctaaagtatggcaaggtcaagcatttcatttagatagaagaaattcaccaccaaatagtttgacaccgtgtctaaagattcggaatatgtttgatcccgttatggaaataggggatcagtggcatttggcaattcaagaagcaattttagaaaaatgcagtgataatgatggcattgttcacattgcagtagacaaaaattcacgtgagggttgtgtatatgttaaatgtctgtctccagaatatgctggaaaggcttttaaagcattgcatggctcttggtttgatgggaaattggttacagtaaaatatttacgactagatagataccaccatcgctttccccaggctctcacttccaacactccattgaagccatcaaataaacatatgaactccatgtctcatcttcgtcttcggactggcctaaccaattctcaaggaagttcctgaaaagattttcttccatttctaagactgttatttacaataggaaaattcctgtttggctttttgtcttcctttttaaatgctttttgtatgtaatatttttattgatgaatacatctctgaacgttccagaagtcttaaggttccaaagggatttagcagtgaggcagcaatgctgagtaggtaggataattatttcattcagtttttggagctcagttaagccaatacatttaaagttttgcatgaggaacactgactttattaagcattttcagatgtggtggttgtatttttgccccaagaagtgtttggataaccacacaaaagcatgatgaaaaggcttcttgtagtcccataatttcttgtgaactaatgttgtgaatttttgtatacagtcacctgcatagttcctacaggctaatgtggtaaaactgttgatttcccaatttaaccttaggtttctgttgcttataagcgattcatttgctacggctggaatatgggaaaattaatttgggcttagtggttacaaatatgtgtaagtggatgtatatgtacttaaactggctttgtatatatgtataaatgctggtggtggtgaaagtagtcttgttttatgaggatgtctgcattaaagcagtaaaataagctttccattttattcataatctaatgtgtgtgtatatatgtatgtgtgtatgtgtgtgtatatatagatgtatatatatacacacacagagatatatacatatggctgtacttttgcatagatcaaacagccaaacacctggaagtattagatacaagtttaaaatatcttttataggttttatataaaaatgtctgagtatgattttgtgtgaaagttctgataccagttgtaatagagtcaaatttatgtgagcaataaagaagaaattggcagatattggaaaaatattttgtgaaaagctgtatttattataaatactagggccatgacatagtaccattggggttaagtcattttcccaatctatttataatttaatgatatgttagtgcctctgttatatgtcaagtttaaagcagggcacattgttgcagcaaaatgtgtatttgacaaattatacttgcaattttgggtcatgaaagtttgcaatatagtaaatgcacgattgactgttgctttgtgcctcagtatttaatttgtttcagtaaacttactttattactgtttatgatttcagataaaaatagttgctgagtaaattttacttgtaatctacaattggctttttaaaaataacctgttgatatataattgtcagtccaaatgaatatgtgaaacagctggaattgtacaaattttggttgtatttaaagctcagtttcctttttgttttattgtatgcgttgggtttgcagcatgaacttgcacagataatgcacgttttctggttaagtaaacatgatgcacactattctgtaacagaaagccctattgtgccttacctgtgtgcttttgtgggcaccttgtttatgaagaataaaaaatgatttgttatctgaagagaataaattttaaattctcagtttatgtctcagatgctaacgtgtgaaaatataaatatatataatatataaagttaattatactacataaaatctctagggggtgcccggtacctcaatttgccttatttgaagttacattacaaattaatt

SEQ ID NO: 341409 - DNA, 500 bp, Homo sapiens
ttttttttgattaagaattatttggtgtttttttttcttgtaattgggtatttcataataacttctcttaattttaggaaagtgaaaaaactcttatgatgaacacattatataagcttcatgatcgattggcacagcttgcaggtaattgttttaacttttatagttgctaaaaatgttttgaaaaatgtatgtagcatgttattagtagaaaatatttttccaagtccagtgttatatttgtgaaatatttttctttagaagttttcattacctatacagagtgatttttgatttttacatatgtatttaatgaaggcttttttcctgcctgccatctgtattagaggtaatatatatatataatatagttataaagttgatcaaatttctttattgcatcagtggtaacaaaaaatctggaaagcttaagtatcagaggaattaggtaagcagtgaattaactaaaatcttggattaaatatacaaatgcagatttt

SEQ ID NO: 341410 - DNA, 437 bp, Homo sapiens
ctggctcctagtaaaagcatgcagtgaatattttttgaatgaactgaatgattgaatacctttcaacaaactagaacaatgtcaaatagtaaaactaacttgttttttgtagcatttcatttagatagaagaaattcaccaccaaatagtttgacaccgtgtctaaagattcggaatatgtttgatcccgttatgtaagtattatgatcaggggtacatgtaactcttattctgaatatttggctggaaaatgcatgatattcttataatggtgtgtctgtaattgaaaatgtttttcttctgaatctctaccacagaaatgttatgtttttctctttcattaaattccaagcaaagatttggccaaaggacactaatgtataaagatttgtaaaacttttataaatctttgtattccttatgaatcgtcatagcag

SEQ ID NO: 341411 - DNA, 5117 bp, Homo sapiens
gagaaaatggcggcggcagcagcttcggcgcctcagcagctctcggatgaggagcttttctctcagctccgccgttacggcctgtctcccggaccagtgacggagagcacccgcccggtctacctcaagaagctgaagaagcttcgagaggaagagcagcaacagcaccggtcagggggccgcggcaacaagacgcggaacagtaataacaataacacggcagccgccacggtcgcagccgcgggaccagcggcggcggcggccgcggggatgggggtccggccggtctcgggcgacctctcctacttacggactcctgggggcctgtgccgaatctcggcctctggcccagagagcctcctgggagggcccgggggcgcctccgccgcccccgcggctggcagcaaagtgctgctgggcttcagctcggacgagtcggacgtggaggccagtccccgggaccaggccggcggcggcgggaggaaagaccgggcttcgctccagtaccgcgggctcaaagcgccgccggcgcccctggccgccagcgaggtgactaacagcaactctgcagagcgaaggaagccccactcgtggtggggggccaggaggccggcgggccccgagctgcagaccccgccggggaaagatggagcagtggaggacgaggaaggggagggagaggacggtgaggagagggacccggagaccgaggagccgctctgggcgagccggaccgtgaatggcagccggcttgtcccctacagctgccgggaaaactattcggactcagaggaagaggacgacgacgacgtggcctccagcagacaggtattaaaggacgactccctttcccggcatcggcccagacgaacccatagtaagcctctccccccgctgactgctaaatcggccggcggcaggctggagacttcagttcagggagggggaggactcgcgatgaatgacagggcggcggctgccgggagtctagacaggagccgaaacctcgaagaggcggcggccgcggagcagggaggagggtgtgatcaagtggactccagccccgttcctagataccgtgttaacgctaagaaactgacccctctcctgcccccgccacttactgacatggactcaaccttggattcgtcaacaggctcccttctgaaaaccaataatcatattggcggtggggccttcagtgtggactcccccaggatttattctaacagtctccctcccagtgcggcggtggccgcctctagttcactcaggatcaatcacgccaatcatacgggctccaatcatacctacctgaaaaacacatacaacaaaccgaagctttccgaacccgaagaggaacttctccagcaatttaaacgggaggaggtgtccccaacagggagtttcagtgcccactacttgtcgatgtttctcttaactgctgcctgcttatttttcctaatactgggactgacttacctaggaatgagagggacaggagtatctgaggatggagaactcagcatagaaaacccctttggtgaaacatttggaaaaatacaagaaagtgaaaaaactcttatgatgaacacattatataagcttcatgatcgattggcacagcttgcaggagatcatgaatgtggcagttctagtcaaagaacgctttctgttcaagaggcagctgcgtatttaaaagatttaggtcctgaatatgaaggtatatttaacacttcattgcagtggatcttagaaaatggaaaagatgttggaataaggtgtgttggttttggccctgaggaagaattgacaaatataactgatgtgcagtttttacagtccacaagaccactgatgtctttttggtgtcgttttcgacgtgcttttgttactgtaactcacagattattgttgttatgcttaggtgtagtgatggtttgtgtcgttctgcgttacatgaaatatcgatggacaaaagaagaggaggaaacaaggcagatgtatgatatggtggtaaagattatagatgttttacgaagtcataatgaagcctgccaggaaaacaaagatttacaaccttacatgcctattccacatgtacgcgattccttaatacagcctcatgacaggaaaaaaatgaagaaagtctgggatagagctgttgacttccttgctgctaatgagtctagagttcgcacggaaacacgaagaataggtggtgcagattttctggtttggcggtggatccagccttctgcatcctgtgacaaaatattagttataccttctaaagtatggcaaggtcaagcatttcatttagatagaagaaattcaccaccaaatagtttgacaccgtgtctaaagattcggaatatgtttgatcccgttatggaaataggggatcagtggcatttggcaattcaagaagcaattttagaaaaatgcagtgataatgatggcattgttcacattgcagtagacaaaaattcacgtgagggttgtgtatatgttaaatgtctgtctccagaatatgctggaaaggcttttaaagcattgcatggctcttggtttgatgggaaattggttacagtaaaatatttacgactagatagataccaccatcgctttccccaggctctcacttccaacactccattgaagccatcaaataaacatatgaactccatgtctcatcttcgtcttcggactggcctaaccaattctcaaggaagttcctgaaaagattttcttccatttctaagactgttatttacaataggaaaattcctgtttggctttttgtcttcctttttaaatgctttttgtatgtaatatttttattgatgaatacatctctgaacgttccagaagtcttaaggttccaaagggatttagcagtgaggcagcaatgctgagtaggtaggataattatttcattcagtttttggagctcagttaagccaatacatttaaagttttgcatgaggaacactgactttattaagcattttcagatgtggtggttgtatttttgccccaagaagtgtttggataaccacacaaaagcatgatgaaaaggcttcttgtagtcccataatttcttgtgaactaatgttgtgaatttttgtatacagtcacctgcatagttcctacaggctaatgtggtaaaactgttgatttcccaatttaaccttaggtttctgttgcttataagcgattcatttgctacggctggaatatgggaaaattaatttgggcttagtggttacaaatatgtgtaagtggatgtatatgtacttaaactggctttgtatatatgtataaatgctggtggtggtgaaagtagtcttgttttatgaggatgtctgcattaaagcagtaaaataagctttccattttattcataatctaatgtgtgtgtatatatgtatgtgtgtatgtgtgtgtatatatagatgtatatatatacacacacagagatatatacatatggctgtacttttgcatagatcaaacagccaaacacctggaagtattagatacaagtttaaaatatcttttataggttttatataaaaatgtctgagtatgattttgtgtgaaagttctgataccagttgtaatagagtcaaatttatgtgagcaataaagaagaaattggcagatattggaaaaatattttgtgaaaagctgtatttattataaatactagggccatgacatagtaccattggggttaagtcattttcccaatctatttataatttaatgatatgttagtgcctctgttatatgtcaagtttaaagcagggcacattgttgcagcaaaatgtgtatttgacaaattatacttgcaattttgggtcatgaaagtttgcaatatagtaaatgcacgattgactgttgctttgtgcctcagtatttaatttgtttcagtaaacttactttattactgtttatgatttcagataaaaatagttgctgagtaaattttacttgtaatctacaattggctttttaaaaataacctgttgatatataattgtcagtccaaatgaatatgtgaaacagctggaattgtacaaattttggttgtatttaaagctcagtttcctttttgttttattgtatgcgttgggtttgcagcatgaacttgcacagataatgcacgttttctggttaagtaaacatgatgcacactattctgtaacagaaagccctattgtgccttacctgtgtgcttttgtgggcaccttgtttatgaagaataaaaaatgatttgttatctgaagagaataaattttaaattctcagtttatgtctcagatgctaacgtgtgaaaatataaatatatataatatataaagtaaccagtcttcctgtattttatgtgcatcatagtgatttatctgagcttagtgacccccatcttgtaacctgttgcaagagtgaatgtaaaaaatagttgtggcattttaaaaggtcgcctttgatgcagatgcatctttttcttgcttctaaaacatatttcatgtaaacattgtacatttattattgtaatatatactattatgcagcttattttacctgaaactgttaagccgaccaagatccctccctgcaagacagatgggaatgtgtataataactaggtatttgagaagttctgaagtttgatgtaatctgttacttgtcctgttaaaaaaaggaaaaaattctaattaaaaatttattagtttttaaaaaaaaaaaaatatcaggtgtcctaaccccaacttaccttcatgggacgctatttaattcgcattggccttatgaatccaagcgtcggaattggataaacctttcatatccttaacttataccgtttcaattatcttctatatttgctcactttcttaattttcgtatagctccataagatactgccctttaaacaaattgccacaatcgccaagtgttacagtgatatggcgagcattaaaattctcgtcaaaactctatataacgtctctctaattctacttatttattcctattgtgacccaatcagcctaactcttttattccactgctttattcgagatatggttctgtcttcttactctattccc

SEQ ID NO: 341412 - DNA, 4470 bp, Homo sapiens
gagaaaatggcggcggcagcagcttcggcgcctcagcagctctcggatgaggagcttttctctcagctccgccgttacggcctgtctcccggaccagtgacggagagcacccgcccggtctacctcaagaagctgaagaagcttcgagaggaagagcagcaacagcaccggtcagggggccgcggcaacaagacgcggaacagtaataacaataacacggcagccgccacggtcgcagccgcgggaccagcggcggcggcggccgcggggatgggggtccggccggtctcgggcgacctctcctacttacggactcctgggggcctgtgccgaatctcggcctctggcccagagagcctcctgggagggcccgggggcgcctccgccgcccccgcggctggcagcaaagtgctgctgggcttcagctcggacgagtcggacgtggaggccagtccccgggaccaggccggcggcggcgggaggaaagaccgggcttcgctccagtaccgcgggctcaaagcgccgccggcgcccctggccgccagcgaggtgactaacagcaactctgcagagcgaaggaagccccactcgtggtggggggccaggaggccggcgggccccgagctgcagaccccgccggggaaagatggagcagtggaggacgaggaaggggagggagaggacggtgaggagagggacccggagaccgaggagccgctctgggcgagccggaccgtgaatggcagccggcttgtcccctacagctgccgggaaaactattcggactcagaggaagaggacgacgacgacgtggcctccagcagacaggtattaaaggacgactccctttcccggcatcggcccagacgaacccatagtaagcctctccccccgctgactgctaaatcggccggcggcaggctggagacttcagttcagggagggggaggactcgcgatgaatgacagggcggcggctgccgggagtctagacaggagccgaaacctcgaagaggcggcggccgcggagcagggaggagggtgtgatcaagtggactccagccccgttcctagataccgtgttaacgctaagaaactgacccctctcctgcccccgccacttactgacatggactcaaccttggattcgtcaacaggctcccttctgaaaaccaataatcatattggcggtggggccttcagtgtggactcccccaggatttattctaacagtctccctcccagtgcggcggtggccgcctctagttcactcaggatcaatcacgccaatcatacgggctccaatcatacctacctgaaaaacacatacaacaaaccgaagctttccgaacccgaagaggaacttctccagcaatttaaacgggaggaggtgtccccaacagggagtttcagtgcccactacttgtcgatgtttctcttaactgctgcctgcttatttttcctaatactgggactgacttacctaggaatgagagggacaggagtatctgaggatggagaactcagcatagaaaacccctttggtgaaacatttggaaaaatacaagaaagtgaaaaaactcttatgatgaacacattatataagcttcatgatcgattggcacagcttgcaggagatcatgaatgtggcagttctagtcaaagaacgctttctgttcaagaggcagctgcgtatttaaaagatttaggtcctgaatatgaaggtatatttaacacttcattgcagtggatcttagaaaatggaaaagatgttggaataaggtgtgttggttttggccctgaggaagaattgacaaatataactgatgtgcagtttttacagtccacaagaccactgatgtctttttggtgtcgttttcgacgtgcttttgttactgtaactcacagattattgttgttatgcttaggtgtagtgatggtttgtgtcgttctgcgttacatgaaatatcgatggacaaaagaagaggaggaaacaaggcagatgtatgatatggtggtaaagattatagatgttttacgaagtcataatgaagcctgccaggaaaacaaagatttacaaccttacatgcctattccacatgtacgcgattccttaatacagcctcatgacaggaaaaaaatgaagaaagtctgggatagagctgttgacttccttgctgctaatgagtctagagttcgcacggaaacacgaagaataggtggtgcagattttctggtttggcggtggatccagccttctgcatcctgtgacaaaatattagttataccttctaaagtatggcaaggtcaagcatttcatttagatagaagaaattcaccaccaaatagtttgacaccgtgtctaaagattcggaatatgtttgatcccgttatggaaataggggatcagtggcatttggcaattcaagaagcaattttagaaaaatgcagtgataatgatggcattgttcacattgcagtagacaaaaattcacgtgagggttgtgtatatgttaaatgtctgtctccagaatatgctggaaaggcttttaaagcattgcatggctcttggtttgatgggaaattggttacagtaaaatatttacgactagatagataccaccatcgctttccccaggctctcacttccaacactccattgaagccatcaaataaacatatgaactccatgtctcatcttcgtcttcggactggcctaaccaattctcaaggaagttcctgaaaagattttcttccatttctaagactgttatttacaataggaaaattcctgtttggctttttgtcttcctttttaaatgctttttgtatgtaatatttttattgatgaatacatctctgaacgttccagaagtcttaaggttccaaagggatttagcagtgaggcagcaatgctgagtaggtaggataattatttcattcagtttttggagctcagttaagccaatacatttaaagttttgcatgaggaacactgactttattaagcattttcagatgtggtggttgtatttttgccccaagaagtgtttggataaccacacaaaagcatgatgaaaaggcttcttgtagtcccataatttcttgtgaactaatgttgtgaatttttgtatacagtcacctgcatagttcctacaggctaatgtggtaaaactgttgatttcccaatttaaccttaggtttctgttgcttataagcgattcatttgctacggctggaatatgggaaaattaatttgggcttagtggttacaaatatgtgtaagtggatgtatatgtacttaaactggctttgtatatatgtataaatgctggtggtggtgaaagtagtcttgttttatgaggatgtctgcattaaagcagtaaaataagctttccattttattcataatctaatgtgtgtgtatatatgtatgtgtgtatgtgtgtgtatatatagatgtatatatatacacacacagagatatatacatatggctgtacttttgcatagatcaaacagccaaacacctggaagtattagatacaagtttaaaatatcttttataggttttatataaaaatgtctgagtatgattttgtgtgaaagttctgataccagttgtaatagagtcaaatttatgtgagcaataaagaagaaattggcagatattggaaaaatattttgtgaaaagctgtatttattataaatactagggccatgacatagtaccattggggttaagtcattttcccaatctatttataatttaatgatatgttagtgcctctgttatatgtcaagtttaaagcagggcacattgttgcagcaaaatgtgtatttgacaaattatacttgcaattttgggtcatgaaagtttgcaatatagtaaatgcacgattgactgttgctttgtgcctcagtatttaatttgtttcagtaaacttactttattactgtttatgatttcagataaaaatagttgctgagtaaattttacttgtaatctacaattggctttttaaaaataacctgttgatatataattgtcagtccaaatgaatatgtgaaacagctggaattgtacaaattttggttgtatttaaagctcagtttcctttttgttttatttgatttatctgagcttagtgacccccatcttgtaacctgttgcaagagtgaatgtaaaaaatagttgtggcattttaaaaggtcgcctttgatgcagatgcatctttttcttgcttctaaaacatatttcatgtaaacattgtacatttattattgtaatatatactattatgcagcttattttacctgaaactgttaagccgaccaagatccctccctgcaagacagatgggaatgtgtataataactaggtatttgagaagttctgaagtttgatgtaatctgttacttgtcctgttaaaaaaaggaaaaaattctaattaaaaatttattagttttt

SEQ ID NO: 341413 - DNA, 374 bp, Homo sapiens
catgctatgttcccctcaaaatgttctattcacttttcttgacttgttctcctacctgtacttcccactgtctcaactctctttctaatctctatgtggtcagataccaccacttccaataccagcataaaaatgatttcccccacgaagctttccctcattcttttaaggaagaagtaatttctccctttttgaaccactgtgacactttataaaacattacatcttcattagtagtatattcattcctgaacagaccatataccatacaaactatatcctctctattgagatagaaggccttgtccatagtaccaaccataggattttgcttatgataggtgtttaagaaatgttcataggctgggcatggt

SEQ ID NO: 341414 - DNA, 277 bp, Homo sapiens
tgccctgtgagagcttccttaaaattaattattttgaactctttgtcacgcagttcatatatctctattttttttgtttgtttgtttcagctaatgagaaattgtattattgtggtgatgttatgtctccctggcttttcctatttcttactgccatatgtttatttctacacatctgaagtaagggcttattccagtccttgcagactggctttatcaggtaaaacccttcagcagtcagcctatccagggattctgagcatgccatctgccaagg

SEQ ID NO: 341415 - DNA, 2156 bp, Homo sapiens
ggcaatttccgttaggtgctgaaggctgtggcgcgcggctgtccccattcccacgtgaagcgctacgctagcatcgctcggctggcggctcccagctcgccgcggagcagtcccggcagcagcgggggaccggaagtggctcgcggaggctcagaagctagtcccggagcccggcgtgtggcgcctcggagcacggtgacggcgccatgtccctaatctgctccatctctaacgaagtgccggagcacccatgtgtatcccctgtctctaatcatgtttatgagcggcggctcatcgagaagtacattgcggagaatggtaccgaccccatcaacaaccagcctctctccgaggagcagctcatcgacatcaaagttgctcacccaatccggcccaagcctccctcagccaccagcatcccggccattctgaaagctttgcaggatgagtgggatgcagtcatgctgcacagcttcactctgcgccagcagctgcagacaacccgccaagagctgtcacacgctctgtaccagcacgatgccgcctgccgtgtcattgcccgtctcaccaaggaagtcactgctgcccgagaagctctggctaccctgaaaccacaggctggcctcattgtgccccaggctgtgccaagttcccaaccaagtgttgtgggtgcgggtgagccaatggatttgggtgagctggtgggaatgaccccagagattattcagaagcttcaagacaaagccactgtgctaaccacggagcgcaagaagagagggaagactgtgcctgaggagctggtgaagccagaagagctcagcaaataccggcaggtggcatcccacgtggggttgcacagtgccagcattcctgggatcctggccctggacctctgcccgtccgacaccaacaagatcctcactggtggggcggataaaaatgtcgttgtgtttgacaaaagttctgaacaaatcctggctaccctcaaaggccataccaagaaggtcaccagcgtggtgtttcacccttcccaggacctggtgttttctgcttcccccgatgccactatcaggatttggtcggtccccaatgcctcttgtgtacaggtggttcgggcccatgagagtgctgtgacaggcctcagccttcatgccactggcgactatctcctgagctcctccgatgatcagtactgggctttctctgacatccagacagggcgtgtgctcaccaaggtgacagatgagacctccggctgctctctcacctgtgcacagttccaccctgacggactcatctttggaacaggaaccatggactctcagatcaagatctgggacttgaaggaacgtactaatgtggccaacttccctggccactcgggccccatcactagcatcgccttctctgagaatggttactacctggctacagcggctgatgactcctctgtcaagctctgggatctgcgcaagcttaagaactttaagactttgcagctggataacaactttgaggtaaagtcactgatctttgaccagagtggtacctacctggctcttgggggcacggatgtccagatctacatctgcaaacaatggacggagattcttcactttacagagcatagcggcctgaccacaggggtggccttcgggcatcacgccaagttcatcgcttcaacaggcatggacagaagcctcaagttctacagcctgtaggccctggcccttctgatggaagctgggcctcatctcagtagaggggtagaattagggtttggggggggggtggggggaatctatggggggagggggctctgtggggtgggacattcacatcatttcactctggtctgagtggtggcctgagaaccatggtggcatggaccaccctcatccatgcaactccaggccccatgggaacggatgtggaaggaagaactgtcaccctcttaaggcccagggtcggagcccagggcctctcccttcctgtcgttcaatggacgtggtggtggctgttccacacccattttgttgcagttcctgtgagacaggagaggctgagccaagggaactgtgaaggggatgggcaggagggcttgtgcagggttttgtaagcagtgatctagtttcattaaaaaaagaaaacaataa

SEQ ID NO: 341416 - DNA, 820 bp, Homo sapiens
ggcaatttccgttaggtgctgaaggctgtggcgcgcggctgtccccattcccacgtgaagcgctacgctagcatcgctcggctggcggctcccagctcgccgcggagcagtcccggcagcagcgggggaccggaagtggctcgcggaggctcagaagctagtcccggagcccggcgtgtggcgcctcggagcacggtgacggcgccatgtccctaatctgctccatctctaacgaagtgccggagcacccatgtgtatcccctgtctctaatcatgtttatgagcggcggctcatcgagaagtacattgcggagaatggtaccgaccccatcaacaaccagcctctctccgaggagcagctcatcgacatcaaagttgctcacccaatccggcccaagcctccctcagccaccagcatcccggccattctgaaagctttgcaggatgagtgggatgcagtcatgctgcaacagctttcactcctggcgcaagcagcttgcagaacaaacccgcgcaagtttcccaaaacaagtgtagtgggtgcgggctgagcccattggattagggtgagctggtgggaatgacccccagagatttattcagaaagcttcccagacaaaaggccactggggctaaccacggagcggcaagacgcaggagggaaagactagtgccttgagggaagctggtgaacgcccagaagtagctcagcaaataccggtagtgtggcatcccacggtggggattcgacaggtgcaagcatccctgggattctgggcctggacatctgccgatcgactccaacacgatctccatggta

SEQ ID NO: 341417 - DNA, 2356 bp, Homo sapiens
ggcaatttccgttaggtgctgaaggctgtggcgcgcggctgtccccattcccacgtgaagcgctacgctagcatcgctcggctggcggctcccagctcgccgcggagcagtcccggcagcagcgggggaccggaagtggctcgcggaggctcagaagctagtcccggagcccggcgtgtggcgcctcggagcacggtgacggcgccatgtccctaatctgctccatctctaacgaagtgccggagcacccatgtgtatcccctgtctctaatcatgtttatgagcggcggctcatcgagaagtacattgcggagaatggtaccgaccccatcaacaaccagcctctctccgaggagcagctcatcgacatcaaagttgctcacccaatccggcccaagcctccctcagccaccagcatcccggccattctgaaagctttgcaggatgagtgggatgcagtcatgctgcacagcttcactctgcgccagcagctgcagacaacccgccaagagctgtcacacgctctgtaccagcacgatgccgcctgccgtgtcattgcccgtctcaccaaggaagtcactgctgcccgagaagctctggctaccctgaaaccacaggctggcctcattgtgccccaggctgtgccaagttcccaaccaagtgttgtgggtgcgggtgagccaatggatttgggtgagctggtgggaatgaccccagagattattcagaagcttcaagacaaagccactgtgctaaccacggagcgcaagaagagagggaagactgtgcctgaggagctggtgaagccagaagagctcagcaaataccggcaggtggcatcccacgtggggttgcacagtgccagcattcctgggatcctggccctggacctctgcccgtccgacaccaacaagatcctcactggtggggcggataaaaatgtcgttgtgtttgacaaaagttctgaacaaatcctggctaccctcaaaggccataccaagaaggtcaccagcgtggtgtttcacccttcccaggacctggtgttttctgcttcccccgatgccactatcaggatttggtcggtccccaatgcctcttgtgtacaggtggttcgggcccatgagagtgctgtgacaggcctcagccttcatgccactggcgactatctcctgagctcctccgatgatcagtactgggctttctctgacatccagacagggcgtgtgctcaccaaggtgacagatgagacctccggctgctctctcacctgtgcacagttccaccctgacggactcatctttggaacaggaaccatggactctcagatcaagatctgggacttgaaggaacgtactaatgtggccaacttccctggccactcgggccccatcactagcatcgccttctctgagaatggttactacctggctacagcggctgatgactcctctgtcaagctctgggatctgcgcaagcttaagaactttaagactttgcagctggataacaactttgaggtaaagtcactgatctttgaccagagtggtacctacctggctcttgggggcacggatgtccagatctacatctgcaaacaatggacggagattcttcactttacagagcatagcggcctgaccacaggggtggccttcgggcatcacgccaagttcatcgcttcaacaggcatggacagaagcctcaagttctacagcctgtaggccctggcccttctgatggaagctgggcctcatctcagtagaggggtagaattagggtttggggggggggtggggggaatctatggggggagggggctctgtggggtgggacattcacatcatttcactctggtctgagtggtggcctgagaaccatggtggcatggaccaccctcatccatgcaactccaggccccatgggaacggatgtggaaggaagaactgtcaccctcttaaggcccagggtcggagcccagggcctctcccttcctgtcgttcaatggacgtggtggtggctgttccacacccattttgttgcagttcctgtgagacaggagaggctgagccaagggaactgtgaaggggatgggcaggagggcttgtgcagggttttgtaagcagtgatctagtttcattaaaaaaagaaaacaataaagaaaacaataaccataaccacctccccgtgtctgtttgcaccaggagcacctgggactgggaaggtcaaggggagggagcacacactgggacactggcttccgggaagcccatcttcctttcctttcacagctcttacccttttttttttttttttaattgcacagcagaaataaaaacaaatctgcagatgaaaaaag

SEQ ID NO: 341418 - DNA, 2504 bp, Homo sapiens
ggcaatttccgttaggtgctgaaggctgtggcgcgcggctgtccccattcccacgtgaagcgctacgctagcatcgctcggctggcggctcccagctcgccgcggagcagtcccggcagcagcgggggaccggaagtggctcgcggaggctcagaagctagtcccggagcccggcgtgtggcgcctcggagcacggtgacggcgccatgtccctaatctgctccatctctaacgaagtgccggagcacccatgtgtatcccctgtctctaatcatgtttatgagcggcggctcatcgagaagtacattgcggagaatggtaccgaccccatcaacaaccagcctctctccgaggagcagctcatcgacatcaaagttgctcacccaatccggcccaagcctccctcagccaccagcatcccggccattctgaaagctttgcaggatgagtgggatgcagtcatgctgcacagcttcactctgcgccagcagctgcagacaacccgccaagagctgtcacacgctctgtaccagcacgatgccgcctgccgtgtcattgcccgtctcaccaaggaagtcactgctgcccgagaagctctggctaccctgaaaccacaggctggcctcattgtgccccaggctgtgccaagttcccaaccaagtgttgtgggtgcgggtgagccaatggatttgggtgagctggtgggaatgaccccagagattattcagaagcttcaagacaaagccactgtgctaaccacggagcgcaagaagagagggaagactgtgcctgaggagctggtgaagccagaagagctcagcaaataccggcaggtggcatcccacgtggggttgcacagtgccagcattcctgggatcctggccctggacctctgcccgtccgacaccaacaagatcctcactggtggggcggataaaaatgtcgttgtgtttgacaaaagttctgaacaaatcctggctaccctcaaaggccataccaagaaggtcaccagcgtggtgtttcacccttcccaggacctggtgttttctgcttcccccgatgccactatcaggatttggtcggtccccaatgcctcttgtgtacaggtggttcgggcccatgagagtgctgtgacaggcctcagccttcatgccactggcgactatctcctgagctcctccgatgatcagtactgggctttctctgacatccagacagggcgtgtgctcaccaaggtgacagatgagacctccggctgctctctcacctgtgcacagttccaccctgacggactcatctttggaacaggaaccatggactctcagatcaagatctgggacttgaaggaacgtactaatgtggccaacttccctggccactcgggccccatcactagcatcgccttctctgagaatggttactacctggctacagcggctgatgactcctctgtcaagctctgggatctgcgcaagcttaagaactttaagactttgcagctggataacaactttgaggtaaagtcactgatctttgaccagagtggtacctacctggctcttgggggcacggatgtccagatctacatctgcaaacaatggacggagattcttcactttacagagcatagcggcctgaccacaggggtggccttcgggcatcacgccaagttcatcgcttcaacaggcatggacagaagcctcaagttctacagcctgtaggccctggcccttctgatggaagctgggcctcatctcagtagaggggtagaattagggtttggggggggggtggggggaatctatggggggagggggctctgtggggtgggacattcacatcatttcactctggtctgagtggtggcctgagaaccatggtggcatggaccaccctcatccatgcaactccaggccccatgggaacggatgtggaaggaagaactgtcaccctcttaaggcccagggtcggagcccagggcctctcccttcctgtcgttcaatggacgtggtggtggctgttccacacccattttgttgcagttcctgtgagacaggagaggctgagccaagggaactgtgaaggggatgggcaggagggcttgtgcagggttttgtaagcagtgatctagtttcattaaaaaaagaaaacaataaaaaaaaaaagaaaaaaacacaaaaacaaaaaaggggggggggacacaaaaataaccccgggggtggcaccaaatcgatgctgcgtcacccaggtgatatgtgataaaaagggggccccatatgggggggcgggaacaaaatagatcagaggcaacagcgcggcgctagacacacgcgtcgtaggggaacaagtgtctgggggaactcgggaagaggcaacaacaaattgggcggggcacacatgtgcacaccatcaccgacagaagatacacgctcagggaaattaaacctcaagggctagtggtacaccacggccatggtcgcgggacaatgcgacggtaggttcga

SEQ ID NO: 341419 - DNA, 1173 bp, Homo sapiens
  misc_feature (35)..(35): n is a, c, g, or t
tcgatctagaggatcccgtgtcatcccccttcgtngtgttcaccttcccaggacctggtgttttctgcttcccccgatgccactatcaggatttggtcggtccccaatgcctcttgtgtacaggtggttcgggcccatgagagtgctgtgacaggcctcagccttcatgccactggcgactatctcctgagctcctccgatgatcagtactgggctttctctgacatccagacagggcgtgtgctcaccaaggtgacagatgagacctccggctgctctctcacctgtgcacagttccaccctgacggactcatctttggaacaggaaccatggactctcagatcaagatctgggacttgaaggaacgtactaatgtggccaacttccctggccactcgggccccatcactagcatcgccttctctgagaatggttactacctggctacagcggctgatgactcctctgtcaagctctgggatctgcgcaagcttaagaactttaagactttgcagctggataacaactttgaggtaaagtcactgatctttgaccagagtggtacctacctggctcttgggggcacggatgtccagatctacatctgcaaacaatggacggagattcttcactttacagagcatagcggcctgaccacaggggtggccttcgggcatcacgccaagttcatcgcttcaacaggcatggacagaagcctcaagttctacagcctgtaggccctggcccttctgatggaagctgggcctcatctcagtagaggggtagaattagggtttggggggggggtggggggaatctatggggggagggggctctgtggggtgggacattcacatcatttcactctggtctgagtggtggcctgagaaccatggtggcatggaccaccctcatccatgcaactccaggccccatgggaacggatgtggaaggaagaactgtcaccctcttaaggcccagggtcggagcccagggcctctcccttcctgtcgttcaatggacgtggtggtggctgttccacacccattttgttgcagttcctgtgagacaggagaggctgagccaagggaactgtgaaggggatgggcaggagggcttgtgcagggttttgtaagcagtgatctagtttcattaaaaaaagaaaacaataa

SEQ ID NO: 341420 - DNA, 1181 bp, Homo sapiens
gatctcgatgtgtgtttgagctgtagatctggacatccgtgccacagagccaggtaggtaccactctggtcaaagatcagtgactttacctcaaagttgttatccagctgcaaagtcttaaagttcttaagcttgcgcagaccccagagcttgatagaggaggcctcagccttcatgccactggcgactatctcctgagctcctccgatgatcagtactgggctttctctgacatccagacagggcgtgtgctcaccaaggtgacagatgagacctccggctgctctctcacctgtgcacagttccaccctgacggactcatctttggaacaggaaccatggactctcagatcaagatctgggacttgaaggaacgtactaatgtggccaacttccctggccactcgggccccatcactagcatcgccttctctgagaatggttactacctggctacagcggctgatgactcctctgtcaagctctgggatctgcgcaagcttaagaactttaagactttgcagctggataacaactttgaggtaaagtcactgatctttgaccagagtggtacctacctggctcttgggggcacggatgtccagatctacatctgcaaacaatggacggagattcttcactttacagagcatagcggcctgaccacaggggtggccttcgggcatcacgccaagttcatcgcttcaacaggcatggacagaagcctcaagttctacagcctgtaggccctggcccttctgatggaagctgggcctcatctcagtagaggggtagaattagggtttggggggggggtggggggaatctatggggggagggggctctgtggggtgggacattcacatcatttcactctggtctgagtggtggcctgagaaccatggtggcatggaccaccctcatccatgcaactccaggccccatgggaacggatgtggaaggaagaactgtcaccctcttaaggcccagggtcggagcccagggcctctcccttcctgtcgttcaatggacgtggtggtggctgttccacacccattttgttgcagttcctgtgagacaggagaggctgagccaagggaactgtgaaggggatgggcaggagggcttgtgcagggttttgtaagcagtgatctagtttcattaaaaaaagaaaacaataa

SEQ ID NO: 341421 - DNA, 904 bp, Homo sapiens
tggtctctcacctgttgtgagattgcatatccgatagcctcttctatgtagatcttgcagcaaggactctcagatcaagatctgtgacttgatggaacgtactaatgtggccaacttccctggccactcgggccccatcactagcatcgccttctctgagaatggttactacctggctacagcggctgatgactcctctgtcaagctctgggatctgcgcaagcttaagaactttaagactttgcagctggataacaactttgaggtaaagtcactgatctttgaccagagtggtacctacctggctcttgggggcacggatgtccagatctacatctgcaaacaatggacggagattcttcactttacagagcatagcggcctgaccacaggggtggccttcgggcatcacgccaagttcatcgcttcaacaggcatggacagaagcctcaagttctacagcctgtaggccctggcccttctgatggaagctgggcctcatctcagtagaggggtagaattagggtttggggggggggtggggggaatctatggggggagggggctctgtggggtgggacattcacatcatttcactctggtctgagtggtggcctgagaaccatggtggcatggaccaccctcatccatgcaactccaggccccatgggaacggatgtggaaggaagaactgtcaccctcttaaggcccagggtcggagcccagggcctctcccttcctgtcgttcaatggacgtggtggtggctgttccacacccattttgttgcagttcctgtgagacaggagaggctgagccaagggaactgtgaaggggatgggcaggagggcttgtgcagggttttgtaagcagtgatctagtttcattaaaaaaagaaaacaataa

SEQ ID NO: 341422 - DNA, 909 bp, Homo sapiens
ggcaatttccgttaggtgctgaaggctgtggcgcgcggctgtccccattcccacgtgaagcgctacgctagcatcgctcggctggcggctcccagctcgccgcggagcagtcccggcagcagcgggggaccggaagtggctcgcggaggctcagaagctagtcccggagcccggcgtgtggcgcctcggagcacggtgacggcgccatgtccctaatctgctccatctctaacgaagtgccggagcacccatgtgtatcccctgtctctaatcatgtttatgagcggcggctcatcgagaagtacattgcggagaatggtaccgaccccatcaacaaccagcctctctccgaggagcagctcatcgacatcaaagttgctcacccaatccggcccaagcctccctcagccaccagcatcccggccattctgaaagctttgcaggatgagtgggatgcagtcatgctgcacagcttcactctgcgccagcagctgcagacaacccgccaagagctgtcacacgctctgtaccagcacgatgccgcctgccgtgtcattgcccgtctcaccaaggaagtcactgctgcccgagaagctctggctaccctgaaaccacaggctggcctcattgtgccccaggctgtgccaagttcccaaccaagtgttgtgggtgcgggtgagccaatggatttgggtgagctggtgggaatgaccccagagattattcagaagcttcaagacaaagccactgtgctaaccacggagcgcaagaagagagggaagactgtgcctgaggagctggtgaagccagaagagctcagcaaataccggcaggtggcatcccacgtggagggcttgtgcagggttttgtaagcagtgatctagtttcattaaaaaaagaaaacaataa

SEQ ID NO: 341423 - DNA, 985 bp, Homo sapiens
ttggttctaatgcaaatcaacagcacgcgcactggaggaggtcggcggggagcaaggctttgtctatagcctctgattatacttcagggtgtatatcctccgtgcttccctatatccattttgctatccctgtaccctccttctccttttgtttggcaactgttggcatccatgccttgtggtcaccattgattcctggccctgtgggtttcatgtgtttacccaagatgcttttcttcgtggccatctatgtgaccttttcctttggtttaggatcggtgctttgacccccgcgtcaagtctgtcactctgttgcttggttccagtatgcgttgtgacagctcttgtggcgggtgttgttctctctgtctgtctgggcgtcatgttttgtagctgtgctgttattgtctgcatcccactcatcctgctagcctttcatgtatgtccgggatgtctgttgtgtctgtatgggaggcgtgggccggactccgggttggattctctttttatgtcgatgtcgcctgctccttcggtagtgagagctgtgttgtttgttgcttctcggtaccactctctccgcaatgtacttctcgatgatgccgccgctcataaacatgattagagacaggggatacacatcgctgctccggcaccggtgggacattcacatcatttcactctggtctgagtggtggcctgagaaccatggtggcatggaccaccctcatccatgcaactccaggccccatgggaacggatgtggaaggaagaactgtcaccctcttaaggcccagggtcggagcccagggcctctcccttcctgtcgttcaatggacgtggtggtggctgttccacacccattttgttgcagttcctgtgagacaggagaggctgagccaagggaactgtgaaggggatgggcaggagggcttgtgcagggttttgtaagcagtgatctagtttcattaaaaaaagaaaacaataa

SEQ ID NO: 341424 - DNA, 320 bp, Homo sapiens
actatctcctcagtcaggagactaaaggaaaaggtagttccatagctggaaagcattctggggccagtacagaactggcttagggtcaaatgtcttgctttctgctagttgagtgtgaggatgcctagtcttgttggggctaatagcagatgaggaatcctctaggcccaagattgccttcactccaagctcactaccagccttttctctacagtctctaacgaagtgccggagcacccatgtgtatcccctgtctctaatcatgtttatgagcggcggctcatcgagaagtacattgcggagaatggtaccgaccccat

SEQ ID NO: 341425 - DNA, 854 bp, Homo sapiens
  misc_feature (59)..(59): n is a, c, g, or t
  misc_feature (738)..(738): n is a, c, g, or t
taaaaaaaaaaaataaaaaaagaacaaaaaaagaaactaacggctaggtacgaggctgngtggtcatcgctcggctggcggctcccagctcgccgcggagcagtcccggcagcagcgggggaccggaagtggctcgcggaggctcagaagctagtcccggagcccggcgtgtggcgcctcggagcacggtgacggcgccatgtccctaatctgctccatctctaacgaagtgccggagcacccatgtgtatcccctgtctctaatcatgtttatgagcggcggctcatcgagaagtacattgcggagaatggtaccgaccccatcaacaaccagcctctctccgaggagcagctcatcgacatcaaagttgctcacccaatccggcccaagcctccctcagccaccagcatcccggccattctgaaagctttgcaggatgagtgggatgcagtcatgctgcacagcttcactctgcgccagcagctgcagacaacccgccaagagctgtcacacgctctgtaccagcacgatgccgcctgccgtgtcattgcccgtctcaccaaggaagtcactgctgcccgagaagctctggctaccctgaaaccacaggctggcctcattgtgccccaggctgtgccaagttcccaaccaagtgttgtgggtgcgggtgagccaatggatttgggtgagctggtgggaatgaccccagagattattcagaagcttcaagacaaagncatgtgctaacactggagcgcatgagagacgggaagactgtgctgaggagctggtgagcagaaactcacaaaacgggggggctccagtgggtgcaagtgcacatcctgatcgcctg

SEQ ID NO: 341426 - DNA, 1985 bp, Homo sapiens
ggcaatttccgttaggtgctgaaggctgtggcgcgcggctgtccccattcccacgtgaagcgctacgctagcatcgctcggctggcggctcccagctcgccgcggagcagtcccggcagcagcgggggaccggaagtggctcgcggaggctcagaagctagtcccggagcccggcgtgtggcgcctcggagcacggtgacggcgccatgtccctaatctgctccatctctaacgaagtgccggagcacccatgtgtatcccctgtctctaatcatgtttatgagcggcggctcatcgagaagtacattgcggagaatggtaccgaccccatcaacaaccagcctctctccgaggagcagctcatcgacatcaaagttgctcacccaatccggcccaagcctccctcagccaccagcatcccggccattctgaaagctttgcaggatgagtgggatgcagtcatgctgcacagcttcactctgcgccagcagctgcagacaacccgccaagagctgtcacacgctctgtaccagcacgatgccgcctgccgtgtcattgcccgtctcaccaaggaagtcactgctgcccgagaagctctggctaccctgaaaccacaggctggcctcattgtgccccaggctgtgccaagttcccaaccaagtgttgtgggtgcgggtgagccaatggatttgggtgagctggtgggaatgaccccagagattattcagaagcttcaagacaaagccactgtgctaaccacggagcgcaagaagagagggaagactgtgcctgaggagctggtgaagccagaagagctcagcaaataccggcaggtggcatcccacgtggggttgcacagtgccagcattcctgggatcctggccctggacctctgcccgtccgacaccaacaagatcctcactggtggggcggataaaaatgtcgttgtgtttgacaaaagttctgaacaaatcctggctaccctcaaaggccataccaagaaggtcaccagcgtggtgtttcacccttcccaggacctggtgttttctgcttcccccgatgccactatcaggatttggtcggtccccaatgcctcttgtgtacaggtggttcgggcccatgagagtgctgtgacaggcctcagccttcatgccactggcgactatctcctgagctcctccgatgatcagtactgggctttctctgacatccagacagggcgtgtgctcaccaaggtgacagatgagacctccggctgctctctcacctgtgcacagttccaccctgacggactcatctttggaacaggaaccatggactctcagatcaagatctgggacttgaaggtaaagtcactgatctttgaccagagtggtacctacctggctcttgggggcacggatgtccagatctacatctgcaaacaatggacggagattcttcactttacagagcatagcggcctgaccacaggggtggccttcgggcatcacgccaagttcatcgcttcaacaggcatggacagaagcctcaagttctacagcctgtaggccctggcccttctgatggaagctgggcctcatctcagtagaggggtagaattagggtttggggggggggtggggggaatctatggggggagggggctctgtggggtgggacattcacatcatttcactctggtctgagtggtggcctgagaaccatggtggcatggaccaccctcatccatgcaactccaggccccatgggaacggatgtggaaggaagaactgtcaccctcttaaggcccagggtcggagcccagggcctctcccttcctgtcgttcaatggacgtggtggtggctgttccacacccattttgttgcagttcctgtgagacaggagaggctgagccaagggaactgtgaaggggatgggcaggagggcttgtgcagggttttgtaagcagtgatctagtttcattaaaaaaagaaaacaataa

SEQ ID NO: 341427 - DNA, 1918 bp, Homo sapiens
ggcaatttccgttaggtgctgaaggctgtggcgcgcggctgtccccattcccacgtgaagcgctacgctagcatcgctcggctggcggctcccagctcgccgcggagcagtcccggcagcagcgggggaccggaagtggctcgcggaggctcagaagctagtcccggagcccggcgtgtggcgcctcggagcacggtgacggcgccatgtccctaatctgctccatctctaacgaagtgccggagcacccatgtgtatcccctgtctctaatcatgtttatgagcggcggctcatcgagaagtacattgcggagaatggtaccgaccccatcaacaaccagcctctctccgaggagcagctcatcgacatcaaagttgctcacccaatccggcccaagcctccctcagccaccagcatcccggccattctgaaagctttgcaggatgagtgggatgcagtcatgctgcacagcttcactctgcgccagcagctgcagacaacccgccaagagctgtcacacgctctgtaccagcacgatgccgcctgccgtgtcattgcccgtctcaccaaggaagtcactgctgcccgagaagctctggctaccctgaaaccacaggctggcctcattgtgccccaggctgtgccaagttcccaaccaagtgttgtgggtgcgggtgagccaatggatttgggtgagctggtgggaatgaccccagagattattcagaagcttcaagacaaagccactgtgctaaccacggagcgcaagaagagagggaagactgtgcctgaggagctggtgaagccagaagagctcagcaaataccggcaggtggcatcccacgtggggttgcacagtgccagcattcctgggatcctggccctggacctctgcccgtccgacaccaacaagatcctcactggtggggcggataaaaatgtcgttgtgtttgacaaaagttctgaacaaatcctggctaccctcaaaggccataccaagaaggtcaccagcgtggtgtttcacccttcccaggacctggtgttttctgcttcccccgatgccactatcaggatttggtcggtccccaatgcctcttgtgtacaggtggttcgggcccatgagagtgctgtgacaggcctcagccttcatgccactggcgactatctcctgagctcctccgatgatcagtactgggctttctctgacatccagacagggcgtgtgctcaccaaggtgacagatgagacctccggctgctctctcacctgtgcacagttccaccctgacggactcatctttggaacaggaaccatggactctcagatcaagatctgggacttgaaggaacgtactaatgtggccaacttccctggccactcgggccccatcactagcatcgccttctctgagaatggttactacctggctacagcggctgatgactcctctgtcaagctctgggatctgcgcaagcttaagaactttaagactttgcagctggataacaactttgaggtaaagtcactgatctttgaccagagtggtacctacctggctcttgggggcacggatgtccagatctacatctgcaaacaatggacggagattcttcactttacaggtagaggctggtcctgggctcctgggatctctctaggtgcccaggcccggagggaagcctcactgggttaggaatttctagggcttgcatgaatttacctaagcagctttctgttaccacctgaggcagagctttatgactaaggaagcaactgagtcagactgcatggcagtagatgctagtgcttgttctgccacttccatgccctgtggcattgggcaggttactaaagggagagaaaagtccctctgaagttttgataactgaatctaaaataaatgaacattagacagtg

SEQ ID NO: 341428 - DNA, 1008 bp, Homo sapiens
ggtgcttgtggcacctggccctgaaggtggagagacactggctgtgcgtgtgtgatatgatggtgtggtctggggggtcccgctggctgtccttcctggaaggacgtgagggacatctcaggtaggagtttggtgagccccattttcttcctctcatgatctgtgggtgacgtattttactacccaccgccactgtaggaacgtactaatgtggccaacttccctggccactcgggccccatcactagcatcgccttctctgagaatggttactacctggctacagcggctgatgactcctctgtcaagctctgggatctgcgcaagcttaagaactttaagactttgcagctggataacaactttgaggtaaagtcactgatctttgaccagagtggtacctacctggctcttgggggcacggatgtccagatctacatctgcaaacaatggacggagattcttcactttacagagcatagcggcctgaccacaggggtggccttcgggcatcacgccaagttcatcgcttcaacaggcatggacagaagcctcaagttctacagcctgtaggccctggcccttctgatggaagctgggcctcatctcagtagaggggtagaattagggtttggggggggggtggggggaatctatggggggagggggctctgtggggtgggacattcacatcatttcactctggtctgagtggtggcctgagaaccatggtggcatggaccaccctcatccatgcaactccaggccccatgggaacggatgtggaaggaagaactgtcaccctcttaaggcccagggtcggagcccagggcctctcccttcctgtcgttcaatggacgtggtggtggctgttccacacccattttgttgcagttcctgtgagacaggagaggctgagccaagggaactgtgaaggggatgggcaggagggcttgtgcagggttttgtaagcagtgatctagtttcattaaaaaaagaaaacaataa

SEQ ID NO: 341429 - DNA, 821 bp, Homo sapiens
tgctagtgatgggaaccgagtggccagggaagttggccacactagtacgttccttcaagtcccagatcttctctgagaatggttactacctggctacagcggctgatgactcctctgtcaagctctgggatctgcgcaagcttaagaactttaagactttgcagctggataacaactttgaggtaaagtcactgatctttgaccagagtggtacctacctggctcttgggggcacggatgtccagatctacatctgcaaacaatggacggagattcttcactttacagagcatagcggcctgaccacaggggtggccttcgggcatcacgccaagttcatcgcttcaacaggcatggacagaagcctcaagttctacagcctgtaggccctggcccttctgatggaagctgggcctcatctcagtagaggggtagaattagggtttggggggggggtggggggaatctatggggggagggggctctgtggggtgggacattcacatcatttcactctggtctgagtggtggcctgagaaccatggtggcatggaccaccctcatccatgcaactccaggccccatgggaacggatgtggaaggaagaactgtcaccctcttaaggcccagggtcggagcccagggcctctcccttcctgtcgttcaatggacgtggtggtggctgttccacacccattttgttgcagttcctgtgagacaggagaggctgagccaagggaactgtgaaggggatgggcaggagggcttgtgcagggttttgtaagcagtgatctagtttcattaaaaaaagaaaacaataa

SEQ ID NO: 341430 - DNA, 1044 bp, Homo sapiens
ccgttctctccccttgttcttggtctttgttcctcgtgtgccttgcccccttttgctcttccattcggcttctctggtgtgtcgcgttctatgggtggtgtttgtgtttgtccctgtttgtgctttttctgatgtcctttggtgtgctcctttttcccacctggctactttctgtccctgtgggtccctttgatctcctcctcttgttgaactaccttagtgtcgggctttttctggctccctcttctctctttcttcctcttgtttatgttgggctttttctggtgtgctctagctcttgtttttttccttctccttgtgtttccttgcgtgtctatgtgttttttatctctcttgtttgggtttttcccttcctctgttatgtgtctctttgatgtgttactctctcggtattgtcgtttcctgtgtacttttgtgttctgtttcgtctctcttgtatctttttgttatgctcgtcttctcagtccatgttgttggatttctctgtttggtcatctctacggtgcattaatgtctctggtctcaggagtccccacgtattgtctcgtcatcttgtgcaatccccacgctgtgatgccatcctttcccggtacttccctgagctcttctgtgctctcaccagcgtcctcatggccctgtcttccctctcgtcttgcgctcccgtgcgttagcacttctggtcttgtgcggacggtgggacattcacatcatttcactctggtctgagtggtggcctgagaaccatggtggcatggaccaccctcatccatgcaactccaggccccatgggaacggatgtggaaggaagaactgtcaccctcttaaggcccagggtcggagcccagggcctctcccttcctgtcgttcaatggacgtggtggtggctgttccacacccattttgttgcagttcctgtgagacaggagaggctgagccaagggaactgtgaaggggatgggcaggagggcttgtgcagggttttgtaagcagtgatctagtttcattaaaaaaagaaaacaataa

SEQ ID NO: 341431 - DNA, 479 bp, Homo sapiens
aaaaaaaaaaaaaaaaaaaaggcagaaatactactatttgcagatatgatggcccacgtggaaaacccaaatagtcacctaagacgttctcagaatccataatcgcagcaagtagctatgtgtatgatgaatagggaaaaaaacactttctgttattccaacaataattggtagtaacctgagcaggggtggtgatgggaaaatcgccttatgatagtcataatacatttcttagaaataagaatttctaacaatttgagcaggacccatataaggaaaactacagctctaccatgattgaggattggggaactgaacaagtgcagtaccaaagaaaattccatgagatctggtaaaatgtgtcaaaatcctaaactttttcatccgtatgaataaactaataaaaataactaagatgttttagaaaaaaatgattttcatatcagatatgaaaagataaagtgtcaatataaatattg

SEQ ID NO: 341432 - DNA, 603 bp, Homo sapiens
gtgcagtggctcacgcctgtaatcccagcactttgggaggccaaggcagacagattacttgaggtcaagagttcgagaccagcctggacaacctggtgaaatcccatctctaccaaaaaatacaaaaattaagtgtgaatggtggcatgcacctgtaatcccagctacttgaaccgggggcagggggacgcagggggtgcagtggaggttgcagtgagccaggatcgtgccactgcactccagcctgggtgtcaaagtgagaacatgtcttcaaataaataaatcataaaaatacaaataaaacaattttttagagacagggtccagggtctcacctattgcccaggctggagtgcagtggtgcaatcatagctcactgtagcttcatactcctgggctcaagtgatcctcccacctcactcttccaggcagctggcactacaggtatgcaccaccacacccagctaattttttaattttttgtaagggtggtggtgggggggggtctcactgtattgcataggctagtcttgaactcctggcctcaactgatcctccggccttagcctcccaaagcactgggaaataaactgatttttaatg

SEQ ID NO: 341433 - DNA, 259 bp, Homo sapiens
agaggaggtggcagtgaatgaggaatgacaccagcctgccacatgtgccaaaagcaggatgcatgggtggcaaggtggagaagataaaccacaccagcctttgccactgttgatcaccttcaggagaagagaaataaggaaatattagatcatgacttggaaaatgtatcaggcaggactttgtgcaagccctttggaactcccgctaatctaaatggggaagacaagacactgagaacactaagcagatccatatctc

SEQ ID NO: 341434 - DNA, 294 bp, Homo sapiens
gttcgcaggcaatcccaagagagtttatgttggccagtggtgccctaaggtgccagagtctttcaccctcccttttcctggaatgaccttgtaacttggacttcctgcttcagatttgcctgggtatttgcagttcctccctcagtggcacaccaagctccttcctaccttaggggcttctcagttgctgttctttctgcctggaatgctcttcctttataaatttccatgactactttcttctcaagagtcagctcaaatgtgtcctcagaaatacgttccctggccacctta

SEQ ID NO: 341435 - DNA, 619 bp, Homo sapiens
tgtcctgtctacaaaaagtaccttacagatatgttcatttgataaaaagaccaaaaccagcccacctggtgaagttcacatgtgaaggtgacacacatagagcctgtggcataaaacacagaatttatttaggcagaaggaaacaggaggcaatggctgctgaagcaagaaggaaaaatgtttttataactaagtagtatataaagtacttttagtactatatatataaagtataactaactactactactactactgctactgctactgctactgctactacgagattactttttcactgtcaccaaaagttttgaaaaatacgtttttatattttgaaatatattttgaaaaatatatactttattatcatacagtaggttagttatttttaaatgttttcataattgttttaaacctatattttaaaacaatttaaaattggtttctaataaggtaaatactaatagatataatccacataaacaaaagctctttgagtttctcagtaacatttaatagcgcaaatcttatctttttttccttttgcttttttaaatgtttttctctcaagccactttgtctaagaatactatgtcggtcaggtgcagtggttcat

SEQ ID NO: 341436 - DNA, 784 bp, Homo sapiens
ctaacataaacagtctatttctactgccttttacataaactttagcacacttgaagtagagagccctttcccaggataacgtttcctctgcctgttatgcgatagaacacatcccaggcacatgcctgtgtattcagtgaaaggaaagaacgagttcggaattcataaagattcaaagtgttaatttcagattttccataggtttgaggaatgttccatagatctgatagcccttttcacaaccctccttctctctaatatgtggcctttccccactttgctgtgaaagctttaagcattacttctgcatgctctggtcccaacagcattaaatacatgttgctttgggtttgctggtatggtgggctgccacaagtttgactactaatgtgtgcttttttccctcaatttgcttagtaatcagaacttttgtgcttctcggcatagtctatattacttcttatctataattcctgaatataaaatatataaaatttagagaaaaagcaaccaagtcagagaggtagatttaattttgggataaatacctgaatctgtcatagaagggaaaagagaaaagtaattggctataatatacaaagaactaaaaaattttaaaaaaagatacagacatacctacacatatatacatacatagatacctatacatactctttatctcagattttgatcattaaaattcttaaatgattcaagcctttgctagtcttatctgtgctctcccaatctgtcattacgttaaggggaccttgtgttatggtac

SEQ ID NO: 341437 - DNA, 335 bp, Homo sapiens
aagccagcagtgactggtcaaacctttccaacaccacatcactccaatgctaatccttccacctccgctttccacatgtaagcatccgtgtgatttgatcagcctacctagataatcgaggataatcttcctattctagggtcaactggtcagcaaacttaattaccctttgccacatgcacagcttctgattaggattcagacttctttgtgggaagcgttattctgtgtactacgcagctccagtgaaattattttaatgatttctttctgatatggagtgtgtgagtgtgatgggttggggaaaggggaggaaagaatcagtttatccagcc

SEQ ID NO: 341438 - DNA, 481 bp, Homo sapiens
cagtcttaattcatttatgactactcagaaacaagcttttgtttctccctagattgcctaggattacctcctaaggaatgtagatcaaacttattgcacccatcctcctataatttaggtctgttttctaaactggaggtcaaaatccattagtaaattgaaagaagcactcagaaaaaggaaaaaataaaagagtagaaagaaaatatcagagtgcatgcaagtagtaagggtaagtgctgctttgggaaatgtttgtgtatatgtatgtgtgttgcagtgtaaaatatatgtccaacaatggattgtcaaaaaaagtttgaaaaacactagtatcttaccttagtgtgtattttctgtatttctatattttctgactttattttcaactcttattttcctgtattttgatttatctacatattttttatcctgcagtattatacacatcgctctgaaaactgttttcattctattctgg

SEQ ID NO: 341439 - DNA, 707 bp, Homo sapiens
ttcatcatgttggtgaggatggtctcgaactcctgacctcaggtgatccacccacctcggcctcccaaagtgctggggttacagcgtgagccaccacacctggctgggaattcacatttctaacaagtttccagatgaggctgcaagtcctgatggtacagggatggcactttgagaacccctgctgtgcagtgtcatgtgtcatcacctcatctcccttagggcagatagtgccactcccagcttaccaaagaagaaactacagcctccacaggccaagtgaccttgccaaggccacacagctggagggtgctagggagccaaactgcacctgctgcactgccttttgcccccagggcaatgtggctggggtgggtgtgacagcatctctccaaatttttgttccagagagggcagtaagtagagagggcaggcttggggtaagcagtactgggaggtggtcatagagtcactgttaggctaacagtcattccttgggtggccataatgttttaaagacactttcagcaaggcacagtggtgcatgcctgtagccccagctacttgagaggcttgcttgagcccaggagtttgagactggcctaggcaacatagtgagacctcatctcaaaaaatatttaaaaataaaaataagatacttttgcttctatctatctatctatctatctatctatctatctatctat

SEQ ID NO: 341440 - DNA, 479 bp, Homo sapiens
caactaaaggaaaaactgctttttccctccactatcccaatacttccgaccactaaatgtgcaagggattttcaaaccaagcaattctccagttcttggtgcacaataactaggtgctctataatccattcgattctgatactgtctacctggagttagcacagatgccatggattgagatctgtgtttagacccagggtaggcccatcattgccttccggcatgtggactgtgaactagaggcatccttgaaactggaaacaagggccttgtggggcaaaggccttctgacctgggcaaaggcatagtctgctgggagcagcaggagagatgggacagatagggcatcattgccagcaagatgcctcctgctcccagaactagatgtcttcaggagaggcaagatccagacacaggtttagaacaaaaggtgatgaactggaaccagccttaatgattgatgggagaaggtgctacat

SEQ ID NO: 341441 - DNA, 543 bp, Homo sapiens
atgtgggaaggtgtatgagtgcgtgtgagtgtagggactatgcagatatgagggtgtagttcaggtgtgaggctgggagcctgttgcctggattggagcagtgttttccaaggcctgagtgctacctgaacaggaacatccagcacaagcacgtgggaaggggcccccggcctggaagttgggcactgacccacacagatgcacaaggacagacatacccgcccctgtcctccctcttcctctcttctggcgtcagtggtttttaaaggagcctccgtgaggactgtttgctgtgcagttcccccacccccagcctgtgtctcttcaaacgcagtgctgccctccaggcagctttgtggaggctcctgcctcgaccatctgaaggcagatgggtgggcttggatccgctgctgccccccagggagcgaggaggcagctctgctccttgggcctgggcacaggctgagacagatggactgcctgtctcaacacccccgcacaggcaccccataccataggggttctagcgggtagcccccagtt

SEQ ID NO: 341442 - DNA, 317 bp, Homo sapiens
tgtatttatttttgataaaccccttggatcacacctgagtttacactaagatgagatgactcaggctggagtctggtcaccagaaaaaccaaccatgcaattagaggatcagggctctaagccagcccaatccagagaggggaaaggaggggactggaaattgaatcattggccatgtggttgtactcaatcaatcctgcctatgtaacgaaaccccaatagaaactggacaccaggctcactggagctttttggttggtaaacacatcaacgtgccaggcaggtgacacaccctagttccaagggacaagacacag

SEQ ID NO: 341443 - DNA, 132 bp, Homo sapiens
gattctgatggagaaattccaggttgagaaatgctacttgtaagaatgtatgaaatgataccacaaaagacacgtaactgttcgtctttagtatatcaatattgtgtcagttggtaacaattataaaagctg

SEQ ID NO: 341444 - DNA, 603 bp, Homo sapiens
catattagcaaacactgaaaacagtgaaggagctggggctggtaaggttataataagatacactgcaatgcagggcactaaataacatgcacttttaaaagttaacccactggaaaaagaaaagttcattttagctctcttgacaacactgctttccttccataataaggtcctttgtatccttaaagccctttccttcatctttttgtcttcatattttctgaaatgtaaagtttcctacatgacacaagacatggtaaaatgtcttgttatttctccctctatgtttattactgtcttgtgtgagattcaaaagaattttccaagtggaaccctgtcctctgctgggtatctcaggacgtagacaggtggcagtgggcaggtacagggacagacaaggagagtccctatactcatcttccctccatctgcagcccagtctgtgttctcttcttccagtgaacatgcttgggtacctaaaggaaaaggcatagctagaaagacggtacagaggctacccagaaaattgcatctcgttacagaaacgtcaggtgtcgtgctctgcaggggaccaactgctaacacagatacacgggcctccgg

SEQ ID NO: 341445 - DNA, 124 bp, Homo sapiens
aggcctgggcccttggtaggctggcgggtgccaatgtaagcttctctcagctgtgtttctgttcatttccctcccaccagcctgtcctgcatactttgtctggttgaattttagctgagtggcc

SEQ ID NO: 341446 - DNA, 333 bp, Homo sapiens
ggctgatcacatcttttcgatgccagagttggcttcctctccccaaccttaccctcaatcacacacaggttttcattagtagcacacatttgtggaatactgaacagagggagtttgacttagtctctaaaaagtaaaggggatcatacatggatggtcataaagagcctgtagacaactgactattgaacagaatgttttcaaaaggaaataacatattactcttgtgacaaggcagaggagtaagtgcatattatggtgtgacaatacttttagactgagtaaagcaaagattgtaccatctttctctcaattagttagctaagccatgtg

SEQ ID NO: 341447 - DNA, 266 bp, Homo sapiens
ctttgtctactgggtaaattatattcattatgcccactgctgcagcatgcataaaccaacacccctgcatggcctaatctgggactgatgggagaagtgcttgcaaaccaagatcaaggtgtcatttctctgctaatactgtctaacaagctgacccttacaaaaacgcacgtaaaatcaggcaggtttagctactgtgttgcaagagaaaccaggacctttctaaatagttctctccattaccatttattctctcaagggaaact

SEQ ID NO: 341448 - DNA, 193 bp, Homo sapiens
taagcagttgagtaaggaatgagaactgacccttaggtttagacataaaaagtgtctgtgaacctgacataagcagatacagtggaaggaaagctagactggagtgctgaagtatgaataggagaggaaatggaaacaattagtagagatagctcttgagaatctttgcatgaaagaagcagagaacggggta

SEQ ID NO: 341449 - DNA, 425 bp, Homo sapiens
aacccagctctttttatttttgtgtcttgcccatggatgtcacattttccataactagggtcagtctgtgtatgcacagttttcacttttgccattttcccttagcatttatgtaatcacagtttctggtggttgtattgttgtgccgtaatttactaagccattcagattgctacatttttggtttataaataacaccgtagagaatatatctgtatatgttattattaacttgaattatttccttcatgttaattcctagaagtggaattactgggttaaagagaataaatatattattttccaagagcgtcataccagtttacactgacaccaataatgaatcagtaaatccatttcattgaactcttcccagcatttgatattttaattttttttttgtttttccttgagaaagtgtctgg

SEQ ID NO: 341450 - DNA, 149 bp, Homo sapiens
tagctatcattactacaggatgaggccatgctcctgagaattgcttatgagtggtctcttgatttgaactctgcctggcccttgatgaccactctgcctacccagcctcaacacttcacactccagcagttcttttttttttttttttt

SEQ ID NO: 341451 - DNA, 243 bp, Homo sapiens
ctactggtccatatgagcgcctggggtccacagcccatcccaagaacttagatgccctgaaatatacctggaaagcatcaaatgtggtggcagaagctttgccctgatgatctaacaagtttctctacaggctgtgccctaaggtaccctgcgggggtgggccagagtagtcagacaggtcaggctctgggaacccctggatccaagcagccccatttgatatatttcgtagacctgggcctc

SEQ ID NO: 341452 - DNA, 627 bp, Homo sapiens
ctccaatttagccctgagcaaacttaagacatttatgttttcttaaatctaatgtattatatgcaaaaccttttcaaactatttacaaagctgaagcaccaagacacatgattctttgacttatttttaatgacttttaaatataatgagaaaaacattaattacgatgcaagtcatcatcctattaaaacatttcacttataatacaagcatttaagtatagtagtagtagttaaatctaaaaaaaaaacaaaaaattagccataaataatgatgaagctgccagtagttaacaacacacactcacaaataatgagataaatttaacggcaagcttccaaacaaaaaccttgtcattttaaggtgtcccacagcagaccggttatgacctcgggaactggcctgaaatcttgcctcctttcttgtgtaaccagccaaataacaacacctctctaaatctgtttctttataatggtgccaaccttatacggtagctgtagatattaattaagacactgcacctaggaaagagcctagcacacagtaaataataactcacaattattaaattttggaagaaatgttacacaaagcagcagccctttgacttttaaaaaaaaatttaca

SEQ ID NO: 341453 - DNA, 226 bp, Homo sapiens
ttcaaagcaggataccttttccatgctggagaaggtgaatctttgaaagtcggtaggagtgattaggtaaaggaggtgaaggagtaaagataattattctagactgagaaattatgttagtatcaggttatgaggttagaagaggtaagtaggcaactggtattgctgtgctgagaatttaaaaatctttattgaaggctttaaaagaaaagtggtaatagtaaga

SEQ ID NO: 341454 - DNA, 327 bp, Homo sapiens
aaagtttaataaaatcataatatttttactgtgtatgaaatactctaatatttctattcttgtccatttttactttgtagtgtttaactggcatttggtgaggcccaccatattgatttctttaccctatgtattgcaaaccacaatttgaaaaacactactttaagtcttacagtcaggaatgaattacaaggtcagaaaatatagcatgctggccagactggtggcctgtcaagtgttctgcccactttggcctcctaaagtgctgaggttacaggcataagcctggccagcatgctatattttctggtcgacgcggccgcgaat

SEQ ID NO: 341455 - DNA, 1279 bp, Homo sapiens
tccatacaaagaattaaaaatttgtttttcagtataattataaattaagtatcatggaactttagagactctcttgaatagtcagacacctcaaatattaagtccttaaatttcagttgttgggttttttgcttttatattttcttttctccacaggtataaatggtttaaagaattgtgggatgtattattgttaccagaattagatgccgtcattttaacttgtcagagtatgtgtttccccctgatatccttgattctctttctgtttggaacgtgtactgcctactggagtggcctactgtcttctgcatctgtgagacttctttcttcattgtggctagctttgaaaagaccctctgaacttcctaaagatatcaagatgatatcaccagacttgccctttttgacaattgtcttgatcatagttagttggacaacttgtggagcactagccatacttctttcttatctttactatgtgtttaaggttgttcatctgcaagccagcttaacaacttttaagaatagccagcctgtgaatcccaaacactctagaagaagtgaaaagaaatccaatcatcataaagactcctcaatacaccatcttcgtttatctgccaacgatgctgaagatagccttcgcatgcacagtactgtgattaacttactaacatggattgtattactcagcatgccttctctaatttattggctaaagaatcttaggtattattttaaacttaatcctgatccatgtaaacctttggcatttatccttattccgactatggcaattcttggaaatacttacactgtttcaataaaatcaagtaaattgttgaagactacttcacaatttccacttcctctggctgttggtgtgattgcttttgggtcagcacatttatataggcttccatgctttgtcttcattcctcttttactccatgcattatgcaactttatgtaagattggacttaaggaatgatgaagataatttatgtgtttagggccagtgataagagggaacacacagatccatcagtatggacagcaagatcctttggagaagacaagtctatttttacaatattgaaaataggaaattagttttgtaatgtttgagggaagtagttgaagcatggttttgttttgtggtgtggaatccatgtagtaatcatttttgaaaaattcatgaagggatatatggtgatcactatcattgaggactcctgtgcatataaaatagtctgttttatcaactgtacgagaagt

SEQ ID NO: 341456 - DNA, 766 bp, Homo sapiens
tccatacaaagaattaaaaatttgtttttcagtataattataaattaagtatcatggaactttagagactctcttgaatagtcagacacctcaaatattaagtccttaaatttcagttgttgggttttttgcttttatattttcttttctccacaggtataaatggtttaaagaattgtgggatgtattattgttaccagaattagatgccgtcattttaacttgtcagagtatgtgtttccccctgatatccttgattctctttctgtttggaacgtgtactgcctactggagtggcctactgtcttctgcatctgtgagacttctttcttcattgtggctagctttgaaaagaccctctgaacttcctaaagatatcaagatgatatcaccagacttgccctttttgacaattgtcttgatcatagttagttggacaacttgtggagcactagccatacttctttcttatctttactatgtgtttaaggttgttcatctgcaagccagcttaacaacttttaagaatagccagcctgtgaatcccaaacactctagaagaagtgaaaagaaatccaatcatcataaagactcctcaatacaccatcttcgtttatctgccaacgatgctgaagatagccttcgcatgcacagtactgtgattaacttactaacatggattgtattactcagcatgccttctctaatttattggctaaagaatcttaggtattattttaaattaatcctgttggtgagacacatc

SEQ ID NO: 341457 - DNA, 707 bp, Homo sapiens
cctcaacaggacctagtgtgttgtttcccaccatgtgtccatggattctcattgttcagctcccattataaatgggaacacacagtatttgtttttctgttcctgcattagtttgctgaggataagggcttacagctccatccatgtccctgcaaaggacatgatctcattccttttcatggctgcatagtataccatagcatatatgtgccacattttctttatcctatctatcattgatgggcatttggtttgattccatgtctttgctattgtgaatggtgctgcaatgaacatacatgttcatgtatctttataatagaataatttatattcctttggagatatacttggtaatgggattgctgggtcaaatggtatttttgcctctagatctttgaggaatcaccaccctgtcttccacaatggttgaactaataatttacattcccaccaacagtgtaaaagcattcctttttctctgcaacctcaccagcatctgttgttccttgactttttaataatcaccattctgactggcataagatggtatctcattgtggtttgggtttgcatttctctaatgatcagtgatctttcctaatttttacaacacataatgttgagcttaatgatctgcaattggcactaattaatactattgatctgtaactggcactaattaatgctattttcaatagtcaatt

SEQ ID NO: 341458 - DNA, 459 bp, Homo sapiens
ttgattttatgtgactatcatcttggtgatttccttgactcacttttgctggattcttttcgtggatttcttgtcttagtttattctcttgtatcgatggagtatatcttactcctttaaaaaaaaaaaaaccaccctacatttaggatatacttgatggcccgttcatctgaaaatatcttaattctactctcaaacttgactcagacctgactggatatagaattctagatgaaaaattagaaatgatttttcctcagaatttgggaagcattaatcagtgacttccagattctgaatttgcttttaaaaagtcagatgttgttctggtttttgatcttttatataaaagaaacttgtgggatcttttcttgtgtctctgcttggaaatttcacaataactttcctagatgtacattgatttttatctgttttttttttctgagacagttttgctcc

SEQ ID NO: 341459 - DNA, 294 bp, Homo sapiens
gagagagacagcagcaggctaactagttgtctgttaagaacatccagagcaggaccagaatctgggccaggaactgagagacagattgggacaacggaacaaatctaccagggtactatcagatggaggaacatgtagtttgtggtcagtgacctcaggttctcacattcacggtgctgcatcctggttttcatttggggactgttttctggcactcccgcctgtctggaggtgagatatgcttgttatgacaacccttctgtcacaataaattggctggtgcattcagtgtca

SEQ ID NO: 341460 - DNA, 268 bp, Homo sapiens
ggggggtggaggttgtgtgtactaaaaatgaactcagatttaatgataattaatgatgaattaatgatacttaactcatagattaaacatctttttatgtccttgaatcaatagaaatttttatatttaatattcatcttgtgtcatcccaaacttcgctagtagatgcttcaagttattatcttgattcttcagatgcattttagtaatctttggactccttgctttctggtgttctaagtttatcttatctatttccagttctttt

SEQ ID NO: 341461 - DNA, 2875 bp, Homo sapiens
gaaggtggtgaccgagcctccagttgtcaccctgttggacaagaaggagggtgagcaagccaaagccctgtttgagaaggtgaagaagttccgcatgcacgtggaagagggcgacatcctgtacaccatgtacatccgacagacggtgctgaaagtgtgtaagttcctggccatcctggtctacaacctggtctatgtggagaagatcagtttcctggtggcctgtagggtggagacgtcagaggtcacgggctacgccagcttctgctgcaaccacaccaaggcccacctcttctccaagctggccttctgttacatctcctttgtgtgcatctacggacttacctgcatctacacgctctactggctcttccaccggcccctcaaggagtactccttccgttccgtgcgggaggagactggcatgggggacattcctgacgtcaagaatgacttcgccttcatgctgcacctcatcgatcagtacgactccctctactccaagcgcttcgccgtcttcctgtccgaggtcagcgaaagccgtctaaagcagctcaatctcaaccacgagtggacgcccgagaagcttcgacagaagctgcagcgcaatgccgcgggccggctggagctggccctctgcatgctgccgggtctgcccgacaccgtctttgagctcagtgaggtggagtcactcaggctggaggccatctgcgatatcaccttccccccggggctgtcacagctggtgcacttgcaggagctcagcttgctccactcgcccgccaggctacccttctccttgcaggtcttcctgcgggaccacctgaaggtgatgcgcgtcaaatgcgaggagctccgcgaggtgccgctttgggtgtttgggctgcggggcttggaggagctgcacctggaggggcttttcccccaggagctagctcgggcagccaccctggagagcctccgggagctgaagcagctcaaggtgttgtccctccggagcaacgccgggaaggtgccagccagtgtgaccgacgttgctggccacctgcagaggctcagcctgcacaacgatggggcccgtctggttgccctgaacagcctcaagaagctggcggcattgcgggagctggagctggtggcctgcgggctggagcgcatcccccatgcagtgttcagcctgggtgcgctgcaggaacttgacctcaaggacaaccacctgcgctccatcgaggaaatcctcagcttccagcactgccggaagctggtcacgctcaggctgtggcacaaccagatcgcctacgtccctgagcacgtgcggaagctcaggagcctggagcagctctacctcagctacaacaagctggagaccctgccctcccagctcggcctgtgctcaggcctccgtctgctggatgtgtcccacaatgggctacactccctgccacccgaggtgggcctcctgcagaacctacagcacctggccctctcctacaatgccctggaggccctgcccgaagagctcttcttctgccgcaagctgcggacgttgcttctgggcgacaaccaactgagccagctctcgccccacgtgggtgccctcagagccctcagccgcctggagctcaaaggcaaccgcttagaggcgctgccagaagaacttggcaactgtggggggctcaagaaggcggggctcctggtggaagacacgctttaccagggtctgccggcagaagtgcgggacaagatggaggaggaatgaagctggggtggggccgttttaggtagagccttaaaaatgcttctgccctggaatctcaaccattatcttccaagataggaagccaagtgggtctaggccaggagatgggggggggcgggggcagctgtgtcatctttctggggcccaggaggatctgggctggtttgtctggggagacagacaggatgttgtggaggtggggtggaacctggtatggagggattaactcagtcatggcattctccgaccaaaaccacacctgtgtctctggcaggctggctggccttgctcccatccctagaactgctgcctctccctggatattccagctcaattagtgccacatatgggggaaacgacacatcccagtgggatttccaacactccccctccccatgcaacaaagcaacttacttctggagttctctcccaaggagaggacacagacacagttgtttgctgtgttatatgttagctccgaacaatggttctcatttggctaagcatcaaaatcacctagggagccggtgcaaaacaaaatatcccagtcccctcccctgaaacactgactcaggaggtttggttgggggccaggagtctgttcctaaatattccaggtagttctggtgcaggtaagtggccctgagacagtatgttgggaaatgctgacgtaaaggtatcagggccgggcgctgtggctcatgactataatcccagctgtttgagaggccaatgcaggaggatggttgagctcaggagttcgagatcagcctgggtaacatagcgagaccccacctctgccaaaaaaaaaaaaaatagggtatccaaatatctagattctgatcccttttgaggtcctagaccctttgagaaactgatgaagccaggcacctccttcctcaggaaaatgctggtgtacaaatacacacaaagctcttcaggcagctgatagatttcccccagagagctattcaaggacttcctaaggtgggtggactgcagggttaggacacctgctatagaggtgacatttttccaaggacaagcagggactttggtcttgactgttctctgggtgcttaataaataatactaattatgcaaggagtctgagtt

SEQ ID NO: 341462 - DNA, 302 bp, Homo sapiens
ggtacagccagaaagcaccccaagggtgggcgccctcccatcctgcctgcaggcggtggcttgctggcatctgtgggaactgcccgtgtccatgtgctgagaggaatgacctgcaggaatgggtccctctgcacccgcttccaggactgcccgccagcgtgcaattccccatctgctgctaagaccttcctggatcaatatccctcatctgggtcatccagggaagcttttgcacgtggtttcacacttctcaattccaagccctgaggggctggttattctcctttctccccaccccaccc

SEQ ID NO: 341463 - DNA, 390 bp, Homo sapiens
tttcaaaacccaaacaaattttgtaacatttgttgtcaaaatcttacctgaactgacataaggcaatgtgtaatctttatttaccccacttagtgtgaatatccatgttttgccacagaagtattaatgtttttgattacagatgccaccccagcccccactggaggtgttatttaatagtaaatgtatttaatacattgtcctatgtaaaactgaaaaaatcctgaattcagaaacacatctgacttaaactgcttcaaattaacgatgcaggcctatactgatactattatcattctcatttcagaaataggtcataccaggcatgcctctctgttagtatattttttcactcaacaatatatctaggacatctttctttctttcttt

SEQ ID NO: 341464 - DNA, 1655 bp, Homo sapiens
taccttataaaatacatgcaaaaaactggttttagaaagcgttccctaaaattagtgtgtacggaaacttcaggtatacttctgctttcctccgcaaaaccacccctttttaaaaatcgaaagtgaaattagtttttttttctgttagtgactaatcattggagacaaccatgtttagtatttgagcattggttaaatgctaaagaaaaatcgccgttaaagcagttttctttttcactgtctttttcttttcgcggggaacccagctgttcctgcgagggccacctcctcaggaagaccccgcagctctcccgcggcgcttctgcaggaggcagcgacagtttcgagaacccgggccttcccctcccagtgcctccgggggttccggcgtttcaggcgctgctgttttccgggaagggcaggcgcgctgggccttggggagctgcgctcggcgggcggacgcgggggatcatggaagctgataaagatgacacacaacaaattcttaaggagcattcgccagatgaatttataaaagatgaacaaaataagggactaattgatgaaattacaaagaaaaatattcaactaaagaaggagatccaaaagcttgaaacggagttacaagaggctaccaaagaattccagattaaagaggatattcctgaaacaaagatgaaattcttatcagttgaaactcctgagaatgacagccagttgtcaaatatctcctgttcgtttcaagtgagctcgaaagttccttatgagatacaaaaaggacaagcacttatcacctttgaaaaagaagaagttgctcaaaatgtggtaagcatgagtaaacatcatgtacagataaaagatgtaaatctggaggttacggccaagccagttccattaaattcaggagtcagattccaggtttatgtagaagtttctaaaatgaaaatcaatgttactgaaattcctgacacattgcgtgaagatcaaatgagagacaaactagagctgagcttttcaaagtcccgaaatggaggcggagaggtggaccgcgtggactatgacagacagtccgggagtgcagtcatcacgtttgtggagattggagtggctgacaagattttgaaaaagaaagaataccctctttatataaatcaaacctgccatagagttactgtttctccatacacagaaatacacttgaaaaagtatcagatattttcaggaacatctaagaggacagtgcttctgacaggaatggaaggcattcaaatggatgaagaaattgtggaggatttaattaacattcactttcaacgggcaaagaatggaggtggagaagtagatgtggtcaagtgttctctaggtcaacctcacatagcatactttgaagaatagacttaacagaatcatgaaaactatagctttttaacccggattactgtaaatgtttgacaaaaatgaatatgcttttccttaaaaaatgaaaactttaatttttaccatccatttatgtttagatacaaaacttatttccatgtttctgaatcttctttgtttcaaatggtgctgcatgttttcaactacaataagtgcactgtaataaaaagttttgtttataaaaaaaaaaaaccaaaccaacaaaaagcacaaaacac

SEQ ID NO: 341465 - DNA, 1618 bp, Homo sapiens
taccttataaaatacatgcaaaaaactggttttagaaagcgttccctaaaattagtgtgtacggaaacttcaggtatacttctgctttcctccgcaaaaccacccctttttaaaaatcgaaagtgaaattagtttttttttctgttagtgactaatcattggagacaaccatgtttagtatttgagcattggttaaatgctaaagaaaaatcgccgttaaagcagttttctttttcactgtctttttcttttcgcggggaacccagctgttcctgcgagggccacctcctcaggaagaccccgcagctctcccgcggcgcttctgcaggaggcagcgacagtttcgagaacccgggccttcccctcccagtgcctccgggggttccggcgtttcaggcgctgctgttttccgggaagggcaggcgcgctgggccttggggagctgcgctcggcgggcggacgcgggggatcatggaagctgataaagatgacacacaacaaattcttaaggagcattcgccagatgaatttataaaagatgaacaaaataagggactaattgatgaaattacaaagaaaaatattcaactaaagaaggagatccaaaagcttgaaacggagttacaagaggctaccaaagaattccagattaaagaggatattcctgaaacaaagatgaaattcttatcagttgaaactcctgagaatgacagccagttgtcaaatatctcctgttcgtttcaagtgagctcgaaagttccttatgagatacaaaaaggacaagcacttatcacctttgaaaaagaagaagttgctcaaaatgtggtaagcatgagtaaacatcatgtacagataaaagatgtaaatctggaggttacggccaagccagttccattaaattcaggagtcagattccaggtttatgtagaagtttctaaaatgaaaatcaatgttactgaaattcctgacacattgcgtgaagatcaaatgagagacaaactagagctgagcttttcaaagtcccgaaatggaggcggagaggtggaccgcgtggactatgacagacagtccgggagtgcagtcatcacgtttgtggagattggagtggctgacaagattttgaaaaagaaagaataccctctttatataaatcaaacctgccatagagttactgtttctccatacacagaaatacacttgaaaaagtatcagatattttcaggaacatctaagaggacagtgcttctgacaggaatggaaggcattcaaatggatgaagaaattgtggaggatttaattaacattcactttcaacgggcaaagaatggaggtggagaagtagatgtggtcaagtgttctctaggtcaacctcacatagcatactttgaagaatagacttaacagaatcatgaaaactatagctttttaacccggattactgtaaatgtttgacaaaaatgaatatgcttttccttaaaaaatgaaaactttaatttttaccatccatttatgtttagatacaaaacttatttccatgtttctgaatcttctttgtttcaaatggtgctgcatgttttcaactacaataagtgcactgtaataaaaagttttgtttata

SEQ ID NO: 341466 - DNA, 669 bp, Homo sapiens
cagcctggagagcctcagtccctgtagccccctgccctggcacagctgcatgcacttcgtgggcagcgctgtcccgaaatggaggcggagaggtggaccgcgtggactatgacagacagtccgggagtgcagtcatcacgtttgtggagattggagtggctgacaagattttgaaaaagaaagaataccctctttatataaatcaaacctgccatagagttactgtttctccatacacagaaatacacttgaaaaagtatcagatattttcaggaacatctaagaggacagtgcttctgacaggaatggaaggcattcaaatggatgaagaaattgtggaggatttaattaacattcactttcaacgggcaaagaatggaggtggagaagtagatgtggtcaagtgttctctaggtcaacctcacatagcatactttgaagaatagacttaacagaatcatgaaaactatagctttttaacccggattactgtaaatgtttgacaaaaatgaatatgcttttccttaaaaaatgaaaactttaatttttaccatccatttatgtttagatacaaaacttatttccatgtttctgaatcttctttgtttcaaatggtgctgcatgttttcaactacaataagtgcactgtaataaaaagttttgtttata

SEQ ID NO: 341467 - DNA, 117 bp, Homo sapiens
ttgccaaacaaggataggctgtgcccatctcaggaactcagcttgaatgttgggttaattttagccttacacagcatcagcatggctcttcgacccttctccctcacctctttcatc

SEQ ID NO: 341468 - DNA, 488 bp, Homo sapiens
gctggtcttgaactcctgacgtcaggtgatccccccaccttggccttccaaagtgctgggattacaggcgtgagccactgtgcccagaggagttaatttttttatatagtgagagatacggatccagtttcattcttctacatgtggctaaccagttttcccagaatgatttattgaataggaagctttgtcaaagatcagttggttgcaagtatttgtctttatttctggattctctattctattccattgatatctaagtttataccagtaccatgctgtttttgttactatagccttgaagtataacttgaaatcagattttttaaaaatttttttatttttatttatttatttatttttgcttagaattgctttggctatccagctttttttttttttggttccatatgaatttaggatttttttttctaattctgtaaaaaacgatattggtatcttgataataattgaattgaatctacaga

SEQ ID NO: 341469 - DNA, 341 bp, Homo sapiens
tttctacatcaacaccgacaatgtcaagcagagcctgtccaagaaacgcaaggccctggccacttccgtgctggacatccttgccaagaacctgcataaggaggtggatagctcctcagcaacccagggagcccaccaggagcacccctcttggaaagcgccgcaggatgttgtggtggaggggacagttacctgtcgggagatgctggagaccaaggaggaagagcaggtgagggaaggcaagggagcagcatgctgccctccccagcgcctcctcccactgccagatctgcgaggagttccgcagcatcagccgcaagatctatgagaagcccaacagc

SEQ ID NO: 341470 - DNA, 361 bp, Homo sapiens
taaattttttgtagatggggtctcactatgtcatccaggctggtcttgaattcctggcctcaagcaatcctcctgcattggcctcccaaagtgctgggattacaggtgtaagccaccatcgccagcctcattttaaaagaagtgtcatattttaaaagaaatattgacagccttcttttttcacatctgtgttccaatacttatttgatatagtatgtaagtggacatattctcaacacaagtatctatacaaaggtgactggaagagatgatgtagacataaaattattggattgagcttctaattgttgtttataaatctaaaaataataagtgttttgcactttatggaggaaaaaag

SEQ ID NO: 341471 - DNA, 411 bp, Homo sapiens
agtgaggtttcgtctcaaaaaaaaaaaaaaaagaaaagaaagttttcaattttgaaatttctactgctatcagctttttatactgaatattgtttatttttgccttctcttctttataaatcagtttatgtcattattactgttatatacaatatatgttttacataagacaataaatgtcttttctctctagttgttttgtctccggtgttccatgatagcaccatgatataataagaggcgggataggccaggcatggtgcctcatacctgtataatccaggactttgggaggctgaggcaggcgtgagccaccgcacctggccttatctctgctgtttaacccattcactgaatttttaattttaaggaccatatttttcatttctaaacacttgattcttttcccaa

SEQ ID NO: 341472 - DNA, 82 bp, Homo sapiens
gctgtgaatatgttttatccagtcctggaaattctattttcttggccatatgacccagtcctaggcaatgggtggggagctt

SEQ ID NO: 341473 - DNA, 540 bp, Homo sapiens
ctaatcgccctctcaggtgaaactgacctttcctcctcacctcttctccttcagtaactctccccagcccaaagctgactccttggtaggcaaaggctggtcagtcttccttccttattcactgaataagccatgcccctttgcaggcctccagtctaatttgtgattctaactaatgaggtggggtctgaggaacttgaagaggccctttctattttattttttattcttggtttccaatagttggagaaacaggatctggccaactttctctagacaaaggctgtatgctaggtttttcattttcttagctgaaatgattgtggcaaatcacttaaacagatacaaaaaggaggtctctgtggacggacacctcatagactaaaagatcagccacagttcatcattttagacatatattgctagagccaaaataagtatcaggaaggtttcaagtttctctggaaaagaaaatcttttggtaacaattctcaaatcgaccttgatctctcaacttccagacactactctatgatcagt

SEQ ID NO: 341474 - DNA, 712 bp, Homo sapiens
  misc_feature (193)..(193): n is a, c, g, or t
ttgtatgggcacagaaattaaaacaggcaagtaaagtatttcttcggaaaacattttatcaaaccaaatgttaaaaagactttccttttgtaaaactggattagagaacgacttttcagtgggttatctctaggatgatcagtagttcagcacttaaaaactgcagaggaaactgaaagttatgttccagatnactttccgttgtttaccaaattttcttagatttggtcatcatcaggaagcatttgtaaaaataaaaatctccacaaatttctgtgcccatttcaatgaaatgggcacagaaattcattctctgctttcatctctcaaagggatccaattcataactcagagctgcaattaaaaattcacgtcttccattttctgacttgttctcattctctgactgtttcagagtctccccacacatcacatgaacccaaatcacattctcaatttctgtgcccatttcattgaaatgggcacagaaattagtttttaaatttcctgattctcgatcttccttgttggtggaagctttaaactggaacgtgaacttttttgctctgtgcttactttataaaggtgctgctgtgtgaaatggagaaagttacggcgtgtaggggagtgagactcaagtttatagtctggcgccatcagctcacaggtgtaggacttgggacacggtatttatcactagatttctgtgccc

SEQ ID NO: 341475 - DNA, 2418 bp, Homo sapiens
ctctatgctattcaaatcggcggcggggccaacggttgtgccgagactcgccactgccgcggccgctgggcctgagtgtcgccttcgccgccatggacgccaccgggcgctgacagacctatggagagtcagggtgtgcctcccgggccttatcgggccaccaagctgtggaatgaagttaccacatcttttcgagcaggaatgcctctaagaaaacacagacaacactttaaaaaatatggcaattgtttcacagcaggagaagcagtggattggctttatgacctattaagaaataatagcaattttggtcctgaagttacaaggcaacagactatccaactgttgaggaaatttcttaagaatcatgtaattgaagatatcaaagggaggtggggatcagaaaatgttgatgataacaaccagctcttcagatttcctgcaacttcgccacttaaaactctaccacgaaggtatccagaattgagaaaaaacaacatagagaacttttccaaagataaagatagcatttttaaattacgaaacttatctcgtagaactcctaaaaggcatggattacatttatctcaggaaaatggcgagaaaataaagcatgaaataatcaatgaagatcaagaaaatgcaattgataatagagaactaagccaggaagatgttgaagaagtttggagatatgttattctgatctacctgcaaaccattttaggtgtgccatccctagaagaagtcataaatccaaaacaagtaattccccaatatataatgtacaacatggccaatacaagtaaacgtggagtagttatactacaaaacaaatcagatgacctccctcactgggtattatctgccatgaagtgcctagcaaattggccaagaagcaatgatatgaataatccaacttatgttggatttgaacgagatgtattcagaacaatcgcagattattttctagatctccctgaacctctacttacttttgaatattacgaattatttgtaaacattttggttgtttgtggctacatcacagtttcagatagatccagtgggatacataaaattcaagatgatccacagtcttcaaaattccttcacttaaacaatttgaattccttcaaatcaactgagtgccttcttctcagtctgcttcatagagaaaaaaacaaagaagaatcagattctactgagagactacagataagcaatccaggatttcaagaaagatgtgctaagaaaatgcagctagttaatttaagaaacagaagagtgagtgctaatgacataatgggaggaagttgtcataatttaatagggttaagtaatatgcatgatctatcctctaacagcaaaccaaggtgctgttctttggaaggaattgtagatgtgccagggaattcaagtaaagaggcatccagtgtctttcatcaatcttttccgaacatagaaggacaaaataataaactgtttttagagtctaagcccaaacaggaattcctgttgaatcttcattcagaggaaaatattcaaaagccattcagtgctggttttaagagaacctctactttgactgttcaagaccaagaggagttgtgtaatgggaaatgcaagtcaaaacagctttgtaggtctcagagtttgcttttaagaagtagtacaagaaggaatagttatatcaatacaccagtggctgaaattatcatgaaaccaaatgttggacaaggcagcacaagtgtgcaaacagctatggaaagtgaactcggagagtctagtgccacaatcaataaaagactctgcaaaagtacaatagaactttcagaaaattctttacttccagcttcttctatgttgactggcacacaaagcttgctgcaacctcatttagagagggttgccatcgatgctctacagttatgttgtttgttacttcccccaccaaatcgtagaaagcttcaacttttaatgcgtatgatttcccgaatgagtcaaaatgttgatatgcccaaacttcatgatgcaatgggtacgaggtcactgatgatacataccttttctcgatgtgtgttatgctgtgctgaagaagtggatcttgatgagcttcttgctggaagattagtttctttcttaatggatcatcatcaggaaattcttcaagtaccctcttacttacagactgcagtggaaaaacatcttgactacttaaaaaagggacatattgaaaatcctggagatggactatttgctcctttgccaacttactcatactgtaagcagattagtgctcaggagtttgatgagcaaaaagtttctacctctcaagctgcaattgcagaacttttagaaaatattattaaaaacaggagtttacctctaaaggagaaaagaaaaaaactaaaacag

SEQ ID NO: 341476 - DNA, 1615 bp, Homo sapiens
agcctgcatgttttagagttttaattgaagtttaattaccaaggcatgactgaccaaatcattggtcactgttgtcaattgaactcaatctctagcccctttctcctcccacaaggttgtagttggtgatgaaaattcaaaccatggccggccctcagttaccttagcatgaactcagatacgctgaaataggcttgttatgagtaactaaagacttctatcattcaggaaatttcaaggattttaggagctccataccaggtaccaaggacaaagatcaaatatatgtattttattataccacaattatcttatatttatgaggtttctagtacttgcagactgagaacagattttttaaatgtattctggctcaatccatttaattaggctgttgaaataattttttaaagttatattacaaatgggaaaaccactcatctgtcttgcacgtttgtaaccgaatgttgcatgtgtcctatttaagtggcttctgaattaagcaactactgtgtatactatactaacaatatatactatagtaatgctttattttttaactttactattgtttttgttttatttttgtccactgtcatacagttgcatcttaatttttgtttcatttcctggtagttgtttgtggctacatcacagtttcagatagatccagtgggatacataaaattcaagatgatccacagtcttcaaaattccttcacttaaacaatttgaattccttcaaatcaactgagtgccttcttctcagtctgatgatacataccttttctcgatgtgtgttatgctgtgctgaagaagtggatcttgatgagcttcttgctggaagattagtttctttcttaatggatcatcatcaggaaattcttcaagtaccctcttacttacagactgcagtggaaaaacatcttgactacttaaaaaagggacatgtaagtattgtgagtcttaaaattctctgcaatagtcagttgcaagtggcaaactcatctcaaaatagcttaatcaaaaagggagactttatcagctcccataaacaacctctaaaagtcaggaatgtagacagaatctgggactcaaatagctatatgactctttccatccctccatctcttatttctgtgttgatcctgtgtttgacaatggctccttcacatgatgaggaatgtggctagttgaagttcatgagttagagccttacatttgcaattcaaaggaaaaagagccattcctccgtctccaatttaaaagctctggatgtagactcttagcatagttgaggttaaatatgcatcgtttaggttgttaagagtgagtaggatggagatagggccttactctgattggttctacacaaaggagaatttattcttcacaaaaggtgaaggtagaggggtaaaatgggaaggaactattaaaagaaggagagaaggaatactgagcagccaaaataacagacatctactgtattctgtctttggctgcccaacacatgtttatgtttttcccatacataccattctaatattgccctggcttataattataactatctcctagaatttctttctcttatcagaagatgttagaagctctg

SEQ ID NO: 341477 - DNA, 4344 bp, Homo sapiens
ctctatgctattcaaatcggcggcggggccaacggttgtgccgagactcgccactgccgcggccgctgggcctgagtgtcgccttcgccgccatggacgccaccgggcgctgacagacctatggagagtcagggtgtgcctcccgggccttatcgggccaccaagctgtggaatgaagttaccacatcttttcgagcaggaatgcctctaagaaaacacagacaacactttaaaaaatatggcaattgtttcacagcaggagaagcagtggattggctttatgacctattaagaaataatagcaattttggtcctgaagttacaaggcaacagactatccaactgttgaggaaatttcttaagaatcatgtaattgaagatatcaaagggaggtggggatcagaaaatgttgatgataacaaccagctcttcagatttcctgcaacttcgccacttaaaactctaccacgaaggtatccagaattgagaaaaaacaacatagagaacttttccaaagataaagatagcatttttaaattacgaaacttatctcgtagaactcctaaaaggcatggattacatttatctcaggaaaatggcgagaaaataaagcatgaaataatcaatgaagatcaagaaaatgcaattgataatagagaactaagccaggaagatgttgaagaagtttggagatatgttattctgatctacctgcaaaccattttaggtgtgccatccctagaagaagtcataaatccaaaacaagtaattccccaatatataatgtacaacatggccaatacaagtaaacgtggagtagttatactacaaaacaaatcagatgacctccctcactgggtattatctgccatgaagtgcctagcaaattggccaagaagcaatgatatgaataatccaacttatgttggatttgaacgagatgtattcagaacaatcgcagattattttctagatctccctgaacctctacttacttttgaatattacgaattatttgtaaacattttggttgtttgtggctacatcacagtttcagatagatccagtgggatacataaaattcaagatgatccacagtcttcaaaattccttcacttaaacaatttgaattccttcaaatcaactgagtgccttcttctcagtctgcttcatagagaaaaaaacaaagaagaatcagattctactgagagactacagataagcaatccaggatttcaagaaagatgtgctaagaaaatgcagctagttaatttaagaaacagaagagtgagtgctaatgacataatgggaggaagttgtcataatttaatagggttaagtaatatgcatgatctatcctctaacagcaaaccaaggtgctgttctttggaaggaattgtagatgtgccagggaattcaagtaaagaggcatccagtgtctttcatcaatcttttccgaacatagaaggacaaaataataaactgtttttagagtctaagcccaaacaggaattcctgttgaatcttcattcagaggaaaatattcaaaagccattcagtgctggttttaagagaacctctactttgactgttcaagaccaagaggagttgtgtaatgggaaatgcaagtcaaaacagctttgtaggtctcagagtttgcttttaagaagtagtacaagaaggaatagttatatcaatacaccagtggctgaaattatcatgaaaccaaatgttggacaaggcagcacaagtgtgcaaacagctatggaaagtgaactcggagagtctagtgccacaatcaataaaagactctgcaaaagtacaatagaactttcagaaaattctttacttccagcttcttctatgttgactggcacacaaagtaaggctgttgctttcaatgcatgcaatattaactttgagtgtttactaactctgtgttttgcttacctggcttttcttccttgaagttgcttttttttttcctccaagaggaattatttaaaaagactttagtctgtgacataaccaagatttattctgtttacctaaggaacttattttcttttttgcaatttcatttattctgagtcactttatttgtaataagtgaagaattttaatacttagaaataagttgtaaagaaaataatgagaatcttaccatgctttagaggaacgtaatttctagaaatagttaaaagatgaaatactaagatattattttaccttctttatatagctgtatatactggtagtatgaaagcaactagtgtcattgatgattttttgggggggtatttttgtattctaggcttgctgcaacctcatttagagagggttgccatcgatgctctacagttatgttgtttgttacttcccccaccaaatcgtagaaagcttcaacttttaatgcgtatgatttcccgaatgagtcaaaatgttgatatgcccaaacttcatgatgcaatgggtacgaggtcactgatgatacataccttttctcgatgtgtgttatgctgtgctgaagaagtggatcttgatgagcttcttgctggaagattagtttctttcttaatggatcatcatcaggaaattcttcaagtaccctcttacttacagactgcagtggaaaaacatcttgactacttaaaaaagggacatattgaaaatcctggagatggactatttgctcctttgccaacttactcatactgtaagcagattagtgctcaggagtttgatgagcaaaaagtttctacctctcaagctgcaattgcagaacttttagaaaatattattaaaaacaggagtttacctctaaaggagaaaagaaaaaaactaaaacagtttcagaaggaatatcctttgatatatcagaaaagatttccaaccacggagagtgaagcagcactttttggtgacaaacctacaatcaagcaaccaatgctgattttaagaaaaccaaagttccgtagtctaagataactaactgaattaaaaattatgtaatacttgtggaactttgataaatgaagccatatctgagaatgtagctactcaaaaggaagtctgtcattaataaggtatttctaaataaacacattatgtaaggaagtgccaaaatagttatcaatgtgagactcttaggaaactaactagatctcaattgagagcacataacaatagatgataccaaatactttttgtttttaacacagctatccagtaaggctatcatgatgtgtgctaaaattttatttacttgaattttgaaaactgagctgtgttagggattaaactataattctgttcttaaaagaaaatttatctgcaaatgtgcaagttctgagatattagctaatgaattagttgtttggggttacttctttgtttctaagtataagaatgtgaagaatatttgaaaactcaatgaaataattctcagctgccaaatgttgcactcttttatatattctttttccacttttgatctatttatatatatgtatgtgtttttaaaatatgtgtatattttatcagatttggttttgccttaaatattatccccaattgcttcagtcattcatttgttcagtatatatattttgaattctagttttcataatctattagaagatggggatataaaagaagtataaggcaatcatatattcattcaaaagatatttatttagcaactgctatgtgcctttcgttgttccagatatgcagagacaatgataaataaaacatataatctcttccataaggtatttattttttaatcaagggagatacacctatcagatgtttaaaataacaacactacccactgaaatcagggcatatagaatcattcagctaaagagtgacttctatgatgatggaacaggtctctaagctagtggttttcaaactggtacacattagactcacccgaggaattttaaaacagcctatatgcccagggcctaacttacactaattaaatctgaattttggggatgttgtatagggattagtattttttttaatctaggtgattccaatattcagccaactgtgagaatcaatggcctaaatgctttttataaacatttttataagtgtcaagataatggcacattgactttattttttcattggaagaaaatgcctgccaagtataaatgactctcatcttaaaacaaggttcttcaggtttctgcttgattgacttggtacaaacttgaagcaagttgccttctaatttttactccaagattgtttcatatctattccttaagtgtaaagaaatatataatgcatggtttgtaataaaatcttaatgtttaatgactg

SEQ ID NO: 341478 - DNA, 5768 bp, Homo sapiens
ctctatgctattcaaatcggcggcggggccaacggttgtgccgagactcgccactgccgcggccgctgggcctgagtgtcgccttcgccgccatggacgccaccgggcgctgacagacctatggagagtcagggtgtgcctcccgggccttatcgggccaccaagctgtggaatgaagttaccacatcttttcgagcaggaatgcctctaagaaaacacagacaacactttaaaaaatatggcaattgtttcacagcaggagaagcagtggattggctttatgacctattaagaaataatagcaattttggtcctgaagttacaaggcaacagactatccaactgttgaggaaatttcttaagaatcatgtaattgaagatatcaaagggaggtggggatcagaaaatgttgatgataacaaccagctcttcagatttcctgcaacttcgccacttaaaactctaccacgaaggtatccagaattgagaaaaaacaacatagagaacttttccaaagataaagatagcatttttaaattacgaaacttatctcgtagaactcctaaaaggcatggattacatttatctcaggaaaatggcgagaaaataaagcatgaaataatcaatgaagatcaagaaaatgcaattgataatagagaactaagccaggaagatgttgaagaagtttggagatatgttattctgatctacctgcaaaccattttaggtgtgccatccctagaagaagtcataaatccaaaacaagtaattccccaatatataatgtacaacatggccaatacaagtaaacgtggagtagttatactacaaaacaaatcagatgacctccctcactgggtattatctgccatgaagtgcctagcaaattggccaagaagcaatgatatgaataatccaacttatgttggatttgaacgagatgtattcagaacaatcgcagattattttctagatctccctgaacctctacttacttttgaatattacgaattatttgtaaacattttggttgtttgtggctacatcacagtttcagatagatccagtgggatacataaaattcaagatgatccacagtcttcaaaattccttcacttaaacaatttgaattccttcaaatcaactgagtgccttcttctcagtctgcttcatagagaaaaaaacaaagaagaatcagattctactgagagactacagataagcaatccaggatttcaagaaagatgtgctaagaaaatgcagctagttaatttaagaaacagaagagtgagtgctaatgacataatgggaggaagttgtcataatttaatagggttaagtaatatgcatgatctatcctctaacagcaaaccaaggtgctgttctttggaaggaattgtagatgtgccagggaattcaagtaaagaggcatccagtgtctttcatcaatcttttccgaacatagaaggacaaaataataaactgtttttagagtctaagcccaaacaggaattcctgttgaatcttcattcagaggaaaatattcaaaagccattcagtgctggttttaagagaacctctactttgactgttcaagaccaagaggagttgtgtaatgggaaatgcaagtcaaaacagctttgtaggtctcagagtttgcttttaagaagtagtacaagaaggaatagttatatcaatacaccagtggctgaaattatcatgaaaccaaatgttggacaaggcagcacaagtgtgcaaacagctatggaaagtgaactcggagagtctagtgccacaatcaataaaagactctgcaaaagtacaatagaactttcagaaaattctttacttccagcttcttctatgttgactggcacacaaagtaaggctgttgctttcaatgcatgcaatattaactttgagtgtttactaactctgtgttttgcttacctggcttttcttccttgaagttgcttttttttttcctccaagaggaattatttaaaaagactttagtctgtgacataaccaagatttattctgtttacctaaggaacttattttcttttttgcaatttcatttattctgagtcactttatttgtaataagtgaagaattttaatacttagaaataagttgtaaagaaaataatgagaatcttaccatgctttagaggaacgtaatttctagaaatagttaaaagatgaaatactaagatattattttaccttctttatatagctgtatatactggtagtatgaaagcaactagtgtcattgatgattttttgggggggtatttttgtattctaggcttgctgcaacctcatttagagagggttgccatcgatgctctacagttatgttgtttgttacttcccccaccaaatcgtagaaagcttcaacttttaatgcgtatgatttcccgaatgagtcaaaatgttgatatgcccaaacttcatgatgcaatgggtacgaggtcactgatgatacataccttttctcgatgtgtgttatgctgtgctgaagaagtggatcttgatgagcttcttgctggaagattagtttctttcttaatggatcatcatcaggaaattcttcaagtaccctcttacttacagactgcagtggaaaaacatcttgactacttaaaaaagggacatattgaaaatcctggagatggactatttgctcctttgccaacttactcatactgtaagcagattagtgctcaggagtttgatgagcaaaaagtttctacctctcaagctgcaattgcagaacttttagaaaatattattaaaaacaggagtttacctctaaaggagaaaagaaaaaaactaaaacagtttcagaaggaatatcctttgatatatcagaaaagatttccaaccacggagagtgaagcagcactttttggtgacaaacctacaatcaagcaaccaatgctgattttaagaaaaccaaagttccgtagtctaagataactaactgaattaaaaattatgtaatacttgtggaactttgataaatgaagccatatctgagaatgtagctactcaaaaggaagtctgtcattaataaggtatttctaaataaacacattatgtaaggaagtgccaaaatagttatcaatgtgagactcttaggaaactaactagatctcaattgagagcacataacaatagatgataccaaatactttttgtttttaacacagctatccagtaaggctatcatgatgtgtgctaaaattttatttacttgaattttgaaaactgagctgtgttagggattaaactataattctgttcttaaaagaaaatttatctgcaaatgtgcaagttctgagatattagctaatgaattagttgtttggggttacttctttgtttctaagtataagaatgtgaagaatatttgaaaactcaatgaaataattctcagctgccaaatgttgcactcttttatatattctttttccacttttgatctatttatatatatgtatgtgtttttaaaatatgtgtatattttatcagatttggttttgccttaaatattatccccaattgcttcagtcattcatttgttcagtatatatattttgaattctagttttcataatctattagaagatggggatataaaagaagtataaggcaatcatatattcattcaaaagatatttatttagcaactgctatgtgcctttcgttgttccagatatgcagagacaatgataaataaaacatataatctcttccataaggtatttattttttaatcaagggagatacacctatcagatgtttaaaataacaacactacccactgaaatcagggcatatagaatcattcagctaaagagtgacttctatgatgatggaacaggtctctaagctagtggttttcaaactggtacacattagactcacccgaggaattttaaaacagcctatatgcccagggcctaacttacactaattaaatctgaattttggggatgttgtatagggattagtattttttttaatctaggtgattccaatattcagccaactgtgagaatcaatggcctaaatgctttttataaacatttttataagtgtcaagataatggcacattgactttattttttcattggaagaaaatgcctgccaagtataaatgactctcatcttaaaacaaggttcttcaggtttctgcttgattgacttggtacaaacttgaagcaagttgccttctaatttttactccaagattgtttcatatctattccttaagtgtaaagaaatatataatgcatggtttgtaataaaatcttaatgtttaatgactgttctcatttctcaatgtaatttcatactgtttctctataaaatgatagtattccatttaacattactgatttttattaaaaacctggacagaaaattataaattataaatatgactttatcctggctataaaattattgaaccaaaatgaattctttctaaggcatttgaatactaaaacgtttattgtttatagatatgtaaaatgtggattatgttgcaaattgagattaaaattatttggggttttgtaacaatataattttgcttttgtattatagacaaatatataaataataaaggcaggcaactttcatttgcactaatgtacatgcaattgagattacaaaatacatggtacaatgctttaataacaaactctgccagtcaggtttgaatcctactgtgctattaactagctagtaaactcagacaagttacttaacttctctaagccccagttttgttatctataaaatgaatattataatagtacctctttttaggattgcgaggattaagcaggataatgcatgtaaagtgttagcacagtgtctcacatagaataagcactctataaatattttactagaatcacctaggattatagcactggaagagatcttagcaaaaatgtggtcctttctgttgctttggacagacatgaaccaaaacaaaattacggacaattgatgagccttattaactatcttttcattatgagacaaaggttctgattatgcctactggttgaaattttttaatctagtcaagaaggaaaatttgatgaggaaggaaggaatggatatcttcagaagggcttcgcctaagctggaacatggatagattccattctaacataaagatctttaagttcaaatatagatgagttgactggtagatttggtggtagttgctttctcgggatataagaagcaaaatcaactgctacaagtaaagaggggatggggaaggtgttgcacatttaaagagagaaagtgtgaaaaagcctaattgtgggaatgcacaggtttcaccagatcagatgatgtctggttattctgtaaattatagttcttatcccagaaattactgcctccaccatccctaatatcttctaattggtatcatataatgacccactcttcttatgttatccaaacagttatgtggcatttagtaatggaatgtacatggaatttcccactgacttacctttctgtccttgggaagcttaaactctgaatcttctcatctgtaaaatgtgaattaaagtatctacctaactgagttgtgattgtagtgaaagaaaggcaatatatttaaatcttgaatttagcaagcccacgctcgatttttatgtcctttcctcttgccttgtattgagtttaagatctctactgattaaaactcttttgctatcaa

SEQ ID NO: 341479 - DNA, 3329 bp, Homo sapiens
ctctatgctattcaaatcggcggcggggccaacggttgtgccgagactcgccactgccgcggccgctgggcctgagtgtcgccttcgccgccatggacgccaccgggcgctgacagacctatggagagtcagggtgtgcctcccgggccttatcgggccaccaagctgtggaatgaagttaccacatcttttcgagcaggaatgcctctaagaaaacacagacaacactttaaaaaatatggcaattgtttcacagcaggagaagcagtggattggctttatgacctattaagaaataatagcaattttggtcctgaagttacaaggcaacagactatccaactgttgaggaaatttcttaagaatcatgtaattgaagatatcaaagggaggtggggatcagaaaatgttgatgataacaaccagctcttcagatttcctgcaacttcgccacttaaaactctaccacgaaggtatccagaattgagaaaaaacaacatagagaacttttccaaagataaagatagcatttttaaattacgaaacttatctcgtagaactcctaaaaggcatggattacatttatctcaggaaaatggcgagaaaataaagcatgaaataatcaatgaagatcaagaaaatgcaattgataatagagaactaagccaggaagatgttgaagaagtttggagatatgttattctgatctacctgcaaaccattttaggtgtgccatccctagaagaagtcataaatccaaaacaagtaattccccaatatataatgtacaacatggccaatacaagtaaacgtggagtagttatactacaaaacaaatcagatgacctccctcactgggtattatctgccatgaagtgcctagcaaattggccaagaagcaatgatatgaataatccaacttatgttggatttgaacgagatgtattcagaacaatcgcagattattttctagatctccctgaacctctacttacttttgaatattacgaattatttgtaaacattttggttgtttgtggctacatcacagtttcagatagatccagtgggatacataaaattcaagatgatccacagtcttcaaaattccttcacttaaacaatttgaattccttcaaatcaactgagtgccttcttctcagtctgcttcatagagaaaaaaacaaagaagaatcagattctactgagagactacagataagcaatccaggatttcaagaaagatgtgctaagaaaatgcagctagttaatttaagaaacagaagagtgagtgctaatgacataatgggaggaagttgtcataatttaatagggttaagtaatatgcatgatctatcctctaacagcaaaccaaggtgctgttctttggaaggaattgtagatgtgccagggaattcaagtaaagaggcatccagtgtctttcatcaatcttttccgaacatagaaggacaaaataataaactgtttttagagtctaagcccaaacaggaattcctgttgaatcttcattcagaggaaaatattcaaaagccattcagtgctggttttaagagaacctctactttgactgttcaagaccaagaggagttgtgtaatgggaaatgcaagtcaaaacagctttgtaggtctcagagtttgcttttaagaagtagtacaagaaggaatagttatatcaatacaccagtggctgaaattatcatgaaaccaaatgttggacaaggcagcacaagtgtgcaaacagctatggaaagtgaactcggagagtctagtgccacaatcaataaaagactctgcaaaagtacaatagaactttcagaaaattctttacttccagcttcttctatgttgactggcacacaaagtaaggctgttgctttcaatgcatgcaatattaactttgagtgtttactaactctgtgttttgcttacctggcttttcttccttgaagttgcttttttttttcctccaagaggaattatttaaaaagactttagtctgtgacataaccaagatttattctgtttacctaaggaacttattttcttttttgcaatttcatttattctgagtcactttatttgtaataagtgaagaattttaatacttagaaataagttgtaaagaaaataatgagaatcttaccatgctttagaggaacgtaatttctagaaatagttaaaagatgaaatactaagatattattttaccttctttatatagctgtatatactggtagtatgaaagcaactagtgtcattgatgattttttgggggggtatttttgtattctaggcttgctgcaacctcatttagagagggttgccatcgatgctctacagttatgttgtttgttacttcccccaccaaatcgtagaaagcttcaacttttaatgcgtatgatttcccgaatgagtcaaaatgttgatatgcccaaacttcatgatgcaatgggtacgaggtcactgatgatacataccttttctcgatgtgtgttatgctgtgctgaagaagtggatcttgatgagcttcttgctggaagattagtttctttcttaatggatcatcatcaggaaattcttcaagtaccctcttacttacagactgcagtggaaaaacatcttgactacttaaaaaagggacatgtaagtattgtgagtcttaaaattctctgcaatagtcagttgcaagtggcaaactcatctcaaaatagcttaatcaaaaagggagactttatcagctcccataaacaacctctaaaagtcaggaatgtagacagaatctgggactcaaatagctatatgactctttccatccctccatctcttatttctgtgttgatcctgtgtttgacaatggctccttcacatgatgaggaatgtggctagttgaagttcatgagttagagccttacatttgcaattcaaaggaaaaagagccattcctccgtctccaatttaaaagctctggatgtagactcttagcatagttgaggttaaatatgcatcgtttaggttgttaagagtgagtaggatggagatagggccttactctgattggttctacacaaaggagaatttattcttcacaaaaggtgaaggtagaggggtaaaatgggaaggaactattaaaagaaggagagaaggaatactgagcagccaaaataacagacatctactgtattctgtctttggctgcccaacacatgtttatgtttttcccatacataccattctaatattgccctggcttataattataactatctcctagaatttctttctcttatcagaagatgttagaagctctg

SEQ ID NO: 341480 - DNA, 4054 bp, Homo sapiens
agcctgcatgttttagagttttaattgaagtttaattaccaaggcatgactgaccaaatcattggtcactgttgtcaattgaactcaatctctagcccctttctcctcccacaaggttgtagttggtgatgaaaattcaaaccatggccggccctcagttaccttagcatgaactcagatacgctgaaataggcttgttatgagtaactaaagacttctatcattcaggaaatttcaaggattttaggagctccataccaggtaccaaggacaaagatcaaatatatgtattttattataccacaattatcttatatttatgaggtttctagtacttgcagactgagaacagattttttaaatgtattctggctcaatccatttaattaggctgttgaaataattttttaaagttatattacaaatgggaaaaccactcatctgtcttgcacgtttgtaaccgaatgttgcatgtgtcctatttaagtggcttctgaattaagcaactactgtgtatactatactaacaatatatactatagtaatgctttattttttaactttactattgtttttgttttatttttgtccactgtcatacagttgcatcttaatttttgtttcatttcctggtagttgtttgtggctacatcacagtttcagatagatccagtgggatacataaaattcaagatgatccacagtcttcaaaattccttcacttaaacaatttgaattccttcaaatcaactgagtgccttcttctcagtctgatgatacataccttttctcgatgtgtgttatgctgtgctgaagaagtggatcttgatgagcttcttgctggaagattagtttctttcttaatggatcatcatcaggaaattcttcaagtaccctcttacttacagactgcagtggaaaaacatcttgactacttaaaaaagggacatattgaaaatcctggagatggactatttgctcctttgccaacttactcatactgtaagcagattagtgctcaggagtttgatgagcaaaaagtttctacctctcaagctgcaattgcagaacttttagaaaatattattaaaaacaggagtttacctctaaaggagaaaagaaaaaaactaaaacagtttcagaaggaatatcctttgatatatcagaaaagatttccaaccacggagagtgaagcagcactttttggtgacaaacctacaatcaagcaaccaatgctgattttaagaaaaccaaagttccgtagtctaagataactaactgaattaaaaattatgtaatacttgtggaactttgataaatgaagccatatctgagaatgtagctactcaaaaggaagtctgtcattaataaggtatttctaaataaacacattatgtaaggaagtgccaaaatagttatcaatgtgagactcttaggaaactaactagatctcaattgagagcacataacaatagatgataccaaatactttttgtttttaacacagctatccagtaaggctatcatgatgtgtgctaaaattttatttacttgaattttgaaaactgagctgtgttagggattaaactataattctgttcttaaaagaaaatttatctgcaaatgtgcaagttctgagatattagctaatgaattagttgtttggggttacttctttgtttctaagtataagaatgtgaagaatatttgaaaactcaatgaaataattctcagctgccaaatgttgcactcttttatatattctttttccacttttgatctatttatatatatgtatgtgtttttaaaatatgtgtatattttatcagatttggttttgccttaaatattatccccaattgcttcagtcattcatttgttcagtatatatattttgaattctagttttcataatctattagaagatggggatataaaagaagtataaggcaatcatatattcattcaaaagatatttatttagcaactgctatgtgcctttcgttgttccagatatgcagagacaatgataaataaaacatataatctcttccataaggtatttattttttaatcaagggagatacacctatcagatgtttaaaataacaacactacccactgaaatcagggcatatagaatcattcagctaaagagtgacttctatgatgatggaacaggtctctaagctagtggttttcaaactggtacacattagactcacccgaggaattttaaaacagcctatatgcccagggcctaacttacactaattaaatctgaattttggggatgttgtatagggattagtattttttttaatctaggtgattccaatattcagccaactgtgagaatcaatggcctaaatgctttttataaacatttttataagtgtcaagataatggcacattgactttattttttcattggaagaaaatgcctgccaagtataaatgactctcatcttaaaacaaggttcttcaggtttctgcttgattgacttggtacaaacttgaagcaagttgccttctaatttttactccaagattgtttcatatctattccttaagtgtaaagaaatatataatgcatggtttgtaataaaatcttaatgtttaatgactgttctcatttctcaatgtaatttcatactgtttctctataaaatgatagtattccatttaacattactgatttttattaaaaacctggacagaaaattataaattataaatatgactttatcctggctataaaattattgaaccaaaatgaattctttctaaggcatttgaatactaaaacgtttattgtttatagatatgtaaaatgtggattatgttgcaaattgagattaaaattatttggggttttgtaacaatataattttgcttttgtattatagacaaatatataaataataaaggcaggcaactttcatttgcactaatgtacatgcaattgagattacaaaatacatggtacaatgctttaataacaaactctgccagtcaggtttgaatcctactgtgctattaactagctagtaaactcagacaagttacttaacttctctaagccccagttttgttatctataaaatgaatattataatagtacctctttttaggattgcgaggattaagcaggataatgcatgtaaagtgttagcacagtgtctcacatagaataagcactctataaatattttactagaatcacctaggattatagcactggaagagatcttagcaaaaatgtggtcctttctgttgctttggacagacatgaaccaaaacaaaattacggacaattgatgagccttattaactatcttttcattatgagacaaaggttctgattatgcctactggttgaaattttttaatctagtcaagaaggaaaatttgatgaggaaggaaggaatggatatcttcagaagggcttcgcctaagctggaacatggatagattccattctaacataaagatctttaagttcaaatatagatgagttgactggtagatttggtggtagttgctttctcgggatataagaagcaaaatcaactgctacaagtaaagaggggatggggaaggtgttgcacatttaaagagagaaagtgtgaaaaagcctaattgtgggaatgcacaggtttcaccagatcagatgatgtctggttattctgtaaattatagttcttatcccagaaattactgcctccaccatccctaatatcttctaattggtatcatataatgacccactcttcttatgttatccaaacagttatgtggcatttagtaatggaatgtacatggaatttcccactgacttacctttctgtccttgggaagcttaaactctgaatcttctcatctgtaaaatgtgaattaaagtatctacctaactgagttgtgattgtagtgaaagaaaggcaatatatttaaatcttgaatttagcaagcccacgctcgatttttatgtcctttcctcttgccttgtattgagtttaagatctctactgattaaaactcttttgctatcaa

SEQ ID NO: 341481 - DNA, 3593 bp, Homo sapiens
ctggaaccacagtcatgcaccatcatgcctggctagttttttatttcttcataggtatagggtttcactatgttgcctaggctggcttcgaactccttgcctcaagtgagcctctcacctcagcctcccaaagtgcttagattacaggcatgaaccaccatgctcagccatggaaaaacctcatttttaaactgagggctgcttaccactttttcccaatacttcacataatgctacctggaaattaccgatattctagtttgtatgcaaccttagctttttaaattcacatcttttaatatttttctagatatgatacataccttttctcgatgtgtgttatgctgtgctgaagaagtggatcttgatgagcttcttgctggaagattagtttctttcttaatggatcatcatcaggaaattcttcaagtaccctcttacttacagactgcagtggaaaaacatcttgactacttaaaaaagggacatattgaaaatcctggagatggactatttgctcctttgccaacttactcatactgtaagcagattagtgctcaggagtttgatgagcaaaaagtttctacctctcaagctgcaattgcagaacttttagaaaatattattaaaaacaggagtttacctctaaaggagaaaagaaaaaaactaaaacagtttcagaaggaatatcctttgatatatcagaaaagatttccaaccacggagagtgaagcagcactttttggtgacaaacctacaatcaagcaaccaatgctgattttaagaaaaccaaagttccgtagtctaagataactaactgaattaaaaattatgtaatacttgtggaactttgataaatgaagccatatctgagaatgtagctactcaaaaggaagtctgtcattaataaggtatttctaaataaacacattatgtaaggaagtgccaaaatagttatcaatgtgagactcttaggaaactaactagatctcaattgagagcacataacaatagatgataccaaatactttttgtttttaacacagctatccagtaaggctatcatgatgtgtgctaaaattttatttacttgaattttgaaaactgagctgtgttagggattaaactataattctgttcttaaaagaaaatttatctgcaaatgtgcaagttctgagatattagctaatgaattagttgtttggggttacttctttgtttctaagtataagaatgtgaagaatatttgaaaactcaatgaaataattctcagctgccaaatgttgcactcttttatatattctttttccacttttgatctatttatatatatgtatgtgtttttaaaatatgtgtatattttatcagatttggttttgccttaaatattatccccaattgcttcagtcattcatttgttcagtatatatattttgaattctagttttcataatctattagaagatggggatataaaagaagtataaggcaatcatatattcattcaaaagatatttatttagcaactgctatgtgcctttcgttgttccagatatgcagagacaatgataaataaaacatataatctcttccataaggtatttattttttaatcaagggagatacacctatcagatgtttaaaataacaacactacccactgaaatcagggcatatagaatcattcagctaaagagtgacttctatgatgatggaacaggtctctaagctagtggttttcaaactggtacacattagactcacccgaggaattttaaaacagcctatatgcccagggcctaacttacactaattaaatctgaattttggggatgttgtatagggattagtattttttttaatctaggtgattccaatattcagccaactgtgagaatcaatggcctaaatgctttttataaacatttttataagtgtcaagataatggcacattgactttattttttcattggaagaaaatgcctgccaagtataaatgactctcatcttaaaacaaggttcttcaggtttctgcttgattgacttggtacaaacttgaagcaagttgccttctaatttttactccaagattgtttcatatctattccttaagtgtaaagaaatatataatgcatggtttgtaataaaatcttaatgtttaatgactgttctcatttctcaatgtaatttcatactgtttctctataaaatgatagtattccatttaacattactgatttttattaaaaacctggacagaaaattataaattataaatatgactttatcctggctataaaattattgaaccaaaatgaattctttctaaggcatttgaatactaaaacgtttattgtttatagatatgtaaaatgtggattatgttgcaaattgagattaaaattatttggggttttgtaacaatataattttgcttttgtattatagacaaatatataaataataaaggcaggcaactttcatttgcactaatgtacatgcaattgagattacaaaatacatggtacaatgctttaataacaaactctgccagtcaggtttgaatcctactgtgctattaactagctagtaaactcagacaagttacttaacttctctaagccccagttttgttatctataaaatgaatattataatagtacctctttttaggattgcgaggattaagcaggataatgcatgtaaagtgttagcacagtgtctcacatagaataagcactctataaatattttactagaatcacctaggattatagcactggaagagatcttagcaaaaatgtggtcctttctgttgctttggacagacatgaaccaaaacaaaattacggacaattgatgagccttattaactatcttttcattatgagacaaaggttctgattatgcctactggttgaaattttttaatctagtcaagaaggaaaatttgatgaggaaggaaggaatggatatcttcagaagggcttcgcctaagctggaacatggatagattccattctaacataaagatctttaagttcaaatatagatgagttgactggtagatttggtggtagttgctttctcgggatataagaagcaaaatcaactgctacaagtaaagaggggatggggaaggtgttgcacatttaaagagagaaagtgtgaaaaagcctaattgtgggaatgcacaggtttcaccagatcagatgatgtctggttattctgtaaattatagttcttatcccagaaattactgcctccaccatccctaatatcttctaattggtatcatataatgacccactcttcttatgttatccaaacagttatgtggcatttagtaatggaatgtacatggaatttcccactgacttacctttctgtccttgggaagcttaaactctgaatcttctcatctgtaaaatgtgaattaaagtatctacctaactgagttgtgattgtagtgaaagaaaggcaatatatttaaatcttgaatttagcaagcccacgctcgatttttatgtcctttcctcttgccttgtattgagtttaagatctctactgattaaaactcttttgctatcaa

SEQ ID NO: 341482 - DNA, 2484 bp, Homo sapiens
ctctatgctattcaaatcggcggcggggccaacggttgtgccgagactcgccactgccgcggccgctgggcctgagtgtcgccttcgccgccatggacgccaccgggcgctgacagacctatggagagtcagggtgtgcctcccgggccttatcgggccaccaagctgtggaatgaagttaccacatcttttcgagcaggaatgcctctaagaaaacacagacaacactttaaaaaatatggcaattgtttcacagcaggagaagcagtggattggctttatgacctattaagaaataatagcaattttggtcctgaagttacaaggcaacagactatccaactgttgaggaaatttcttaagaatcatgtaattgaagatatcaaagggaggtggggatcagaaaatgttgatgataacaaccagctcttcagatttcctgcaacttcgccacttaaaactctaccacgaaggtatccagaattgagaaaaaacaacatagagaacttttccaaagataaagatagcatttttaaattacgaaacttatctcgtagaactcctaaaaggcatggattacatttatctcaggaaaatggcgagaaaataaagcatgaaataatcaatgaagatcaagaaaatgcaattgataatagagaactaagccaggaagatgttgaagaagtttggagatatgttattctgatctacctgcaaaccattttaggtgtgccatccctagaagaagtcataaatccaaaacaagtaattccccaatatataatgtacaacatggccaatacaagtaaacgtggagtagttatactacaaaacaaatcagatgacctccctcactgggtattatctgccatgaagtgcctagcaaattggccaagaagcaatgatatgaataatccaacttatgttggatttgaacgagatgtattcagaacaatcgcagattattttctagatctccctgaacctctacttacttttgaatattacgaattatttgtaaacattttgggcttgctgcaacctcatttagagagggttgccatcgatgctctacagttatgttgtttgttacttcccccaccaaatcgtagaaagcttcaacttttaatgcgtatgatttcccgaatgagtcaaaatgttgatatgcccaaacttcatgatgcaatgggtacgaggtcactgatgatacataccttttctcgatgtgtgttatgctgtgctgaagaagtggatcttgatgagcttcttgctggaagattagtttctttcttaatggatcatcatcaggaaattcttcaagtaccctcttacttacagactgcagtggaaaaacatcttgactacttaaaaaagggacatattgaaaatcctggagatggactatttgctcctttgccaacttactcatactgtaagcagattagtgctcaggagtttgatgagcaaaaagtttctacctctcaagctgcaattgcagaacttttagaaaatattattaaaaacaggagtttacctctaaaggagaaaagaaaaaaactaaaacagtttcagaaggaatatcctttgatatatcagaaaagatttccaaccacggagagtgaagcagcactttttggtgacaaacctacaatcaagcaaccaatgctgattttaagaaaaccaaagttccgtagtctaagataactaactgaattaaaaattatgtaatacttgtggaactttgataaatgaagccatatctgagaatgtagctactcaaaaggaagtctgtcattaataaggtatttctaaataaacacattatgtaaggaagtgccaaaatagttatcaatgtgagactcttaggaaactaactagatctcaattgagagcacataacaatagatgataccaaatactttttgtttttaacacagctatccagtaaggctatcatgatgtgtgctaaaattttatttacttgaattttgaaaactgagctgtgttagggattaaactataattctgttcttaaaagaaaatttatctgcaaatgtgcaagttctgagatattagctaatgaattagttgtttggggttacttctttgtttctaagtataagaatgtgaagaatatttgaaaactcaatgaaataattctcagctgccaaatgttgcactcttttatatattctttttccacttttgatctatttatatatatgtatgtgtttttaaaatatgtgtatattttatcagatttggttttgccttaaatattatccccaattgcttcagtcattcatttgttcagtatatatattttgaattctagttttcataatctattagaagatggggatataaaagaagtataaggcaatcatatattcattcaaaagatatttatttagcaactgctatgtgcctttcgttgttccagatatgcagagacaatgataaataaaacatataatctcttcc

SEQ ID NO: 341483 - DNA, 3912 bp, Homo sapiens
ctctatgctattcaaatcggcggcggggccaacggttgtgccgagactcgccactgccgcggccgctgggcctgagtgtcgccttcgccgccatggacgccaccgggcgctgacagacctatggagagtcagggtgtgcctcccgggccttatcgggccaccaagctgtggaatgaagttaccacatcttttcgagcaggaatgcctctaagaaaacacagacaacactttaaaaaatatggcaattgtttcacagcaggagaagcagtggattggctttatgacctattaagaaataatagcaattttggtcctgaagttacaaggcaacagactatccaactgttgaggaaatttcttaagaatcatgtaattgaagatatcaaagggaggtggggatcagaaaatgttgatgataacaaccagctcttcagatttcctgcaacttcgccacttaaaactctaccacgaaggtatccagaattgagaaaaaacaacatagagaacttttccaaagataaagatagcatttttaaattacgaaacttatctcgtagaactcctaaaaggcatggattacatttatctcaggaaaatggcgagaaaataaagcatgaaataatcaatgaagatcaagaaaatgcaattgataatagagaactaagccaggaagatgttgaagaagtttggagatatgttattctgatctacctgcaaaccattttaggtgtgccatccctagaagaagtcataaatccaaaacaagtaattccccaatatataatgtacaacatggccaatacaagtaaacgtggagtagttatactacaaaacaaatcagatgacctccctcactgggtattatctgccatgaagtgcctagcaaattggccaagaagcaatgatatgaataatccaacttatgttggatttgaacgagatgtattcagaacaatcgcagattattttctagatctccctgaacctctacttacttttgaatattacgaattatttgtaaacattttggttgtttgtggctacatcacagtttcagatagatccagtgggatacataaaattcaagatgatccacagtcttcaaaattccttcacttaaacaatttgaattccttcaaatcaactgagtgccttcttctcagtctgcttcatagagaaaaaaacaaagaagaatcagattctactgagagactacagataagcaatccaggatttcaagaaagatgtgctaagaaaatgcagctagttaatttaagaaacagaagagtgagtgctaatgacataatgggaggaagttgtcataatttaatagggttaagtaatatgcatgatctatcctctaacagcaaaccaaggtgctgttctttggaaggaattgtagatgtgccagggaattcaagtaaagaggcatccagtgtctttcatcaatcttttccgaacatagaaggacaaaataataaactgtttttagagtctaagcccaaacaggaattcctgttgaatcttcattcagaggaaaatattcaaaagccattcagtgctggttttaagagaacctctactttgactgttcaagaccaagaggagttgtgtaatgggaaatgcaagtcaaaacagctttgtaggtctcagagtttgcttttaagaagtagtacaagaaggaatagttatatcaatacaccagtggctgaaattatcatgaaaccaaatgttggacaaggcagcacaagtgtgcaaacagctatggaaagtgaactcggagagtctagtgccacaatcaataaaagactctgcaaaagtacaatagaactttcagaaaattctttacttccagcttcttctatgttgactggcacacaaagcttgctgcaacctcatttagagagggttgccatcgatgctctacagttatgttgtttgttacttcccccaccaaatcgtagaaagcttcaacttttaatgcgtatgatttcccgaatgagtcaaaatgttgatatgcccaaacttcatgatgcaatgggtacgaggtcactgatgatacataccttttctcgatgtgtgttatgctgtgctgaagaagtggatcttgatgagcttcttgctggaagattagtttctttcttaatggatcatcatcaggaaattcttcaagtaccctcttacttacagactgcagtggaaaaacatcttgactacttaaaaaagggacatattgaaaatcctggagatggactatttgctcctttgccaacttactcatactgtaagcagattagtgctcaggagtttgatgagcaaaaagtttctacctctcaagctgcaattgcagaacttttagaaaatattattaaaaacaggagtttacctctaaaggagaaaagaaaaaaactaaaacagtttcagaaggaatatcctttgatatatcagaaaagatttccaaccacggagagtgaagcagcactttttggtgacaaacctacaatcaagcaaccaatgctgattttaagaaaaccaaagttccgtagtctaagataactaactgaattaaaaattatgtaatacttgtggaactttgataaatgaagccatatctgagaatgtagctactcaaaaggaagtctgtcattaataaggtatttctaaataaacacattatgtaaggaagtgccaaaatagttatcaatgtgagactcttaggaaactaactagatctcaattgagagcacataacaatagatgataccaaatactttttgtttttaacacagctatccagtaaggctatcatgatgtgtgctaaaattttatttacttgaattttgaaaactgagctgtgttagggattaaactataattctgttcttaaaagaaaatttatctgcaaatgtgcaagttctgagatattagctaatgaattagttgtttggggttacttctttgtttctaagtataagaatgtgaagaatatttgaaaactcaatgaaataattctcagctgccaaatgttgcactcttttatatattctttttccacttttgatctatttatatatatgtatgtgtttttaaaatatgtgtatattttatcagatttggttttgccttaaatattatccccaattgcttcagtcattcatttgttcagtatatatattttgaattctagttttcataatctattagaagatggggatataaaagaagtataaggcaatcatatattcattcaaaagatatttatttagcaactgctatgtgcctttcgttgttccagatatgcagagacaatgataaataaaacatataatctcttccataaggtatttattttttaatcaagggagatacacctatcagatgtttaaaataacaacactacccactgaaatcagggcatatagaatcattcagctaaagagtgacttctatgatgatggaacaggtctctaagctagtggttttcaaactggtacacattagactcacccgaggaattttaaaacagcctatatgcccagggcctaacttacactaattaaatctgaattttggggatgttgtatagggattagtattttttttaatctaggtgattccaatattcagccaactgtgagaatcaatggcctaaatgctttttataaacatttttataagtgtcaagataatggcacattgactttattttttcattggaagaaaatgcctgccaagtataaatgactctcatcttaaaacaaggttcttcaggtttctgcttgattgacttggtacaaacttgaagcaagttgccttctaatttttactccaagattgtttcatatctattccttaagtgtaaagaaatatataatgcatggtttgtaataaaatcttaatgtttaatgactg

SEQ ID NO: 341484 - DNA, 4078 bp, Homo sapiens
ctctatgctattcaaatcggcggcggggccaacggttgtgccgagactcgccactgccgcggccgctgggcctgagtgtcgccttcgccgccatggacgccaccgggcgctgacagacctatggagagtcagggtgtgcctcccgggccttatcgggccaccaagctgatttcctgcaacttcgccacttaaaactctaccacgaaggtatccagaattgagaaaaaacaacatagagaacttttccaaagataaagatagcatttttaaattacgaaacttatctcgtagaactcctaaaaggcatggattacatttatctcaggaaaatggcgagaaaataaagcatgaaataatcaatgaagatcaagaaaatgcaattgataatagagaactaagccaggaagatgttgaagaagtttggagatatgttattctgatctacctgcaaaccattttaggtgtgccatccctagaagaagtcataaatccaaaacaagtaattccccaatatataatgtacaacatggccaatacaagtaaacgtggagtagttatactacaaaacaaatcagatgacctccctcactgggtattatctgccatgaagtgcctagcaaattggccaagaagcaatgatatgaataatccaacttatgttggatttgaacgagatgtattcagaacaatcgcagattattttctagatctccctgaacctctacttacttttgaatattacgaattatttgtaaacattttggttgtttgtggctacatcacagtttcagatagatccagtgggatacataaaattcaagatgatccacagtcttcaaaattccttcacttaaacaatttgaattccttcaaatcaactgagtgccttcttctcagtctgcttcatagagaaaaaaacaaagaagaatcagattctactgagagactacagataagcaatccaggatttcaagaaagatgtgctaagaaaatgcagctagttaatttaagaaacagaagagtgagtgctaatgacataatgggaggaagttgtcataatttaatagggttaagtaatatgcatgatctatcctctaacagcaaaccaaggtgctgttctttggaaggaattgtagatgtgccagggaattcaagtaaagaggcatccagtgtctttcatcaatcttttccgaacatagaaggacaaaataataaactgtttttagagtctaagcccaaacaggaattcctgttgaatcttcattcagaggaaaatattcaaaagccattcagtgctggttttaagagaacctctactttgactgttcaagaccaagaggagttgtgtaatgggaaatgcaagtcaaaacagctttgtaggtctcagagtttgcttttaagaagtagtacaagaaggaatagttatatcaatacaccagtggctgaaattatcatgaaaccaaatgttggacaaggcagcacaagtgtgcaaacagctatggaaagtgaactcggagagtctagtgccacaatcaataaaagactctgcaaaagtacaatagaactttcagaaaattctttacttccagcttcttctatgttgactggcacacaaagtaaggctgttgctttcaatgcatgcaatattaactttgagtgtttactaactctgtgttttgcttacctggcttttcttccttgaagttgcttttttttttcctccaagaggaattatttaaaaagactttagtctgtgacataaccaagatttattctgtttacctaaggaacttattttcttttttgcaatttcatttattctgagtcactttatttgtaataagtgaagaattttaatacttagaaataagttgtaaagaaaataatgagaatcttaccatgctttagaggaacgtaatttctagaaatagttaaaagatgaaatactaagatattattttaccttctttatatagctgtatatactggtagtatgaaagcaactagtgtcattgatgattttttgggggggtatttttgtattctaggcttgctgcaacctcatttagagagggttgccatcgatgctctacagttatgttgtttgttacttcccccaccaaatcgtagaaagcttcaacttttaatgcgtatgatttcccgaatgagtcaaaatgttgatatgcccaaacttcatgatgcaatgggtacgaggtcactgatgatacataccttttctcgatgtgtgttatgctgtgctgaagaagtggatcttgatgagcttcttgctggaagattagtttctttcttaatggatcatcatcaggaaattcttcaagtaccctcttacttacagactgcagtggaaaaacatcttgactacttaaaaaagggacatattgaaaatcctggagatggactatttgctcctttgccaacttactcatactgtaagcagattagtgctcaggagtttgatgagcaaaaagtttctacctctcaagctgcaattgcagaacttttagaaaatattattaaaaacaggagtttacctctaaaggagaaaagaaaaaaactaaaacagtttcagaaggaatatcctttgatatatcagaaaagatttccaaccacggagagtgaagcagcactttttggtgacaaacctacaatcaagcaaccaatgctgattttaagaaaaccaaagttccgtagtctaagataactaactgaattaaaaattatgtaatacttgtggaactttgataaatgaagccatatctgagaatgtagctactcaaaaggaagtctgtcattaataaggtatttctaaataaacacattatgtaaggaagtgccaaaatagttatcaatgtgagactcttaggaaactaactagatctcaattgagagcacataacaatagatgataccaaatactttttgtttttaacacagctatccagtaaggctatcatgatgtgtgctaaaattttatttacttgaattttgaaaactgagctgtgttagggattaaactataattctgttcttaaaagaaaatttatctgcaaatgtgcaagttctgagatattagctaatgaattagttgtttggggttacttctttgtttctaagtataagaatgtgaagaatatttgaaaactcaatgaaataattctcagctgccaaatgttgcactcttttatatattctttttccacttttgatctatttatatatatgtatgtgtttttaaaatatgtgtatattttatcagatttggttttgccttaaatattatccccaattgcttcagtcattcatttgttcagtatatatattttgaattctagttttcataatctattagaagatggggatataaaagaagtataaggcaatcatatattcattcaaaagatatttatttagcaactgctatgtgcctttcgttgttccagatatgcagagacaatgataaataaaacatataatctcttccataaggtatttattttttaatcaagggagatacacctatcagatgtttaaaataacaacactacccactgaaatcagggcatatagaatcattcagctaaagagtgacttctatgatgatggaacaggtctctaagctagtggttttcaaactggtacacattagactcacccgaggaattttaaaacagcctatatgcccagggcctaacttacactaattaaatctgaattttggggatgttgtatagggattagtattttttttaatctaggtgattccaatattcagccaactgtgagaatcaatggcctaaatgctttttataaacatttttataagtgtcaagataatggcacattgactttattttttcattggaagaaaatgcctgccaagtataaatgactctcatcttaaaacaaggttcttcaggtttctgcttgattgacttggtacaaacttgaagcaagttgccttctaatttttactccaagattgtttcatatctattccttaagtgtaaagaaatatataatgcatggtttgtaataaaatcttaatgtttaatgactg

SEQ ID NO: 341485 - DNA, 464 bp, Homo sapiens
ccgcaggtgggcagtggagaggtgaagcttctccagggaagaggaggatagcacaagtctagaaagacacccttggatgtctgggtcctcagctccagaacattcctgcttctcaaggcaggactggcccctggacctaactagcagctgcctgagcagagatctggggaggtggccaaaggggctgagtctgtgactgtaccagctggggctgaaggaaactccccaaggtgcatttccaacaaaaattcagcctttgaggctcatatgcaacaaaaattcagccttcctgtcataccgctgggcaaagcccccagtctctgcccaaacactcctgggctgtctgtggccctttacggttccttttcaccttgcagatggctctttctcatccacatcaaaatattttggtgcaaaagaaaatgctgcacggagttattcaccttaatatatagggggttcgt

SEQ ID NO: 341486 - DNA, 652 bp, Homo sapiens
aaaatgaaaaagcaaaccacagactagatttacaatgcacgtatctgacaaaagactagtacctacaatgtgcagagaactcctctaactcagcagtcaggagaaagttcattttaaaatgagcaagacttgaacaggcacttcacaaaagaagatatacagatgtccataagcatattaaaagattcccagcatcattccttagcaggaaatacaaattaaagccacgacatgatacaacttcacctctcctagaatggctgccgtggaaaaggttcaggggtgcgggcagccagaacccgcagacacggctgtgggtgtggagcacaggatctccattggggaaactggcggtttctttaaaaatgaaacaggccgggcgcagtggctcacacctgtaatcccagcactttgggaggccgagacggatcacctgaggtcaggagttcaagaccagcttggccaacatggcaaaaccctgtctctactaaaaatacaaaaattagctggacgtggtggcaggtgcctgtaatcccagctacttgggaggctgaggcaggagaatggcgtgaacccgggaggcggagcttgcagtgagccgagatcccgccactgcactccagcctgggcgacagagcgagactccgtctca

SEQ ID NO: 341487 - DNA, 308 bp, Homo sapiens
agctagtgggttacatactgactttgaaaggctgcagtctggaagtgatggctggtacttgtgctcacagctcattggccaggactagtcatgtgacctgcctgaccacaaaggtatacggttgccaggaaatatggaagaatatgtggatattctttgagcagtgagcatctttgctttattctccttttccatttcatctccataaggttctctatgcacataaactagatgaagcttaggcctgaagcctagaacataatgacactttggttctcaaagtgtggtccccagacaagcagcattag

SEQ ID NO: 341488 - DNA, 300 bp, Homo sapiens
cccagctctgtcacctgaagcccccacgaccttggggcacactgcatctcatgggggcacaggctctgcctctataaccaggagtgtggtgaactgaataatggctccaaagatgtccacatcctaatccctggaactggtgaaaatttaccctacatggcaaaggagactttgcagatgtgattgagtcatactcttgagatagacagattatcctggattagccaggcgggccagatggatgtaatcgcagggtcttcaaaagcaaagggggagacaaaagagagaggcagaaggaga

SEQ ID NO: 341489 - DNA, 449 bp, Homo sapiens
gtcttgaatacgccttcagaggaagaagtatgacattttaagtcagacatgttgcagagatgatgataaaggcaaaatgacatgctgattacttggggagaagaataatgcacgatgaatgtatcaccatagagcaataattttacatttccttgtattgtctggcaaaggcaatatcaaacttacactgcttcctaatggcaaaagataaataaaggaaacaagaatagataagtgtgtattgaaacagaaccttttcatttccaagtaccctttttgtaagtatacacatttctaaattgctcttcagtaaaaataagctttcaggggaaaaatgaatattcagcatacctgtaatcattaatctatcattagataaataatttatctgggttactagttaagatgcttccgcttaataaacattctttcattcattcaactaatta

SEQ ID NO: 341490 - DNA, 471 bp, Homo sapiens
cctcctgagtagctgggactataggcgtgcaccaccatacctgaataatcaaaacctaacatctttaaagaacattggcataagacttggcaaaaatggcatcttgtccctcatctcatttagtccaagcgatacaggaaatgctgccacctccattttatagatgaggagtctgacgttcctagaggttcaatgccctgaaacgtcaagccttgaggaagttggagcactgggattcgaagagcaccatccaatacagacccagaatcaggatgatttgggattatgcttgtcaaggactcagggcagggctaccatacattaggcacaagaattttgatagtgataattactgtgttcattgtcacttcatcatgacagttaccgtgatgataagaaacctggcccttcttcacctgacaaaggctttcttcgtttgagccactgctcaaacgagactgaccaagaata

SEQ ID NO: 341491 - DNA, 388 bp, Homo sapiens
gcactttgccaaatgcagaggcctgaaatctccaaaaaagagccctttggactgagttcagagcccagtgcttagccctgcctgcccaggttggaaggaagggggctaggaagaatggaagttagtgtgaattagacatgaggacaagtggcccgttttgtttttaccaagttattggtacagccatcagaaagtgtcttctgggaaaaagagaatcaaaggttgaaggtttaaatactgcctaatgtttccaggggaaacaaaatgtagattgatttggaatggccgcataaatgtgctctgcactgacttaatatttatttagctaatcccctagagttggatgttgtttccagttttattcctaaaatgaatactatggtgaaca

SEQ ID NO: 341492 - DNA, 242 bp, Homo sapiens
aggcacactactgtgtctagctgtaactgaggttcagtggaattaaggactgtctcaggagtagacagctcttgatcataccgcagccagccggactgcagagactgcccagcagcactgcagagaggtttagagtggtcactggaaccagacagtctgggtttcaatctggtttctgccgtttgttagctctgtgccttgggcagcttgcctacctatctgtcctcagttttctcaattgt

SEQ ID NO: 341493 - DNA, 451 bp, Homo sapiens
ggcatggcacttgcatctgcccagcttctggtgagggtcctatgctgtgtcacagtggggtggagaaacagaagggagactggagcagagacctgcaggagagcctgggtttatttatagtaacctgctctcaggaacacatccattcccatgagagtgagaacctactcactcccactagacagctttaatctattcccgagggcagttctcccatgatccaaacacttcccactaggccccatctcccaacactaccacaccaggaatcagattccaacatgagctttgtcaggggcaaaccaggtcaaaccatagcagataccatgttatacttgcacatgagaaccctcagttacaaaggaatagcacatctgcttattaaagtagatcttttcagtcagaaaatgtgctgttcaaaattgtaagataggtgttggtccaagcatga

SEQ ID NO: 341494 - DNA, 383 bp, Homo sapiens
tctgcccaatgctgtttttaaaaatgtggatctttttgtgttctatgtgccacaggtacaattatacatatagctgactcttgaacaacacaggtttgaactgtgtggggccacttacacgcagatttttttttttccataataaaagtgacattgagtggggctgggtatggtggctcccacccgtcatcccagcactttgggaggccgaagcggacagatcatctgaggtcaggaattctgagaccaacctggccaacacggtgaaacccatctctactataaaaattagctgggtgtagtagtgggtgcctgtagtcccagctactcaggaggctgaggcaggagaatcacttgaacctgggaggcgaaggttgcagtga

SEQ ID NO: 341495 - DNA, 366 bp, Homo sapiens
atcatatgttgtaattagtaaatatgtccatatgtataaaatacatattagtgattaggggtagaaatttgatttagatatgaatatttatgtaatttgctgtataacggattaaatgagattatgatattaatgaattaatgaatatggttaaattgataaaaattcaacattttttatttaaaaaataacttagcaagtgaacctcggaaaaatgctgcttctcactttcatctgtaatcttatttcagtcctaatcaaaactctgatagctttttatgtgaaacatgaaaagcagaacttataatttatatggaaatgcgaagaatctagaaataaccaggtcaatcttgaagaacagtggca

SEQ ID NO: 341496 - DNA, 2656 bp, Homo sapiens
gcggccgcgctcacaggagcagcgtgacccgtcggccccgggggtgctggcgccaggagccagcactcgcggtgcgctcccccgcgcctggcttccctggactgtcgccagtcctactctgcctgaggtggcgagggcagggtggagcgcggccttttctggcctgaggaggagtcactcgggaggtcactcggctgctgggcgggctgctgtcacaggcgctgcgtgccctggctctgctcgccactggccggcgcgctcccggcgcacggagcacactcgcgctccgggactgaaacctgagcagccgtagcagccgaatttgggagcatatccttgtcactgcagccagaaagcccttcgatccccatcagagaggtcacatgagccccgaggtcacctgcccgcggaggggccacctgcctcgcttccacccgaggacctgggttgagcccgtggtggcatcgtcccaggtggctgcctccctctacgatgcggggctactcctcgtggtgaaggcgtcctacggaaccggaggctcctccaaccacagtgccagcccatcgccccggggggctctagaggaccaacagcagagagccatctccaatttctacattatctacaaccttgtggtgggcctgtcccccctgctgtccgcctacgggctgggatggctcagcgaccgctaccaccgaaagatctccatctgcatgtcgctgctgggcttcctgctctcccgcctcgggctgctgctcaaggtgctgctggactggccagtggaggtgctgtacggggcggcggcgctgaacgggctattcggcggcttctccgccttctggtccggggtcatggcgctgggatcgctgggctcctccgagggccgccgctctgtgcgcctcatcctcattgacctgatgctgggcttggcggggttctgcgggagcatggcttccgggcatctcttcaagcagatggctgggcactctgggcagggcctgatactgacggcctgcagcgtgagctgtgcctcgtttgccctgctctacagccttttggtgctaaaggtccctgagtcggtggccaaacccagccaggagctccccgccgtggataccgtgtctggcacggttggcacataccgcactctggatcctgatcagttggaccaacagtatgcagtggggcaccctccatctcctggaaaagcaaaaccccataaaaccaccattgccttgctctttgtgggtgctatcatatatgacctggcggtggtgggcacagtggacgtgatccctctttttgtgctgagggagcctctcggttggaaccaagtgcaggtgggctatggtatggctgcagggtacaccatcttcatcaccagcttcctgggtgtcctggtcttctcccgctgctttcgggacaccaccatgatcatgattgggatggtctcctttgggtcaggagccctcctcttggcttttgtgaaagagacatacatgttctatattgctcgagccgtcatgctgtttgctctcatccccgtcacaaccatccgatcagctatgtccaaactcataaagggctcctcttatggaaaggtgttcgtcatactgcagctgtccttggctctgaccggcgtggtgacatccaccttgtacaacaagatctaccagctcaccatggacatgtttgtgggctcctgctttgctctctcctcctttctctccttcctggccatcattccaattagcatcgtggcctataaacaagtcccattgtcaccatatggagacatcatagagaaatgaagatgcttacctgcaggaactgaaaacatcagccatggccaggcccccagaagacaaaagaagggaccagggaactggtgacctaagcaacccactgcttaagaaacctgcgttccagccagagttggcctcagaatgacctgctctggctcagggatccctggtggatggggaaaagcactttcctggtgatggaaaaacgttctcagctttaagacacccccattaggcagacactgggttctgtgacagcagagcatgaccttaagggttacaggcaggctgcacacagcagtcccaggccctgtgaggggcttcagactccagctacagcgagcctgccccttttcttcaagggactgtcttgagggctccaaagtatagctaactagtcacctgggtgctgtgctgaaagtcccatgggagaactcaaagcgtgcattatcacagcctgaggggaatgtggaagggatgttttgtaagaactaccaacagttttgcacgaacaatgtcttttaaattaaaataaaaccttgaaaaaagtcagctttctttcctgagtcttccttacctacaaacactcaggagggggatggagctcaggcccttgtcttctgggtagttttgttactactgttgcttttaagaagcaaatgtcacaaggctttcttcaatgggatgttcaattgagtacttccagtcaacagtgcttcccaaagtgggtggtgtgaaggaagaggaggtacattaagagctattttatttgaggtagtcatttttataaccttgtttacttggatttataaaagcagactcacctaataaaatcaacattcattgtatga

SEQ ID NO: 341497 - DNA, 2382 bp, Homo sapiens
gcggccgcgctcacaggagcagcgtgacccgtcggccccgggggtgctggcgccaggagccagcactcgcggtgcgctcccccgcgcctggcttccctggactgtcgccagtcctactctgcctgaggtggcgagggcagggtggagcgcggccttttctggcctgaggaggagtcactcgggaggtcactcggctgctgggcgggctgctgtcacaggcgctgcgtgccctggctctgctcgccactggccggcgcgctcccggcgcacggagcacactcgcgctcccggcgcacggagcacactcgcgctccgggactgaaacctgagcagccgtagcagccgaatttgggagcatatccttgtcactgcagccagaaagcccttcgatccccatcagagaggtcacatgagccccgaggtcacctgcccgcggaggggccacctgcctcgcttccacccgaggacctgggttgagcccgtggtggcatcgtcccaggtggctgcctccctctacgatgcggggctactcctcgtggtgaaggcgtcctacggaaccggaggctcctccaaccacagtgccagcccatcgccccggggggctctagaggaccaacagcagagagccatctccaatttctacattatctacaaccttgtggtgggcctgtcccccctgctgtccgcctacgggctgggatggctcagcgaccgctaccaccgaaagatctccatctgcatgtcgctgctgggcttcctgctctcccgcctcgggctgctgctcaaggtgctgctggactggccagtggaggtgctgtacggggcggcggcgctgaacgggctattcggcggcttctccgccttctggtccggggtcatggcgctgggatcgctgggctcctccgagggccgccgctctgtgcgcctcatcctcattgacctgatgctgggcttggcggggttctgcgggagcatggcttccgggcatctcttcaagcagatggctgggcactctgggcagggcctgatactgacggcctgcagcgtgagctgtgcctcgtttgccctgctctacagccttttggtgctaaaggtccctgagtcggtggccaaacccagccaggagctccccgccgtggataccgtgtctggcacggttggcacataccgcactctggatcctgatcagttggaccaacagtatgcagtggggcaccctccatctcctggaaaagcaaaaccccataaaaccaccattgccttgctctttgtgggtgctatcatatatgacctggcggtggtgggcacagtggacgtgatccctctttttgtgctgagggagcctctcggttggaaccaagtgcaggtgggctatggtatggctgcagggtacaccatcttcatcaccagcttcctgggtgtcctggtcttctcccgctgctttcgggacaccaccatgatcatgattgggatggtctcctttgggtcaggagccctcctcttggcttttgtgaaagagacatacatgttctatattgctcgagccgtcatgctgtttgctctcatccccgtcacaaccatccgatcagctatgtccaaactcataaagggctcctcttatggaaaggtgttcgtcatactgcagctgtccttggctctgaccggcgtggtgacatccaccttgtacaacaagatctaccagctcaccatggacatgtttgtgggctcctgctttgctctctcctcctttctctccttcctggccatcattccaattagcatcgtggcctataaacaagtcccattgtcaccatatggagacatcatagagaaatgaagatgcttacctgcaggaactgaaaacatcagccatggccaggcccccagaagacaaaagaagggaccagggaactggtgacctaagcaacccactgcttaagaaacctgcgttccagccagagttggcctcagaatgacctgctctggctcagggatccctggtggatggggaaaagcactttcctggtgatggaaaaacgttctcagctttaagacacccccattaggcagacactgggttctgtgacagcagagcatgaccttaagggttacaggcaggctgcacacagcagtcccaggccctgtgaggggcttcagactccagctacagcgagcctgccccttttcttcaagggactgtcttgagggctccaaagtatagctaactagtcacctgggtgctgtgctgaaagtcccatgggagaactcaaagcgtgcattatcacagcctgaggggaatgtggaagggatgttttgtaagaactaccaacagttttgcacgaacaatgtcttttaaattaaaataaaaccttgaaaaaagtc

SEQ ID NO: 341498 - DNA, 251 bp, Homo sapiens
acaagcagatgacaaaacaaagaaacggacacaacacattctaagcaattaatgacagctagttacgtatatgaaacccggcatcaagatctcattgtaaaattaaaaacagtaaaataaaatagcaaatgtgaaaccacagtaaaaaaaattgtattattttatctctttgtaagcatcggtgttgtacaaaataaaaaggaatgtgcatgaggtgagagtcatctcttgatcttaaagaaggacttcag

SEQ ID NO: 341499 - DNA, 321 bp, Homo sapiens
gttcatgatgctctctctggccaccttccagacaggaagaaagagcagaggatcactgtgagaggaatttgaggatcaaatcctgaagtggtacatgtcactactgttcatagtctctttgctggaacttggtcctatggccctactggcagagaggaaggctatgaaacccagtctaggcctgcgcctagaagaagaagaagaagaaacaccttttgaagaacagagagcagtctctgtcataccaggagtacctgtcacatacttgtagaacaaaaatcagtaacattttaattattgaaacaatgtaacaactttaaa

SEQ ID NO: 341500 - DNA, 100 bp, Homo sapiens
tgcttggatttacagtaggccactgcacccggtgtatgtttacttcttacagtcattccaattaatataataaatggctctacatactttgtgaccacag

SEQ ID NO: 341501 - DNA, 1179 bp, Homo sapiens
gctgcggtaccctcccgctcgcttgtccgtctgcgcgcccgcgatgtgaccagccgactgggggcgggctggcggctctgcctgcggcagcgcatcggtttttctcctggcaggtccctaattgagccgtgattcccttggagccagagacacccaccaggggctcggagcgccgcgctccggggctggaggcagctgcagcgctcgggtccgcgcggccgggtgcagtagcctcagtcccagccgccgcctcgctgagtcgtgtgccctggcgaatgcccggcgcccggcacagctgagccaaggcgactggtgcagagcggcggcgcctggtcctgcacttgccgctgctgccgggctgtgccggggcggcggcgctgcgcgccggagtttgcagaggctgcctccgagcgccgtccgccaggaagactccctgcctcctgagtcccaaaaacacgagatttttctcctatttcagcagttggccacaacttcattgctgggaaaaggccaagaaagaagagagaactctcaccacaacatttcaaagggaatacattgccagaacttggaatactctactggacaaacatttcctccaaggtaaatattaccattgtaccaataaagggacacatcactagaatttttgaatggcagtggtacagcacaaaggtttaattgtttagtctcatacagacctagagtgacataagagaaagagagagagggagagagagagaagaaagcagtgctgttggggtatcctgcagcctcttctaaatgtgttaccaggagaatgccatcagaatctgggagctcactgagctgtacgaaaaatgtgtgggaaatgaggaggaaagaagaggctggccttttttcttcgtgttacagatactcgtgaacacaaaagccagcggggttcgattatgaaaataacatttcatcctttatgaggaaaaaaatgagtagtttcctttagaggttaaaataaaatatatgctgtattcatgtcacaagagggaaaagcctgaatcataatattttacaccaactgagacaagtatgaaagattttaaggaactccatgttcttctatgaaaatacctgctaagtaagcctttagtaagcctttcattggtttgtgaggaatgcttcatgaagttcttgttttggaaa

SEQ ID NO: 341502 - DNA, 463 bp, Homo sapiens
ctccatgatgagctttttatatgatcagaaagactgtcttgcgatactctataaaatctgatgtccatatcccacttccttgccagaaaaaaagagtcatcaataaagaagaaacataattgtagggatacctatttatctgtttattcagttcaaatgaccactggagttggtgctaaatgtgcatttttaacaagtataatatttcagcactgtcaaaattacctctacaataataggcttgttaaattatagctctataagctagggggtaagatggctctgcccagcacacattaatctatgcctgttcacacaagtgattctgctgagcaggtagcatgtttaaacaagaaatactggtcctaaaacctctgatttatggtaggtgttgttttgacacagcaccattcagacaatttacaaggcaaagcttcgtgctaaaatatttcctcagtgtcat

SEQ ID NO: 341503 - DNA, 477 bp, Homo sapiens
ttttctgcctacacagaagtccatcctcaaggcactgcaccaaaaggcctcatcaggtgaccctcaactgccttccagctccatcccctcgcacacccacaccccactcgaaacaccaagctctccccagacctttccacgtgtgctgcatggacttagatgctctcccaggctctgactgcctcacatattcttaccagtctttcacagctcctctgtggacgcttggcatgaggcggcctattcacattcctatcatagcttctgggggctccttccactagatttttctccctggggcccttttccctctgcactcctgtgcttagcacaatgcccagtgcttaaacactcagtaagcatctgttaaatgacaaggcaatccccaggttaacatcatgtcccacttcttgggctcccctccatctgtaccaccattacctttgtctgttcttcccaatcctgaaagctatttta

SEQ ID NO: 341504 - DNA, 173 bp, Homo sapiens
aatacagaggcttcataacggcttcaatatatgatggagttggcttaccctaccatcatgaagaggatacctgtggaaccttcctaagaaacagacattgatcttccaaagcaggtgaagctcaaatacagcaagagtcgcacatagctgcatacctggggcatgccacatgg

SEQ ID NO: 341505 - DNA, 490 bp, Homo sapiens
gtaagtagattttataaagtcaataaacctagaaaatatttttgagtagcctgttagaagccctagagaaatgtgtgtcaagggcaaaaaatagcaggtccttgtactgagaacctattgttcatgagtatattctacttattttctgactcatttcttagaaactgccctctgcccataaccacaggtttaccatggaagtagcctttttcttttttctttgagatggagtctctctctgtcacccaggttggagtgagatggcacaatcttggctcactgcaacctccgtctcccaggttcaagcagttctcttgcctcagcccaagtagctgggactacaggcgaccaccaccactcccggctaatttttgcatttttattagagatggggtttcaccatgtgggccaggctagtctcaaactcctgacctcaagtgatccacctgcctcggcctcccgaagtgctgggattacaggagtgagccac

SEQ ID NO: 341506 - DNA, 222 bp, Homo sapiens
gaactgcaattacttttgcaccaacctaatagctaacatgtacaatcagttacctttaaggaaaggagatttcccttgataatgtgggtgggcctcatctaatcagttgaaggccttaagaacaaaaactgagtttcccagagaagacggaatactgccttaggacagtaacacagaaatcctgcctcagtttccagcctgctggcctgctctgtcaatttc

SEQ ID NO: 341507 - DNA, 348 bp, Homo sapiens
agagagagagacagagagagagagagagagagagggatgccctgagaccttgagcaagtcttttactgaaattcccattgcttcagttttctcatctgttaaaatctttggccatgatgtcagatccacaaataggaccgatgcctctccgccccactgcgcctgtgtcccattcccccagcaggtaccacctcattcttgggatcagggctcacctccagcacctgcgtgcattcccattcttctcgttccctttctgccacctgctctggtcctcattgtcccgtttgggcctaactccttgaatgcccagcatatggactctgccaactcctgctaatctccact

SEQ ID NO: 341508 - DNA, 383 bp, Homo sapiens
cttgtctatgtgtgggctcctttctaggcactttattttaatccactgactgatatgtttatgcttatagcaccagcacattgccctgatgaacgttcctgtaataataacccttcaaatcaggtagtataagtccccaaacttcactgtccatcaaaattgatttcgttattctagaacctctgcatttgcacatgaatttagaatcagcctttcaatttcaacaaaaaaacctattgggattttttattggaactgcactgaatctgtagaacaatttaaggaaaacaagtatcttaacaatattgagtttttaggccagtctcagtggctcaggcctgtaatcccaacactgtgggaggctgaggcaggcaggctgctgg

SEQ ID NO: 341509 - DNA, 767 bp, Homo sapiens
tgtttatcgatgccacaggaacagaaacctcatcctcacagtctgaggtttgctcctgtggctgatatttaaagttttcccctttcaactttactcagctatccccttacctgcactgacaggtaatcctccaccgtcctgttcacctctcaccaggttcatattttctttatcttatttattgtacttaatcattattttgtgagaagcttttctgattgtagatgtgacaaccagaatacaagttaaaaccacttatccagcgccttacagtgaatcatttaacatgagaaaaaaattgagtgtgtttgcagaccatggggcagaaggaattgagaagggagtcattgtagatgtgagaaagagagagatgataatagatggaagatgatcttgaaagatgatgcaggtgaagctggaagggtgaaatttatggctctagaacacatgcaggtggagggttagccttaggtaagtggaactacctctttgctggagcacagagatagggataggagtaaggaagaggacttggcaagggtggtgaagatttgtaattgtagaggtggatgatggggaggaagctgaccaggaacaggaatatgaagacaaaagctgctggaacagaaatactagagggctaaatatgaaccagagtccctaagttcagagccagggaggttgagatgggaggatcgcttcagcctggaaggttgaggctgcagtcagctgtgatagcactaatacactccagccttggacaacag

SEQ ID NO: 341510 - DNA, 578 bp, Homo sapiens
aaattcaattggcactgcctgcaaaaatatatccagaatcgaaccacttctcattcagtaccacgtcatgaccaccatcatctaggcaaggggaccccaacccctgggccacagacaggtctgtggcctgttaggaactgggccacacagcagcaggtgagcagcggaccagcgagcattaccgcttgagctccacctcccgtcagattagtggaggcatttgattctcacaggagctgaaacctactgtgaactgctcatgcgtggtgaagatttgtaattgtagaggtggatgatggggaggaagctgaccaggaacaggaatatgaagacaaaagctgctggaacagaaatactagagggctaaatatgaaccagagtccctaaggaatattcaggccaaaacgctggagtgagaccattaacaggagagcttatggtatatcaaagtaagaaatgagtttgaaactgggttagaagctcaggaaaatatgaagtggttttggggcattgtcactagcagtatttggttgccttgattgattgaggggtggacagctagcaagagacgagttaca

SEQ ID NO: 341511 - DNA, 269 bp, Homo sapiens
tgtttatcgatgccacaggaacagaaacctcatcctcacagtctgaggtttgctcctgtggctgatatttaaagttttcccctttcaactttactcagctatccccttacctgcactgacaggtaatcctccaccgtcctgttcacctctcaccaggttcatattttctttatcttatttattgtacttaatcgtattctggcattgtggagactagattggacgatgccagaaggactcacggacgattagatgagcctgttacatgt

SEQ ID NO: 341512 - DNA, 855 bp, Homo sapiens
tgtttatcgatgccacaggaacagaaacctcatcctcacagtctgaggtttgctcctgtggctgatatttaaagttttcccctttcaactttactcagctatccccttacctgcactgacaggtaatcctccaccgtcctgttcacctctcaccaggttcatattttctttatcttatttattgtacttaatcattattttgtgagaagcttttctgattgtagatgtgacaaccagaatacaagttaaaaccacttatccagcgccttacagtgaatcatttaacatgagaaaaaaattgagtgtgtttgcagaccatggggcagaaggaattgagaagggagtcattgtagatgtgagaaagagagagatgataatagatggaagatgatcttgaaagatgatgcaggtgaagctggaagggtgaaatttatggctctagaacacatgcaggtggagggttagccttaggtaagtggaactacctctttgctggagcacagagatagggataggagtaaggaagaggacttggcaagggtggtgaagatttgtaattgtagaggtggatgatggggaggaagctgaccaggaacaggaatatgaagacaaaagctgctggaacagaaatactagagggctaaatatgaaccagagtccctaaggaatattcaggccaaaacgctggagtgagaccattaacaggagagcttatggtatatcaaagtaagaaatgagtttgaaactgggttagaagctcaggaaaatatgaagtggttttggggcattgtcactagcagtatttggttgccttgattgattgaggggtggacagctagcaagagacgagttaca

SEQ ID NO: 341513 - DNA, 464 bp, Homo sapiens
tgtttatcgatgccacaggaacagaaacctcatcctcacagtctgaggtttgctcctgtggctgatatttaaagttttcccctttcaactttactcagctatccccttacctgcactgacaggtaatcctccaccgtcctgttcacctctcaccaggttcatattttctttatcttatttattgtacttaatcattattttgtgagaagcttttctgattgtagatgtgacaaccagaatacaagttaaaaccacttatccagcgccttacagtgaatcatttaacatgagaaaaaaattgagtgtgtttgcagaccatggggcagaaggaattgagaagggagtcattgtagatgtgagaaagaaaagaaggtggaacaatggaaagaaaagttctttggagactactatggacagaagctgggttgaccaaagaagagtcagtgcagcagtatgtaatatag

SEQ ID NO: 341514 - DNA, 742 bp, Homo sapiens
  misc_feature (696)..(696): n is a, c, g, or t
  misc_feature (703)..(703): n is a, c, g, or t
  misc_feature (730)..(730): n is a, c, g, or t
gtgggccacgccttccgggccccgcggctggccggctcctcgcgccctcccctctctcggccgctcttcgggccgcctctgcgtgtggggccgcccgcgccagtgtgagcctgagctgacggcggctccgggaggctcgcagaaggggagggccgggcggcgcgggagctgagcatcgccagggcgggcggcagggcgcggcctctccgccgggtgtaccacctgtcgcggcgcgagacctctggtgaaagaaaagatgttgtcccggttaagagtagtttccaccacttgtactttggcatgtcgacatttgcacataaaagaaaaaggcaagccacttatgctgaacccaagaacaaacaagggaatggcatttactttacaagaacgacaaatgcttggtcttcaaggacttctacctcccaaaatagagacacaagatattcaagccttacgatttcatagaaacttgaagaaaatgactagccctttggaaaaatatatctacataatgggaatacaagaaagaaatgagaaattgttttatagaatactgcaagatgacattgagagtttaatgccaattgtatatacaccgacggttggtcttgcctgctcccagtatggacacatctttagaagacctaagtaaggcttgtttaaaaaaaaaaagctttgggtaaaaaaaattggggnatttttnaaattttttgggggaaaaaaatttttnaaaaaggggggg

SEQ ID NO: 341515 - DNA, 2718 bp, Homo sapiens
  misc_feature (42)..(42): n is a, c, g, or t
agcggggtcacgccttccgggccccgcggctggccggctccncgcgccctcccctctctcggccgctcttcgggccgcctctgcgtgtggggccgcccgcgccagtgtgagcctgagctgacggcggctccgggaggctcgcagaaggggagggccgggcggcgcgggagctgagcatcgccagggcgggcggcagggcgcggcctctccgccgggtgtaccacctgtcgcggcgcgagacctctggtgaaagaaaagatgttgtcccggttaagagtagtttccaccacttgtactttggcatgtcgacatttgcacataaaagaaaaaggcaagccacttatgctgaacccaagaacaaacaagggaatggcatttactttacaagaacgacaaatgcttggtcttcaaggacttctacctcccaaaatagagacacaagatattcaagccttacgatttcatagaaacttgaagaaaatgactagccctttggaaaaatatatctacataatgggaatacaagaaagaaatgagaaattgttttatagaatactgcaagatgacattgagagtttaatgccaattgtatatacaccgacggttggtcttgcctgctcccagtatggacacatctttagaagacctaagggattatttatttcgatctcagacagaggtcatgttagatcaattgtggataactggccagaaaatcatgttaaggctgttgtagtgactgatggagagagaattctgggtcttggagatctgggtgtctatggaatgggaattccagtaggaaaactttgtttgtatacagcttgtgcaggaatacggcctgatagatgcctgccagtgtgtattgatgtgggaactgataatatcgcactcttaaaagacccattttacatgggcttgtaccagaaacgagatcgcacacaacagtatgatgacctgattgatgagtttatgaaagctattactgacagatatggccggaacacactcattcagttcgaagactttggaaatcataatgcattcaggttcttgagaaagtaccgagaaaaatattgtactttcaatgatgatattcaagggacagctgcagtagctctagcaggtcttcttgcagcacaaaaagttattagtaaaccaatctccgaacacaaaatcttattccttggagcaggagaggctgctcttggaattgcaaatcttatagttatgtctatggtagaaaatggcctgtcagaacaagaggcacaaaagaaaatctggatgtttgacaagtatggtttattagttaagggacggaaagcaaaaatagatagttatcaggaaccatttactcactcagccccagagagcatacctgatacttttgaagatgcagtgaatatactgaagccttcaactataattggagttgcaggtgctggccgtcttttcactcctgatgtaatcagagccatggcctctatcaatgaaaggcctgtaatatttgcattaagtaatcctacagcacaggcagagtgcacggctgaagaagcatatacacttacagagggcaggtgtttgtttgccagtggcagtccatttgggccagtgaaacttacagatgggcgagtctttacaccaggtcaaggaaacaatgtttatatttttccaggtgtggctttagctgttattctctgtaacacccggcatattagtgacagtgttttcctagaagctgcaaaggccctgacaagccaattgacagatgaagagctagcccaagggagactttacccaccgcttgctaatattcaggaagtttctattaacattgctattaaagttacagaatacctatatgctaataaaatggctttccgatacccagaacctgaagacaaggccaaatatgttaaagaaagaacatggcggagtgaatatgattccctgctgccagatgtgtatgaatggccagaatctgcatcaagccctcctgtgataacagaatagaagcactcccctgataaatactttctgtgctccagggaaccccttttttcagacaagaagagataatgtcttcagttttatggtgttttctgtgttttgttctccctgaccactttggttgatgtattttttccatgcgtctccacatctgttggggtagacgtgttgattgattgcattgcccaccagcaccctacagtcagatagttgtgatgctttaattctaacatacagcccgtaccacatccaggagatgtaaaaagtgtgtttgtgaatgtcttcacttgtactctaattcagacttgccaaagtatttgctatttactattatgggtaatactcttctctggcctagttcttacagagctactaaaatagaaatttacttttatggatagaagtacagaattttgagaagaaactaaattttcaccaaattttaaggaaaaattgtcattatctaaaaatgttcttatatatctgcttcatcttaccttcatactctgaaattccctatagcagacagagctagggaaatattaaaaatttaccctatttattttctggaactaaatcaagccttaactataacattatgagagtaatgggaactactgctggctttaagtaaataaaagtcattgttttcaacagtgtataaaaatcatagtgtaacctttttatttaataaatatcttacattta

SEQ ID NO: 341516 - DNA, 1622 bp, Homo sapiens
agttttaatttctgcagtggtttaagtgtattccttcaagaaataagaggaattatattacctgttttactctctgtttccccaatgctttttccatttactgggtccttattctgttatttaaacaaacaaaagcaaaatgctgtttttctcttcaggccctgacaagccaattgacagatgaagagctagcccaagggagactttacccaccgcttgctaatattcaggaagtttctattaacattgctattaaagttacagaatacctatatgctaataaaatggctttccgatacccagaacctgaagacaaggccaaatatgttaaagaaagaacatggcggagtgaatatgattccctgctgccagatgtgtatgaatggccagaatctgcatcaagccctcctgtgataacagaatagaagcactcccctgataaatactttctgtgctccagggaaccccttttttcagacaagaagagataatgtcttcagttttatggtgttttctgtgttttgttctccctgaccactttggttgatgtattttttccatgcgtctccacatctgttggggtagacgtgttgattgattgcattgcccaccagcaccctacagtcagatagttgtgatgctttaattctaacatacagcccgtaccacatccaggagatgtaaaaagtgtgtttgtgaatgtcttcacttgtactctaattcagacttgccaaagtatttgctatttactattatgggtaatactcttctctggcctagttcttacagagctactaaaatagaaatttacttttatggatagaagtacagaattttgagaagaaactaaattttcaccaaattttaaggaaaaattgtcattatctaaaaatgttcttatatatctgcttcatcttaccttcatactctgaaattccctatagcagacagagctagggaaatattaaaaatttaccctatttattttctggaactaaatcaagccttaactataacattatgagagtaatgggaactactgctggctttaagtaaataaaagtcattgttttcaacagtgtataaaaatcatagtgtaacctttttatttaataaatatcttacatttaattgcttcagttatgctatcttattgcccaactagaaatttagatttgcttatgaaaaacacatatttttgttacttctagatgattctaggagggagtataagatacctaatcatatgggaacatcacgtgactttttaaatctaaattagtcatgcttcacatcaaaatgagtcatatttaactggagaaactatgcccttattccagaactgatgctctttattgcttgagataattttggaatgttactatgatactgtttctttgaatatcattagtagtgacaactctttctccattgaaggcagacttaatttttttaaaccaccaacattaatttagagctaaatggggatgaataaggttggtgttcatctgggaaatgccttttttaatcccagtaaaatgggtaataatggctatccagaacagttttcttgtgtggcttgcatattgaagaattctaaaggaaaatatatctgtctacca

SEQ ID NO: 341517 - DNA, 2770 bp, Homo sapiens
  misc_feature (42)..(42): n is a, c, g, or t
agcggggtcacgccttccgggccccgcggctggccggctccncgcgccctcccctctctcggccgctcttcgggccgcctctgcgtgtggggccgcccgcgccagtgtgagcctgagctgacggcggctccgggaggctcgcagaaggggagggccgggcggcgcgggagctgagcatcgccagggcgggcggcagggcgcggcctctccgccgggtgtaccacctgtcgcggcgcgagacctctggtgaaagaaaagatgttgtcccggttaagagtagtttccaccacttgtactttggcatgtcgacatttgcacataaaagaaaaaggcaagccacttatgctgaacccaagaacaaacaagggaatggcatttactttacaagaacgacaaatgcttggtcttcaaggacttctacctcccaaaatagagacacaagatattcaagccttacgatttcatagaaacttgaagaaaatgactagccctttggaaaaatatatctacataatgggaatacaagaaagaaatgagaaattgttttatagaatactgcaagatgacattgagagtttaatgccaattgtatatacaccgacggttggtcttgcctgctcccagtatggacacatctttagaagacctaagggattatttatttcgatctcagacagaggtcatgttagatcaattgtggataactggccagaaaatcatgttaaggctgttgtagtgactgatggagagagaattctgggtcttggagatctgggtgtctatggaatgggaattccagtaggaaaactttgtttgtatacagcttgtgcaggaatacggcctgatagatgcctgccagtgtgtattgatgtgggaactgataatatcgcactcttaaaagacccattttacatgggcttgtaccagaaacgagatcgcacacaacagtatgatgacctgattgatgagtttatgaaagctattactgacagatatggccggaacacactcattcagttcgaagactttggaaatcataatgcattcaggttcttgagaaagtaccgagaaaaatattgtactttcaatgatgatattcaagggacagctgcagtagctctagcaggtcttcttgcagcacaaaaagttattagtaaaccaatctccgaacacaaaatcttattccttggagcaggagaggctgctcttggaattgcaaatcttatagttatgtctatggtagaaaatggcctgtcagaacaagaggcacaaaagaaaatctggatgtttgacaagtatggtttattagttaagggacggaaagcaaaaatagatagttatcaggaaccatttactcactcagccccagagagcatacctgatacttttgaagatgcagtgaatatactgaagccttcaactataattggagttgcaggtgctggccgtcttttcactcctgatgtaatcagagccatggcctctatcaatgaaaggcctgtaatatttgcattaagtaatcctacagcacaggcagagtgcacggctgaagaagcatatacacttacagagggcaggtgtttgtttgccagtggcagtccatttgggccagtgaaacttacagatgggcgagtctttacaccaggtcaaggaaacaatgtttatatttttccaggtgtggctttagctgttattctctgtaacacccggcatattagtgacagtgttttcctagaagctgcaaaggccctgacaagccaattgacagatgaagagctagcccaagggagactttacccaccgcttgctaatattcaggaagtttctattaacattgctattaaagtgaaagaaaagatgttgtcccggttaagagtagtttccaccacttgtactttggcatgtcgacatttgcacataaaagaaaaaggcaagccacttatgctgaacccaagaacaaacaagggaatggcatttactttacaagaacgacaaatgcttggtcttcaaggacttctacctcccaaaatagagacacaagatattcaagccttacgatttcatagaaacttgaagaaaatgactagccctttggaaaaatatatctacataatgggaatacaagaaagaaatgagaaattgttttatagaatactgcaagatgacattgagagtttaatgccaattgtatatacaccgacggttggtcttgcctgctcccagtatggacacatctttagaagacctaagggattatttatttcgatctcagacagaggtcatgttagatcaattgtggataactggccagaaaatcatgttaaggctgttgtagtgactgatggagagagaattctgggtcttggagatctgggtgtctatggaatgggaattccagtaggaaaactttgtttgtatacagcttgtgcaggaatacggcctgatagatgcctgccagtgtgtattgatgtgggaactgataatatcgcactcttaaaagacccattttacatgggcttgtaccagaaacgagatcgcacacaacagtatgatgacctgattgatgagtttatgaaagctattactgacagatatggccggaacacactcattcagttcgaagactttggaaatcataatgcattcaggttcttgagaaagtaccgagaaaaatattgtactttcaatgatgatattcaagggacagctgcagtagctctagcaggtcttcttgcagcacaaaaagttattagtaaaccaatctccgaac

SEQ ID NO: 341518 - DNA, 2442 bp, Homo sapiens
  misc_feature (42)..(42): n is a, c, g, or t
  misc_feature (2428)..(2428): n is a, c, g, or t
  misc_feature (2442)..(2442): n is a, c, g, or t
agcggggtcacgccttccgggccccgcggctggccggctccncgcgccctcccctctctcggccgctcttcgggccgcctctgcgtgtggggccgcccgcgccagtgtgagcctgagctgacggcggctccgggaggctcgcagaaggggagggccgggcggcgcgggagctgagcatcgccagggcgggcggcagggcgcggcctctccgccgggtgtaccacctgtcgcggcgcgagacctctggtgaaagaaaagatgttgtcccggttaagagtagtttccaccacttgtactttggcatgtcgacatttgcacataaaagaaaaaggcaagccacttatgctgaacccaagaacaaacaagggaatggcatttactttacaagaacgacaaatgcttggtcttcaaggacttctacctcccaaaatagagacacaagatattcaagccttacgatttcatagaaacttgaagaaaatgactagccctttggaaaaatatatctacataatgggaatacaagaaagaaatgagaaattgttttatagaatactgcaagatgacattgagagtttaatgccaattgtatatacaccgacggttggtcttgcctgctcccagtatggacacatctttagaagacctaagggattatttatttcgatctcagacagaggtcatgttagatcaattgtggataactggccagaaaatcatgttaaggctgttgtagtgactgatggagagagaattctgggtcttggagatctgggtgtctatggaatgggaattccagtaggaaaactttgtttgtatacagcttgtgcaggaatacggcctgatagatgcctgccagtgtgtattgatgtgggaactgataatatcgcactcttaaaagacccattttacatgggcttgtaccagaaacgagatcgcacacaacagtatgatgacctgattgatgagtttatgaaagctattactgacagatatggccggaacacactcattcagttcgaagactttggaaatcataatgcattcaggttcttgagaaagtaccgagaaaaatattgtactttcaatgatgatattcaagggacagctgcagtagctctagcaggtcttcttgcagcacaaaaagttattagtaaaccaatctccgaacacaaaatcttattccttggagcaggagaggctgctcttggaattgcaaatcttatagttatgtctatggtagaaaatggcctgtcagaacaagaggcacaaaagaaaatctggatgtttgacaagtatggtttattagttaagggacggaaagcaaaaatagatagttatcaggaaccatttactcactcagccccagagagcatacctgatacttttgaagatgcagtgaatatactgaagccttcaactataattggagttgcaggtgctggccgtcttttcactcctgatgtaatcagagccatggcctctatcaatgaaaggcctgtaatatttgcattaagtaatcctacagcacaggcagagtgcacggctgaagaagcatatacacttacagagggcaggtgtttgtttgccagtggcagtccatttgggccagtgaaacttacagatgggcgagtctttacaccaggtcaaggaaacaatgtttatatttttccaggtgtggctttagctgttattctctgtaacacccggcatattagtgacagtgttttcctagaagctgcaaaggccctgacaagccaattgacagatgaagagctagcccaagggagactttacccaccgcttgctaatattcaggaagtttctattaacattgctattaaagtgaaagaaaagatgttgtcccggttaagagtagtttccaccacttgtactttggcatgtcgacatttgcacataaaagaaaaaggcaagccacttatgctgaacccaagaacaaacaagggaatggcatttactttacaagaacgacaaatgcttggtcttcaaggacttctacctcccaaaatagagacacaagatattcaagccttacgatttcatagaaacttgaagaaaatgactagccctttggaaaaatatatctacataatgggaatacaagaaagaaatgagaaattgttttatagaatactgcaagatgacattgagagtttaatgccaattgtatatacaccgacggttggtcttgcctgctcccagtatggacacatctttagaagacctaagggattatttatttcgatctcagacagaggtcatgttagatcaattgtggataactggccagaaaatcatgttaaggctgttgtagtgactgatggagagagaattctgggtcttggagatctgggtgtctatggaatgggaattccagtaggaagtgtgtattgatgtgggaactgantatatcgcactctn

SEQ ID NO: 341519 - DNA, 1244 bp, Homo sapiens
cgtaatcgacggttctccttatttcagtatgggaaaattctttcaaaattatttgaaggctggacaaaaaattccacagctgtaatcctcaggatcactgtgcagtcttcaagattcagatacagaggaagcttcaattcaacctttcagagaagacattccagctcgcatgatctcatcaaccaagagaatgttggtggcaatcacagtgcaggagtgaagaagctgtttcttttcagcatgcacacagctctctgtaccttggccaggactccaccaggcaccacagtgggaggctggtagttgatgccaaccttgaagccagtggggcaccaatccacaaactggatggtacgcttggtcttgatggtggcaatggcagcatttgcacataaaagaaaaaggcaagccacttatgctgaacccaagaacaaacaagggaatggcatttactttacaagaacgacaaatgcttggtcttcaaggacttctacctcccaaaatagagacacaagatattcaagccttacgatttcatagaaacttgaagaaaatgactagccctttggaaaaatatatctacataatgggaatacaagaaagaaatgagaaattgttttatagaatactgcaagatgacattgagagtttaatgccaattgtatatacaccgacggttggtcttgcctgctcccagtatggacacatctttagaagacctaagggattatttatttcgatctcagacagaggtcatgttagatcaattgtggataactggccagaaaatcatgttaaggctgttgtagtgactgatggagagagaattctgggtcttggagatctgggtgtctatggaatgggaattccagtaggaaaactttgtttgtatacagcttgtgcaggaatacggcctgatagatgcctgccagtgtgtattgatgtgggaactgataatatcgcactcttaaaagacccattttacatgggcttgtaccagaaacgagatcgcacacaacagtatgatgacctgattgatgagtttatgaaagctattactgacagatatggccggaacacactcattcagttcgaagactttggaaatcataatgcattcaggttcttgagaaagtaccgagaaaaatattgtactttcaatgatgatattcaagggacagctgcagtagctctagcaggtcttcttgcagcacaaaaagttattagtaaaccaatctccgaac

SEQ ID NO: 341520 - DNA, 2548 bp, Homo sapiens
  misc_feature (42)..(42): n is a, c, g, or t
agcggggtcacgccttccgggccccgcggctggccggctccncgcgccctcccctctctcggccgctcttcgggccgcctctgcgtgtggggccgcccgcgccagtgtgagcctgagctgacggcggctccgggaggctcgcagaaggggagggccgggcggcgcgggagctgagcatcgccagggcgggcggcagggcgcggcctctccgccgggtgtaccacctgtcgcggcgcgagacctctggtgaaagaaaagatgttgtcccggttaagagtagtttccaccacttgtactttggcatgtcgacatttgcacataaaagaaaaaggcaagccacttatgctgaacccaagaacaaacaagggaatggcatttactttacaagaacgacaaatgcttggtcttcaaggacttctacctcccaaaatagagacacaagatattcaagccttacgatttcatagaaacttgaagaaaatgactagccctttggaaaaatatatctacataatgggaatacaagaaagaaatgagaaattgttttatagaatactgcaagatgacattgagagtttaatgccaattgtatatacaccgacggttggtcttgcctgctcccagtatggacacatctttagaagacctaagggattatttatttcgatctcagacagaggtcatgttagatcaattgtggataactggccagaaaatcatgttaaggctgttgtagtgactgatggagagagaattctgggtcttggagatctgggtgtctatggaatgggaattccagtaggaaaactttgtttgtatacagcttgtgcaggaatacggcctgatagatgcctgccagtgtgtattgatgtgggaactgataatatcgcactcttaaaagacccattttacatgggcttgtaccagaaacgagatcgcacacaacagtatgatgacctgattgatgagtttatgaaagctattactgacagatatggccggaacacactcattcagttcgaagactttggaaatcataatgcattcaggttcttgagaaagtaccgagaaaaatattgtactttcaatgatgatattcaagggacagctgcagtagctctagcaggtcttcttgcagcacaaaaagttattagtaaaccaatctccgaacacaaaatcttattccttggagcaggagaggctgctcttggaattgcaaatcttatagttatgtctatggtagaaaatggcctgtcagaacaagaggcacaaaagaaaatctggatgtttgacaagtatggtttattagttaagggacggaaagcaaaaatagatagttatcaggaaccatttactcactcagccccagagagcatacctgatacttttgaagatgcagtgaatatactgaagccttcaactataattggagttgcaggtgctggccgtcttttcactcctgatgtaatcagagccatggcctctatcaatgaaaggcctgtaatatttgcattaagtaatcctacagcacaggcagagtgcacggctgaagaagcatatacacttacagagggcaggtgtttgtttgccagtggcagtccatttgggccagtgaaacttacagatgggcgagtctttacaccaggtcaaggaaacaatgtttatatttttccaggttacagaatacctatatgctaataaaatggctttccgatacccagaacctgaagacaaggccaaatatgttaaagaaagaacatggcggagtgaatatgattccctgctgccagatgtgtatgaatggccagaatctgcatcaagccctcctgtgataacagaatagaagcactcccctgataaatactttctgtgctccagggaaccccttttttcagacaagaagagataatgtcttcagttttatggtgttttctgtgttttgttctccctgaccactttggttgatgtattttttccatgcgtctccacatctgttggggtagacgtgttgattgattgcattgcccaccagcaccctacagtcagatagttgtgatgctttaattctaacatacagcccgtaccacatccaggagatgtaaaaagtgtgtttgtgaatgtcttcacttgtactctaattcagacttgccaaagtatttgctatttactattatgggtaatactcttctctggcctagttcttacagagctactaaaatagaaatttacttttatggatagaagtacagaattttgagaagaaactaaattttcaccaaattttaaggaaaaattgtcattatctaaaaatgttcttatatatctgcttcatcttaccttcatactctgaaattccctatagcagacagagctagggaaatattaaaaatttaccctatttattttctggaactaaatcaagccttaactataacattatgagagtaatgggaactactgctggctttaagtaaataaaagtcattgttttcaacagtgtataaaaatcatagtgtaacctttttatttaataaatatcttacattta

SEQ ID NO: 341521 - DNA, 3210 bp, Homo sapiens
  misc_feature (42)..(42): n is a, c, g, or t
agcggggtcacgccttccgggccccgcggctggccggctccncgcgccctcccctctctcggccgctcttcgggccgcctctgcgtgtggggccgcccgcgccagtgtgagcctgagctgacggcggctccgggaggctcgcagaaggggagggccgggcggcgcgggagctgagcatcgccagggcgggcggcagggcgcggcctctccgccgggtgtaccacctgtcgcggcgcgagacctctggtgaaagaaaagatgttgtcccggttaagagtagtttccaccacttgtactttggcatgtcgacatttgcacataaaagaaaaaggcaagccacttatgctgaacccaagaacaaacaagggaatggcatttactttacaagaacgacaaatgcttggtcttcaaggacttctacctcccaaaatagagacacaagatattcaagccttacgatttcatagaaacttgaagaaaatgactagccctttggaaaaatatatctacataatgggaatacaagaaagaaatgagaaattgttttatagaatactgcaagatgacattgagagtttaatgccaattgtatatacaccgacggttggtcttgcctgctcccagtatggacacatctttagaagacctaagggattatttatttcgatctcagacagaggtcatgttagatcaattgtggataactggccagaaaatcatgttaaggctgttgtagtgactgatggagagagaattctgggtcttggagatctgggtgtctatggaatgggaattccagtaggaaaactttgtttgtatacagcttgtgcaggaatacggcctgatagatgcctgccagtgtgtattgatgtgggaactgataatatcgcactcttaaaagacccattttacatgggcttgtaccagaaacgagatcgcacacaacagtatgatgacctgattgatgagtttatgaaagctattactgacagatatggccggaacacactcattcagttcgaagactttggaaatcataatgcattcaggttcttgagaaagtaccgagaaaaatattgtactttcaatgatgatattcaagggacagctgcagtagctctagcaggtcttcttgcagcacaaaaagttattagtaaaccaatctccgaacacaaaatcttattccttggagcaggagaggctgctcttggaattgcaaatcttatagttatgtctatggtagaaaatggcctgtcagaacaagaggcacaaaagaaaatctggatgtttgacaagtatggtttattagttaagggacggaaagcaaaaatagatagttatcaggaaccatttactcactcagccccagagagcatacctgatacttttgaagatgcagtgaatatactgaagccttcaactataattggagttgcaggtgctggccgtcttttcactcctgatgtaatcagagccatggcctctatcaatgaaaggcctgtaatatttgcattaagtaatcctacagcacaggcagagtgcacggctgaagaagcatatacacttacagagggcaggtgtttgtttgccagtggcagtccatttgggccagtgaaacttacagatgggcgagtctttacaccaggtcaaggaaacaatgtttatatttttccaggtgtggctttagctgttattctctgtaacacccggcatattagtgacagtgttttcctagaagctgcaaaggccctgacaagccaattgacagatgaagagctagcccaagggagactttacccaccgcttgctaatattcaggaagtttctattaacattgctattaaagttacagaatacctatatgctaataaaatggctttccgatacccagaacctgaagacaaggccaaatatgttaaagaaagaacatggcggagtgaatatgattccctgctgccagatgtgtatgaatggccagaatctgcatcaagccctcctgtgataacagaatagaagcactcccctgataaatactttctgtgctccagggaaccccttttttcagacaagaagagataatgtcttcagttttatggtgttttctgtgttttgttctccctgaccactttggttgatgtattttttccatgcgtctccacatctgttggggtagacgtgttgattgattgcattgcccaccagcaccctacagtcagatagttgtgatgctttaattctaacatacagcccgtaccacatccaggagatgtaaaaagtgtgtttgtgaatgtcttcacttgtactctaattcagacttgccaaagtatttgctatttactattatgggtaatactcttctctggcctagttcttacagagctactaaaatagaaatttacttttatggatagaagtacagaattttgagaagaaactaaattttcaccaaattttaaggaaaaattgtcattatctaaaaatgttcttatatatctgcttcatcttaccttcatactctgaaattccctatagcagacagagctagggaaatattaaaaatttaccctatttattttctggaactaaatcaagccttaactataacattatgagagtaatgggaactactgctggctttaagtaaataaaagtcattgttttcaacagtgtataaaaatcatagtgtaacctttttatttaataaatatcttacatttaattgcttcagttatgctatcttattgcccaactagaaatttagatttgcttatgaaaaacacatatttttgttacttctagatgattctaggagggagtataagatacctaatcatatgggaacatcacgtgactttttaaatctaaattagtcatgcttcacatcaaaatgagtcatatttaactggagaaactatgcccttattccagaactgatgctctttattgcttgagataattttggaatgttactatgatactgtttctttgaatatcattagtagtgacaactctttctccattgaaggcagacttaatttttttaaaccaccaacattaatttagagctaaatggggatgaataaggttggtgttcatctgggaaatgccttttttaatcccagtaaaatgggtaataatggctatccagaacagttttcttgtgtggcttgcatattgaagaattctaaaggaaaatatatctgtctacca

SEQ ID NO: 341522 - DNA, 2666 bp, Homo sapiens
  misc_feature (42)..(42): n is a, c, g, or t
agcggggtcacgccttccgggccccgcggctggccggctccncgcgccctcccctctctcggccgctcttcgggccgcctctgcgtgtggggccgcccgcgccagtgtgagcctgagctgacggcggctccgggaggctcgcagaaggggagggccgggcggcgcgggagctgagcatcgccagggcgggcggcagggcgcggcctctccgccgggtgtaccacctgtcgcggcgcgagacctctggtgaaagaaaagatgttgtcccggttaagagtagtttccaccacttgtactttggcatgtcgacatttgcacataaaagaaaaaggcaagccacttatgctgaacccaagaacaaacaagggaatggcatttactttacaagaacgacaaatgcttggtcttcaaggacttctacctcccaaaatagagacacaagatattcaagccttacgatttcatagaaacttgaagaaaatgactagccctttggaaaaatatatctacataatgggaatacaagaaagaaatgagaaattgttttatagaatactgcaagatgacattgagagtttaatgccaattgtatatacaccgacggttggtcttgcctgctcccagtatggacacatctttagaagacctaagggattatttatttcgatctcagacagaggtcatgttagatcaattgtggataactggccagaaaatcatgttaaggctgttgtagtgactgatggagagagaattctgggtcttggagatctgggtgtctatggaatgggaattccagtaggaaaactttgtttgtatacagcttgtgcaggaatacggcctgatagatgcctgccagtgtgtattgatgtgggaactgataatatcgcactcttaaaagacccattttacatgggcttgtaccagaaacgagatcgcacacaacagtatgatgacctgattgatgagtttatgaaagctattactgacagatatggccggaacacactcattcagttcgaagactttggaaatcataatgcattcaggttcttgagaaagtaccgagaaaaatattgtactttcaatgatgatattcaagggacagctgcagtagctctagcaggtcttcttgcagcacaaaaagttattagtaaaccaatctccgaacacaaaatcttattccttggagcaggagaggctgctcttggaattgcaaatcttatagttatgtctatggtagaaaatggcctgtcagaacaagaggcacaaaagaaaatctggatgtttgacaagtatggtttattagttaagggacggaaagcaaaaatagatagttatcaggaaccatttactcactcagccccagagagcatacctgatacttttgaagatgcagtgaatatactgaagccttcaactataattggagttgcaggtgctggccgtcttttcactcctgatgtaatcagagccatggcctctatcaatgaaaggcctgtaatatttgcattaagtaatcctacagcacaggcagagtgcacggctgaagaagcatatacacttacagagggcaggtgtttgtttgccagtggcagtccatttgggccagtgaaacttacagatgggcgagtctttacaccaggtcaaggaaacaatgtttatatttttccaggtgtggctttagctgttattctctgtaacacccggcatattagtgacagtgttttcctagaagctgcaaaggccctgacaagccaattgacagatgaagagctagcccaagggagactttacccaccgcttgctaatattcaggaagtttctattaacattgctattaaagttacagaatacctatatgctaataaaatggctttccgatacccagaacctgaagacaaggccaaatatgttaaagaaagaacatggcggagtgaatatgattccctgctgccagatgtgtatgaatggccagaatctgcatcaagccctcctgtgataacagaatagaagcactcccctgataaatactttctgtgctccagggaaccccttttttcagacaagaagagataatgtcttcagttttatggtgttttctgtgttttgttctccctgaccactttggttgatgtattttttccatgcgtctccacatctgttggggtagacgtgttgattgattgcattgcccaccagcaccctacagtcagatagttgtgatgctttaattctaacatacagcccgtaccacatccaggagatgtaaaaagtgtgtttgtgaatgtcttcacttgtactctaattcagacttgccaaagtatttgctatttactattatgggtaatactcttctctggcctagttcttacagagctactaaaatagaaatttacttttatggatagaagtacagaattttgagaagaaactaaattttcaccaaattttaaggaaaaattgtcattatctaaaaatgttcttatatatctgcttcatcttaccttcatactctgaaattccctatagcagacagagctagggaaatattaaaaatttaccctatttattttctggaactaaatcaagccttaactataacattatgagagtaatgggaactactgctggctttaagtaaataaaagtcattgttttcaaca

SEQ ID NO: 341523 - DNA, 1169 bp, Homo sapiens
gtgggccacgccttccgggccccgcggctggccggctcctcgcgccctcccctctctcggccgctcttcgggccgcctctgcgtgtggggccgcccgcgccagtgtgagcctgagctgacggcggctccgggaggctcgcagaaggggagggccgggcggcgcgggagctgagcatcgccagggcgggcggcagggcgcggcctctccgccgggtgtaccacctgtcgcggcgcgagacctctggtgaaagaaaagatgttgtcccggttaagagtagtttccaccacttgtactttggcatgtcgacatttgcacataaaagaaaaaggcaagccacttatgctgaacccaagaacaaacaagggaatggcatttactttacaagaacgacaaatgcttggtcttcaaggacttctacctcccaaaatagagacacaagatattcaagccttacgatttcatagaaacttgaagaaaatgactagccctttggaaaaatatatctacataatgggaatacaagaaagaaatgagaaattgttttatagaatactgcaagatgacattgagagtttaatgccaattgtatatacaccgacggttggtcttgcctgctcccagtatggacacatctttagaagacctaagggattatttatttcgatctcagacagaggtcatgttagatcaattgtggataactggccagaaaatcatgttaaggctgttgtagtgactgatggagagagaattctgggtcttggagatctgggtgtctatggaatgggaattccagtaggaaaactttgtttgtatacagcttgtgcaggaatacggcctgatagatgcctgccagtgtgtattgatgtgggaactgataatatcgcactcttaaaagacccattttacatgggcttgtaccagaaacgagatcgcacacaacagtatgatgacctgattgatgagtttatgaaagctattactgacagatatggccggaacacactcattcagttcgaagactttggaaatcataatgcattcaggttcttgagaaagtaccgagaaaaatattgtactttcaatgatgatattcaagggacagctgcagtagctctagcaggtcttcttgcagcacaaaaagttattagtaaaccaatctccgaac

SEQ ID NO: 341524 - DNA, 691 bp, Homo sapiens
  misc_feature (645)..(645): n is a, c, g, or t
  misc_feature (652)..(652): n is a, c, g, or t
  misc_feature (679)..(679): n is a, c, g, or t
gtgggccacgccttccgggccccgcggctggccggctcctcgcgccctcccctctctcggccgctcttcgggccgcctctgcgtgtggggccgcccgcgccagtgtgagcctgagctgacggcggctccgggaggctcgcagaaggggagggccgggcggcgcgggagctgagcatcgccagggcgggcggcagggcgcggcctctccgccgggtgtaccacctgtcgcggcgcgagacctctggtgaaagaaaagatgttgtcccggttaagagtagtttccaccacttgtactttggcatgtcgacatttgcacataaaagaaaaaggcaagccacttatgctgaacccaagaacaaacaagggaatggcatttactttacaagaacgacaaatgcttggtcttcaaggacttctacctcccaaaatagagacacaagatattcaagccttacgatttcatagaaacttgaagaaaatgactagccctttggaaaaaatactgcaagatgacattgagagtttaatgccaattgtatatacaccgacggttggtcttgcctgctcccagtatggacacatctttagaagacctaagtaaggcttgtttaaaaaaaaaaagctttgggtaaaaaaaattggggnatttttnaaattttttgggggaaaaaaatttttnaaaaaggggggg

SEQ ID NO: 341525 - DNA, 725 bp, Homo sapiens
agtgttcttttcttataatgtctttgtatggctctggtattagggcaatgttggccttataggatgaatgaggaagtgttccctcctctccaattttttggaaaagtttgagaaggattgatattaattcattaaaggtttagtagaattcacccatgaagccatcaggtccagagcttttctttgttgagagatttttgattaccaattcaatctccttactagttatagatctattcagattttctgtttgtgatttagtcttagtagatttgtatttctaggaatttgtccatttaatctaggttatccagtttattggtgtacagttgttcataagttcatagtactctcttataatccttctatttctgtagaattggtaataatgtccccattttcatttctggttttaatcatttgagtcttctctttttttcttagtacatctagttaaaggtttgtcaattttgttgatatttttaaagaaacaacttttggcttctctattgtttttctattctctattcatttctgctttaatttttattattttcttctgctagctttgggtttagtttgcttttctagtttcttaagttttagagttaggttattgattcaagatctggttttttttttgtttgtttgtttgtttgtttttagagggagtcttgctctgttgcccaggctggagtgcagtggtgtgatctcggctcactgca

SEQ ID NO: 341526 - DNA, 264 bp, Homo sapiens
taaaaactaggcaaactatattgtttaaagatgcttgtttaggaagtaaatcaataaagaaaagcaaagaattagctgagtgcaatggcacgtgcctatagtcccagctacttggaaggctgaggtgggagaatcacttcaggccaggaggccaaggctgcagtaagccataatcatgccactgcactccagggtgacagagcaagattctgtctctaaaaaaataataataaataagaagaagaaaaagaagtgaatatcaaa

SEQ ID NO: 341527 - DNA, 521 bp, Homo sapiens
gcccatcaatgggagaaggtctgttatgggaagactgtattgaattaaaaggttaatatcaggctgagctcagtggctcatacctgtaatcccagcactttgggaggttgatgctattactatctctactttactcaggcacagagcagctaagccatttgtccaggttcacagagctagcaggtggccatgcttacacccacagcacctgatactgtctgaaccattccctaaagtatttctacagaagagtactaataagatttttaaatcctgcaggatttttcttattattcttttcaaatattgtgtaatctaataccatgccatccttgatatctaactcattttagagataaaaatgcttaccctaaataccatcatataatctatatttctataaccccaacagcaatattgcaggttagaatccaagtgtgcagaatatttgtgaagatcagtgtagataatactgaaatgacagtgatgaggaagaaggtactagaacacagcccttcccg

SEQ ID NO: 341528 - DNA, 191 bp, Homo sapiens
ttcaacatgaaaatctgtgcagaactcttctgctaccaaactcaaacacttaataggctgttcatattaatgggtggccctcagcatcaaggatgcaatgaggaatggttgagactatagtaatttggagaggacagcgtcactgtaaaacagatagctacagctcaattagttctaacagctgccatgtg

SEQ ID NO: 341529 - DNA, 676 bp, Homo sapiens
taattactaaaacaatagtatgtgaatctttaaaaccaaatcggggttcgaggtggggtggagttgaataagaaggaatgagctggaaaatggtggtgcccagattcgaatccaggatgccaagttcccaagcctatttgcaaaagaataccaccacattgcatacaatcagctctcagaaatcacatgtgtgtccttaggaaacaaacatactatttccgcttgtcatcttttctcaaagcacatgaagacctaagatttaaatcctcagtggatcaagagttgatgagaaattaccaccacaggccacactccatacacagcacttgtttttggcctctccaaaggaaatctttccaagtaggttggaaagtcaacaagatggtaactagaagcagaactttttttattgctagaactatccaagcccatcgccactttaaattttgcctaaaaattaacaatccctgggcaaaagctctttctcatagccgaaggagcagtgataacctcacacctaaactctgcattgctctcctattgaaagacatttctggccgggcgcagtggctcatgcctataatcccagcaccttgggaggccgaggcgggcagattacctaaggtcaggggtttgagaccagcctaacatggtgaaagtccgtctctattaaaaa

SEQ ID NO: 341530 - DNA, 132 bp, Homo sapiens
ctgggctttgggcttaggtcagcagctctgtcttccagcatggcttctgtttctagtttgagcaacactgaaggaccaggggcaggggcggccccgagcccagtgccaggtcctgtgtggaatagaaaggtg

SEQ ID NO: 341531 - DNA, 375 bp, Homo sapiens
gagcagccttccctctgactcacttagctgtgaaaataggactctgccaaattactgggaactaacactgtagtaaaaccataagaaaattttgctaagaaaccttttctcatctgcaaattacttgactgaaacctgaggtgctggatttcagcacaaaggtgactttggaggggaaattttgtgccaaactggatctgttgtttttgtgttatgtaaaaaggagaaaaaaaatgaactgtttactcctaagctataaatttaagattatcctattacaccaaatgacagaatttccgaacctcaaaccttactttagagctatattttcataaactatgatctgtacccaatcaaaactagatgtaattgaat

SEQ ID NO: 341532 - DNA, 408 bp, Homo sapiens
ggcacagtgatttgcggcactggaatccctcagtcagagtctcagaatctctgctcttccaagtgagtggccccgggcaaggccgtactctccctacacctcaccttcgtcgtttgcagaaacgagaatcggagcagacacggaccgtgtcctccctcatcacatccacacacgacctggagaggggtgcactgggccagggctgggggtgagcttgggtgttcgtgactcaagttgcaaacggccctctgcccaaaatgatacaaaaccacaatgacatcagtgctgatatcagagatagtttacaggaaccctttaccctgaaaaggactactcttagattgctgaagtcaccagataagccatttcctgtcgttttaaagtaaataaaatgctactgcctggaat

SEQ ID NO: 341533 - DNA, 346 bp, Homo sapiens
ctttatgaaattttacctagtggttaaatagggcacatgttccaacaaatcaatcactatgcattgattttgaatgatttaagctattgcatgtttccaagaatgtcttctagtttctatggtgaagatttttatgaaacctcaaagatgccttgtcctgaggccatcaaacacctatttccacttatagcacagtggaagaccataatccttcctgtaactgaaaatggttatgaaccatataatttggttacagttacagtcctgtagagggctcaaccttcctcttttatttgatctgttagtgtcctctggcacagggtgccatgacaagaggacatgccct

SEQ ID NO: 341534 - DNA, 214 bp, Homo sapiens
ttctggctttcatcttccctaatatttgttctcacccttttccttagtacgtgtgtatgtgtgtgtactgtagaaaaaccctatgctactgttctgaaattgtagattctataaatgggttgggaatgaccatcttaggttgggttcctcagaagcaaaccctaaaacaagacctcaagtgtaagcagtttatttgagaggtggtggaaaaact

SEQ ID NO: 341535 - DNA, 229 bp, Homo sapiens
tttgtatttttagagagacggggtttcaccgtgttagccaggatggtctcgatctcctgacctcgtgatccgcccatctcggcctcccaaagtgctgggattacaggcgtgatccaccgcgcccggccaaaagacataagtctatttaatatttaattctgaattgttgacaaacattggtataaaacaacaggcttcacaaaggaaaggaactactacatagcttgac

SEQ ID NO: 341536 - DNA, 975 bp, Homo sapiens
agatatcactgagactgtcaaagaggctggctcagaacgttgaagcaaagagttggaacctaccatctgtttgtattataaattatgttgacagcatcttaaatgatttgggaaacatttatttggaggagtatccagtaaactactaagctgaatctatacctactaaacattaaccaaagattttcctgattgtgttatccctaccattttgtcaaaatcttcttgaggctttacaatgcattctgtatcgtagggcagaagggcattccaagaagtcgaaatttcagaaatgtatgacctgtgagtcttcctgcaaatgtggttgtaacttttagtctgggcaaattcttactagtctttgtacactagagtttctatacaaatacacatatgtgcttcttgtagggcaaggatgtctcaaggctcaacctcattttcatatcattagttattaagatcactgcagcagcttatatagtttcattgcatcaatttcccaaacagtactttaggcttgatacctacccagtacctgccaatgttacagaatagttttagttattataatagttgttcttttcatcagtaacaaaaggatatacagttcatctgtctgtactcacattttgctgaaaacaatataaaagagcctgaaaagcacatagttccttttttcttttgtaatcctagcattaatgtgtgcagctgtccatgtgaaataccaaaattaattgaacatgaaaaatatttttaaactaaagatacaaggaaacaaacacttattatatacattttttatgacagacatttacacccaacagttttatgaaggaggtcctattattacagttttatagatgaagttactgtggcccagataatttaagtaacttgcccaaagttatacggctagtatataggagaattgggatttgtacccaggtttgtttgattccagtatgcacaccagtt

SEQ ID NO: 341537 - DNA, 386 bp, Homo sapiens
tatgcttttattcttgatgtatgtagaacaagcccaatttgaattaatgaaaagtatgattaatttatttttatttttattattttttttaaccaggagtggtggcacacgcctgtaatcccaaacactttaggaggcttaggcaggaggattgcttgagcccaggagtttgagaccagccagggcaagatagtgagaccctgtctctacaaaacattttaaaattagctgggcgtggtggcgtgcacctgtagtcgcagctagttgggggctgaggtgggaggattattggagcctcgagatcaaggctgcagtgagccaagattgcgccactgcattctagcctgggcaacaaaacgagaccctgtcttaccaaaaaaaaaaaa

SEQ ID NO: 341538 - DNA, 372 bp, Homo sapiens
caggaacgctagcgcccatctctagtccttcagattgagatttcaccatctttaaattcaaaacatcggaaggagcagtcgctagtcggggcagagcagcttcccaccttcacacagccacctccacaggcacagagccccagggctcatttttcctgcagtctccattggatataacacttacacccactcagctccctagctggcctcctctcagctgtgatcgcctcttccctgaagagctctctgaatttgagtaatgacatggctgtaccattcattttgtttaaacacatttttttttttggtgaaaaattgcaaacaacctataattcaaaaattactgtaggcaaataaattatggcacatcaa

SEQ ID NO: 341539 - DNA, 447 bp, Homo sapiens
tttgaattcattaacaaaccaaaaaaacaaatcctactattactttgaagtacttgattaacaaattaatgagaattttgctaccagtattgtctctttgcagcagttgggtacaaactagtaggtgtcttaaagtgatacactggattatacctgaagatcgtcctgccaaattttaactgttttttcactctaaaaacctgctcattgttatcaaggtagttttgctgcttcggatgatgctttataacatgacctcaagtttttagcactttggcctagagatctaaaagtaattatgtaaatatttactggtttatttttcaatattaaatgtgagtttcacatgcatagttaggtcttttgcaaagcaattcgtagacatgtgagtgtacctttgtaaatacaaagaagtatgaaacgtaatacataccgtgtgaggaagac

SEQ ID NO: 341540 - DNA, 1642 bp, Homo sapiens
ggattttagagtctatttccccaagcgccacattataactgtaaacttaccatcttctatgtagctgtgatatctcatctttctaaaatggaacttgttaaaaagtgttcaaacactatccctaatgcctgcggcagaatttatatacgatccattcattggggctcaaagtatcttttagacttttaaggacaatttacagcaaatgaaatttatgatgctgtgacaagaaatttaaagaatcaaaacgatggtttgaaaaggaaacctatgatacatgcaggagaagcaaaacccaagtgatttgtgagaaatatagaaattatttaaattactttatagtaattattaaacactaatttttgtactgtcattgaaggtgttttatagagaaatctgagaaatcacattcacaaattagaagtcaaacatggccaggcacagtggctcacacctgtaatcttcaggatttcaagaccagcctagccaacatgacgaaaccccatctctactgaaaatagaaaaaaaaaattagccaggcttgcacctgtaatcccagttacctgggaggctgaggcaggagaatctcttgagcccaggaggcggaggttgcagtgagctgagatgccaccaccacaccagcctgggtgacagagtgaaactcgtatctccaaacaaacaaacaaaaagtccttaaacatatgtgaacaaaaattttgtgatggaaggattctagttaatgagtattgcatcaagatttacatctttcttactaaggaaaagagttaataaaaattgttctttattttacaggcagttactgaggctcttcccagatctcagtaaacagccactcagccttgaaaatggagtgttgttgtttctaaacatatatttatgtcatttattaagtacagttcacttaaataacataagtagattttctcttgtagtgatttgggtaggaagaggccatgtttcagttcgttttctctgtagggtcgattgaattggaccttttcagttgttcagaaaaataaaaataatttctcatattaaatacagacgctcctcaacttatgatgtgggtaggtcccagtaaacccattataatttgaaaatatcatattgaaaatgcatttaatatctcttacctgaaatcataacttagccaagcctaccttaaatgttctcagaacatttagcctgcagttgggcaaaaccatttaacacaaagcctattttataatgaagtgttgaatagctcatgttatttactgaatactgttgtgaaagtgaaaaacaatgattgtatgggtactcaaagtataatttctactgaatgcatatcacttgtgcactgttgtaaagctgaaaaaccgttaagcctctacgatttttaagtaagttggggaccatcagtttaaaataaatgcaatactatttcatgataaacatggtcactgtaagttttactcttttgaatgagggtgcgacagaatgcagttagaatcagttcatatcaccattaaaatcatccattcagaaaccaaggccttgtctgcagaaattttttattcctttttctgttagcaaccagcactcaaacgttaaatttggtagttgatgtactttgtaacaa

SEQ ID NO: 341541 - DNA, 1453 bp, Homo sapiens
ggattttagagtctatttccccaagcgccacattataactgtaaacttaccatcttctatgtagctgtgatatctcatctttctaaaatggaacttgttaaaaagtgttcaaacactatccctaatgcctgcggcagaatttatatacgatccattcattggggctcaaagtatcttttagacttttaaggacaatttacagcaaatgaaatttatgatgctgtgacaagaaatttaaagaatcaaaacgatggtttgaaaaggaaacctatgatacatgcaggagaagcaaaacccaagtgatttgtgagaaatatagaaattatttaaattactttatagtaattattaaacactaatttttgtactgtcattgaaggtgttttatagagaaatctgagaaatcacattcacaaattagaagtcaaacatggccaggcacagtggctcacacctgtaatcttcaggatttcaagaccagcctagccaacatgacgaaaccccatctctactgaaaatagaaaaaaaaaattagccaggcttgcacctgtaatcccagttacctgggaggctgaggcaggagaatctcttgagcccaggaggcggaggttgcagtgagctgagatgccaccaccacaccagcctgggtgacagagtgaaactcgtatctccaaacaaacaaacaaaaagtccttaaacatatgtgaacaaaaattttgtgatggaaggattctagttaatgagtattgcatcaagatttacatctttcttactaaggaaaagagttaataaaaattgttctttattttacaggcagttactgaggctcttcccagatctcagtaaacagccactcagccttgaaaatggagtgttgttgtttctaaacatatatttatgtcatttattaagtacagttcacttaaataacataagtagattttctcttgtagtgatttgggtaggaagaggccatgtttcagttcgttttctctgtagggtcgattgaattggaccttttcagttgttcagaaaaataaaaataatttctcatattaaatacagacgctcctcaacttatgatgtgggtaggtcccagtaaacccattataatttgaaaatatcatattgaaaatgcatttaatatctcttacctgaaatcataacttagccaagcctaccttaaatgttctcagaacatttagcctgcagttgggcaaaaccatttaacacaaagcctattttataatgaagtgttgaatagctcatgttatttactgaatactgttgtgaaagtgaaaaacaatgattgtatgggtactcaaagtataatttctactgaatgcatatcacttgtgcactgttgtaaagctgaaaaaccgttaagcctctacgatttttaagtaagttggggaccatcagtttaaaataaatgcaatactatttcatgata

SEQ ID NO: 341542 - DNA, 627 bp, Homo sapiens
caagaaagtaaatatgttatcgcccaacacctacattctaaagagtctgccgttacacattaatctctgtcgagtatctctagtatctgtttaaccaaaaagtaacagttaccattggtgaacgccccagatcaggtactaagaattctctgtttcatattttaatcatcaccaaaaaaaaaaacaccaacatgtgaggtgggcattatcatttgattttacagaagacaaaaccaaagaattaagggtgaagcaatttcccaagtacacagaattaataattcatgaaacttggaatcaaacccaggccagttctttaaggcccctgtgagctgagtctagttcagtggtgtccaatcttttggcttccctgggccacattggaagaattgtcctgggacacacgtaaagctcactaacactgaagatagctgataagcttaaaaagaaattgcaaaaaaatctcataatgttttaagaatgtttacgaatttgtgttgggctgcattcaaagctgtcctgggccacatgcccagggcacatgggccatgggttggacaagctttctagacctttctctgttgtttcttagctgaaggtagcagagcagtaacttttttttttttt

SEQ ID NO: 341543 - DNA, 357 bp, Homo sapiens
gcttgttccattatccctaaatctattatgtgctttctagaatcatattgagatatatttttatttcttctaggctttgaaatgcattagactaagtggcatgcccttaagagttttttttgttttttgtttttttttttttttttttaccatgatgagatcattagtagtttcttaaaccaagtgtaagaatacaagcaatattcaatatctaaaaccataggaactgcccaggagaaatgccttgctgtgttggcaagtctcagataactatatcttttctgcaatcggttttagatcccctgatatacctctctccaattaaatatttctacaatatgtgttagaacatattgt

SEQ ID NO: 341544 - DNA, 1024 bp, Homo sapiens
tatcctggggccacccgagttaaaggggggaaatccgggggctgctgcacccgccaccggtctgggcccagccgggggccccctgtagtcgccgcagtcccggggagaggcacctgcccccagcccggggagggggcgccgcgggctcggggagcacggacaacccctacccatgaggccctgatggaaaacacaaaggatctgagtcggaagagacattagaggtcatccaaagcagccgtcccctctgcagcctctctgacaagtgactgaacattcttcacgatctgaaaggaaaagaagagattctttcgggatgtttgacggttatgatagctgcagtgaggacacaagcagcagctccagctccgaagagagtgaggaagaagtcgctcctttaccttctaatctcccgattatcaaaaacaatgggcaagtctacacatacccagatggtaaatctggcatggctacctgtgagatgtgtgggatggttggcgtccgagatgctttttactctaaaacaaagcgtttctgtagcgtttcatgttcaagaagttactcgtcaaactccaagaaggcaagcattttggccagacttcagggtaagcctccaacaaagaaagcaaaagttcttcagaaacaacctttagttgctaagctagccgcatatgctcagtatcaagctaccttgcaaaatcaagcaaagacaaaagcaggtaatattggtgaatctgacagaggtgaaatatatgacattgattcatttagttttaattaatgacattgtaattttgaattctgtttaactagctgtttctatgtcctgtcagcacattacagctctaagcttcctaatagttgttttgatttcaataaattactctagaagagtatagttgcatgcataagttcaagtgcttttggcagtctccttaatgtttttatttggtttattatttacttttcatgtacagattctttgaattgtgaagatattaggcaaagaaatgggatgttcagc

SEQ ID NO: 341545 - DNA, 560 bp, Homo sapiens
gcacaataccagtgttctctctgacttctctgtgcaggcttctttatcatttgtataggagatagaagaaatgttcaaggcaaattttttaattaaaactttcagatggcaggagaaattatttaaactgttagatgaagattgattttattatatcatcataacaccagtgtttttattttgttaattagctacctgtgagatgtgtgggatggttggcgtccgagatgctttttactctaaaacaaagcgtttctgtagcgtttcatgttcaagaagttactcgtcaaactccaagaaggcaagcattttggccagacttcaggtaacggtacagaaactttcttacttatatccattatttctatggcttttgccatttatctgtcatttgactgtgattcactgtactccacctctgcccactcagttatggttttataccacatcttgaggaaacatgtgagccccaaagtttgttcagcctataaaattgaaaaactattttaaatggataaggcatactatccaaataaactattatttgcagaagttaatta

SEQ ID NO: 341546 - DNA, 523 bp, Homo sapiens
cctcaatgtttacttaagcagaatgtgtagtatgcagtccagttaaattgtggtggtgaggggatgaaaaagaatcctatttacttaacttttcttgttttagggtaagcctccaacaaagaaagcaaaagttcttcagaaacaacctttagttgctaagctagccgcatatgctcagtatcaagctaccttgcaaaatcaagcaaagacaaaagcaggtaatattggtgaatctgacagaggtgaaatatatgacattgattcatttagttttaattaatgacattgtaattttgaattctgtttaactagctgtttctatgtcctgtcagcacattacagctctaagcttcctaatagttgttttgatttcaataaattactctagaagagtatagttgcatgcataagttcaagtgcttttggcagtctccttaatgtttttatttggtttattatttacttttcatgtacagattctttgaattgtgaagatattaggcaaagaaatgggatgttcagc

SEQ ID NO: 341547 - DNA, 739 bp, Homo sapiens
ctggctaatttttgtatttttagcagagacaggatttcaccatgttggccagagtggtctcaaactccacacctcaggtgatctgcccacctcggcctcccagagtctcaaacttctgacctcaggtggtccgcccacctcggcctcccaaattgctgggattacaggcgtgagccactgcgtccagccaaaaccttgttactttgagcagtcagcaaagaaatagtactttatccttccccctttctcattgatcttcccagaatttttttactctgaagtaagcaattttaacactcacttcttgcctggtaagactaatgtcatagaagaaagaatcatcaggggttggatcgctctctccatctgctggcccagtggattcgatgtcttataaatctttttggaagtagttgggacatacatttatatgttaagtatttataggggtgatgataaggattaattttaaaaaggtaaaacattccttctgtaatgttttgcagacttctgagaaaagaactgtttgagatataaagaactgctttttgcgcgagtggcataaatgagtgaagtgagaattaccgtgtgtgaaaagataactgttgggtggtgggcttaatgcatgggtgatgaaataatctgtacagcaaacctcctgtaacagaccttcatatgtacccccaaacctaaaataaaagttaataaaaatcaataaatcaataaataaaagctggaa

SEQ ID NO: 341548 - DNA, 522 bp, Homo sapiens
ctttcaactacaattgaaaaacaatttttaagaaaaaagatatattaagttgaagcacctatatacaaacaaggtgataattccaaacaatcctagtttaaataaaagttctgccaatattgggatcattttttcagctaccaacagggagtctttatcgtgagtacttggaagtaataaaacactgttattattcagaatattttaaaatatagattgtgaaaactgctaaattgcttaaggtaccttagtaattaaaataaaaggtattgaaaaaaaataaaaacttaaagcctcttaaaagcagatttataatgaaggccttaattggtatcataaacctttcttttagctttagccagtttcctaaagatggagcatacttttgaacctaacagaaaacgtttatgttttatattttaaagaacataaaactgcaaaatctctgcatttattaatgccacaaacatgttcagtaaattttgttaatttaaaaaaaaaaaacctgttcaaaaatttttt

SEQ ID NO: 341549 - DNA, 423 bp, Homo sapiens
cataaatttgcaaagttaattaggactctgatcttaacgcatttccccccatttcattcctaacgctctgccgggggtgtccaagggagaggaatacagccgtgggttcttggtttctgtttctggttgagccaataaagcctcttcctcatccctcttttccgcttatcactagagacataatagaaaaactatataaaaatagaaggaatgtcttaaactccttttcccttttataattagttggcagagagacatttaaagtgtgcatatacttcaggaagacaccatataaatatgatttttatctaggtatgacatggcttcaggctgctaaaagcctaaaacaaaacaaagcaaaacaaaacaaaacagaaacaacaacaaaaacaaaataaggcgggttggacaagattgctagta

SEQ ID NO: 341550 - DNA, 953 bp, Homo sapiens
cgcttgaggctttcgagttgccgcttggggctttcgagttgctcaatgagtagttttgcataaatacacactataccactgtataatgtatgtatatttaagtaatgtatagttctattaaactgtacactcagagtgaatttgtgttaaaaaaaaaaattaaagacctaaatagaaacattccatgttcagatattgccaagatggaaacactccccgaatatacaggttaaatacaatcgttagaagactccccaagctggtttctctgtagaaacagatcctaaaatttataaacaaacccaagaactggcacagtgtctcacacctataatcctaacactttgggaggctgaggtgggaggatctgagggtgtagtgaaatcagtaggttggagtgaaatcagaagccccatacactgctagtgggaatacaatgggtgagccactctgctttaggtgtacatccaagtaaaatgacatgtctacaagcgttcatagcagtcaacaagtagaagcaactcaaatgctcaccaactgatgaataaccaaacatacccatacaatgtattcaaccatataaataaatggagtactgataatgctataacatggatgaaacttgaaaacactgtgctaagaaaacagtcacagaagtccattcgtgcaaaattatgagggacaggaaacctatagacaaagttcattcgtggttgactagagctgaagagcatgaggggtaatacctatagagtacgatttctcattgaggtgatgaaatgttctaaaattgattatggtgatggctacacaactatgcatactaaaaccactgaactgcacactatttttttttgagttttactcttgttgcccaatctggaatgcaatggtgcgatctcggctcactgcaacctccgcctcccgggttcaagcaattctcctgcctcagc

SEQ ID NO: 341551 - DNA, 667 bp, Homo sapiens
tcattattagtccacagggagacgcaatcaaacccacaatcagcacttcataccaccaggattagagtcagataatggcaagtgagggtgtagtgaaatcagtaggttggagtgaaatcagaagccccatacactgctagtgggaatacaatgggtgagccactctgctttaggtgtacatccaagtaaaatgacatgtctacaagcgttcatagcagtcaacaagtagaagcaactcaaatgctcaccaactgatgaataaccaaacatacccatacaatgtattcaaccatataaataaatggagtactgataatgctataacatggatgaaacttgaaaacactgtgctaagaaaacagtcacagaagtccattcgtgcaaaattatgagggacaggaaacctatagacaaagttcattcgtggttgactagagctgaagagcatgaggggtaatacctatagagtacgatttctcattgaggtgatgaaatgttctaaaattgattatggtgatggctacacaactatgcatactaaaaccactgaactgcacactatttttttttgagttttactcttgttgcccaatctggaatgcaatggtgcgatctcggctcactgcaacctccgcctcccgggttcaagcaattctcctgcctcagc

SEQ ID NO: 341552 - DNA, 264 bp, Homo sapiens
gacagattgattttaacaacatgtttcccgtaagtcctaactaaatggcactggaaaatctttctgttaagaaaaggaaaataaatggaccttcaacaggctctttataagcaaaggcattttcgtgccccagagaacagtcttgtaaaagggagatttataagggacttccaggaagcaagagttcagtaattttctaacactgaagcaaagcaacgggaactaggtttaccatctccaagacacaacccctattttgctaga

SEQ ID NO: 341553 - DNA, 846 bp, Homo sapiens
atacctggtgctcttcctgtgtgtctctcttcatatggcattgtcggcttcttatagggatacccagtcacattggattagggcccaccatcacgtcataacttcattttaacttgtctacatctgcaaagaccctatttccaaagaaggtcacattcataactactggaggttagaactttgacattctgggggaggcaggacacaattcaacctgtaacaatatttgtgtttaaaaaaaaaccaaaactacagttaaggttccttgaacaccctatttatgagcccatacagatccattagagacaatactatgagaatgaagaacctggattaaggagccacactgtagaggttcaaatcccagctcagccacttacaagctacataactttgaggcagttcattaacttcccagtgcctcagtttccttatctgtaaaatagcagcacataggtcaaacggttgttaggaggattaaatgagttatcaagtacttagtacaatgcctggtacacactaggtactcaatcaacatgagcaattgttgatatgattatcaccattttcagcatcccaaagactcccctaggaagcattcttggggacagagcatgctttatttttatagcacctactgaaggcctatttccatagctgcttccccaatagtctcatgcttgactttcagagcatcagcaatttcatctgatgcagagttatactgctgcagtaaatattcttcatccatgccattattcaattcccttccttggtgcagacccctctgtgacatggcagtgatgctcatgaaggccggcggagtctccaagcagcaccacctag

SEQ ID NO: 341554 - DNA, 113 bp, Homo sapiens
acatgttcaggagagccccaggacacatttaataggtattcaggttcttttccactctacctagtctaagcttgcatctcagtcaactagaaacactgtagatcttagtttca

SEQ ID NO: 341555 - DNA, 253 bp, Homo sapiens
ggacgaggagaggaggggaaggaagaagaggtggggagaggaggagagaaagcaggggagaaaaagttactgcacgagtggggaaaactactgagatgtgtaaggttgtatgaaaatacatctgttccacaagtgtctcagtaaaatcaacatcaacaaaccacaaggcttaaaaaagtcacctaatcagtatatatgaaatggagacatcatttttacctatacactaatgcgggatcacccctcagcatct

SEQ ID NO: 341556 - DNA, 1014 bp, Homo sapiens
tacagacggggtttcaccttgttggtcaggtttgcctcaaatttctgacctcgtgatccacccaccttggcctcccaaagtgctgggattagaggtgtgagccaccactctcggcctgtatgtcttcttttgagaaatgtttatttagtcctttgcatactttttaatgggattattcctttattttttctgtttagttgtaacaaagtctttaataacaatttctaataggaagaaaactcactctggttaaccacactccatggtattgcagcatttaactatagaaactcaaaagaaacaaaacgtgatccttaactcaaaaggaataaaaaacttcaactaaattatcatagctccatacatgtatagctaacttcctgcctcctctgtcttctctttactcgaattaaccacattctttcatcatactcatattcctattagtttttcatatttctgatttgtaaaatgggctgttcaaagtgatttattgttcttaactttccatagaaaaacagtcaaaataaatatattatcagtatagatttgttttagaaattgaattttatggcatttgcatttttaatgtcagtgaatatataagttgactcattgatggtcttctatgtgttagcacttggcttataacacatctgattatacatgctgtcttattagcttaaaacttaattaaattgtatatgaaaattaaagttcaatcaagcatttcagagacccaaaattttctctgaagaaacctaggattgatcagaacataattgtggaagtccctaaagtacatcatctctaaggagcttcccatatgtaatattttctgatttttaagttatcacaacacacacacacaaaacaaacaaacaaacaaacaaaaaaacccttgttgaaggaataagggacagagttatgaaaaacactgaaaaaaatttaacaagttttaagaatttagagttagaccttatagggccaccaccctctctaaaaaaactttat

SEQ ID NO: 341557 - DNA, 318 bp, Homo sapiens
catatctaaattttactttacattatgttatcatcatgggtgtctctaagagaaagtctttgtgcagaaaagtgtggttttgtgagtgatgggccaaacatttcttcattaatctcaaactggcacagctgaaagatttcagggttagaccatactgacctaagcttggttttaagaatacagtacttctgtttggtgtttgtcctgctgtatatcaatagatcttcaatggaaaaccttttgttacatagagtcattaactaccatggtcatgtgtatagaatgatctttctcctcacctagggaagaagtctttta

SEQ ID NO: 341558 - DNA, 216 bp, Homo sapiens
agaaatagtaggaacagggtaatgccaccttaaccaagtgatcaaacttaatctcaccaacaatgggacaaaattgtcatttatcttctgatgtgattccatgaggatccatcacctatttagtgttatcaccaacaatatttagcctaaactgatcactaggactgatctgacaaattcaaattggggtcattctgcaaaataactggcctggag

SEQ ID NO: 341559 - DNA, 329 bp, Homo sapiens
tttgaatatttgcatatgtgtaatgaaatgtcttggggatgggacccaagtctaaatatgaaattgatttatgtttcatatataccttatgtacatagcttgaaggtaattttataaaatatttgaaataattttgtgcatgaaacaaagtttgtgtcaggtatttatatgtggaattttccacttgtggcatcacattggcactcaaaaagtttcagattggagcatttcagatttcagattttcagattaggattgctcaacctgtattatcttgctcaaagtccttttgtgacttctaattgccccaaaatccttaacatggttca

SEQ ID NO: 341560 - DNA, 85 bp, Homo sapiens
agagaagcagattgtggaataaaagagaggatgttccatgttcatatacacctgattgtagttagagcctcacccttcctttcta

SEQ ID NO: 341561 - DNA, 818 bp, Homo sapiens
cgctgcagttggcaggctgctgcgggaggcggcggcggtaggaagccggagacagcagggtgacaggtaggcggcggtgctgtctttgggggaggcaaagtgctagatgaagaggggttttcttctccttcggccgcggaaactacagacgggagctggcgagggtggtctggaaaggcggtagccgaattggaaaatatttaactcttaacaaatgaattccccacttgaactctgccgaattcctgtgccacctcctcctttagaaaactgatcttaatacagagataaaagaggagtagaaggtaaaagaaaatgctgggaactgaccgttgtgttgtggaagaatggttatcagaattcaaggcattacctgacactcagatcaccagttatgcagcaactttacaccggaaaaaaacacttgtaccagccctctataaagttattcaagattcaaataatgaggtaggagacctcaagaaaaataatttctacatagtgaaatgaaatatgtataccaaaacacataaatttaagttttataattttctttccttgtggatctggaaaattttctttctgctgtttttcattctgatagttgctttggctttccctattccctgcctttccatattttgaaatgttttggtcaaattttttcctgttgagtgtgcagtatgttttgattgttaattttattgaccatcatctcagtggattatttatttgaaacttttctgtttcctgttctggaatgtttcctgctctggaagccatattttaactgtatactgatccagctttatttatct

SEQ ID NO: 341562 - DNA, 714 bp, Homo sapiens
cgctgcagttggcaggctgctgcgggaggcggcggcggtaggaagccggagacagcagggtgacaggtaggcggcggtgctgtctttgggggaggcaaagtgctagatgaagaggggttttcttctccttcggccgcggaaactacagacgggagctggcgagggtggtctggaaaggcggtagccggtgtgttggtggtcccggaacctctcgtaaaccagaattggaaaatatttaactcttaacaaatgaattccccacttgaactctgccgaattcctgtgccacctcctcctttagaaaactgatcttaatacagagataaaagaggagtagaaggtaaaagaaaatgctgggaactgaccgttgtgttgtggaagaatggttatcagaattcaaggcattacctgacactcagatcaccagttatgcagcaactttacaccggaaaaaaacacttgtaccagccctctataaagttattcaagattcaaataatgagatacagcctccaagagtgcctctgctgtgtactggagtgagtttgaagaagttcaggtaatcctctcctaaccagcagcttaacttaaagtgcatcttcatttttgtcctaccactaaaagcttgcttattgacctccttctttcctgtctcctaaattgtgactggctctcagttagacttgcatctgttgctatttgtagcagcaattg

SEQ ID NO: 341563 - DNA, 864 bp, Homo sapiens
aaattcttctcaaatataaatgtagtacattggctaaaggactaataatctagtaaatttagtagtacagtatactgaaaggtacattgatgtatgggcacaaaatacttcttatagttagtggattggtcagtttaatatgtggtctctttacacaaaggttttggttaaattaaaatgtggagaaattaatattaagacttttaaaaatattatacagatataggtgccttaaaaaaaaaaaaacaacagttacaaccaaaagaattgaaatgaccagtgcactttattttccttttagctcctggagcctgtctgccatcagctgtttgagctctatcgtagctcagaggttcgacttaagaggttcacactgcagttcttgccagaattgatgtgggtttatttacggcttacagttagccgagacagacagagtaatggttgcattgaagcacttctgttaggaatttacaatttggaaatcgctgataaagatgggaacaataaagttctgtctttcactatcccctccttatccaagccttcaatataccatgaaccttcaacaattggatccatggctttgacagaaggggcattgtgtcagcatgatctcatcagagttgtttatagtgatcttcatcctcagagggaaacattcactgcacagaaccggtttgaagtcctgagttttctcatgctgtgttataattctgctattgtatatatgcctgcctcatcttaccaatctctttgtcggatgggttccagggtttgtgtgagtggctttccacggcaacatgaaaaacactggaaagaactctgtggtcgaatagtattggatcctgaatttatggtgca

SEQ ID NO: 341564 - DNA, 184 bp, Homo sapiens
ctgcctctgcctcctgaatagctggcactacaggtgcgtaccactgcactgggctagtttttgtatttttaatagggatggggtttcactatgtcgcacaagttagcctcgaactcctgagttcaagtggtccacccgccttgccctccaaaagtgctaggattacaggcatgagccaccacat

SEQ ID NO: 341565 - DNA, 120 bp, Homo sapiens
caagcgtgagccactgtgacctgcctttgtttcatattttcttccgtgtttttttcttccccccctcctgttgcccaggctggagtgcagtggcgtgatctcggctcactgcagcctcgc

SEQ ID NO: 341566 - DNA, 322 bp, Homo sapiens
ttgaaatgaccagtgcactttattttccttttagctcctggagcctgtctgccatcagctgtttgagctctatcgtagctcagaggttcgacttaagaggttcacactgcagttcttgccagaattgatgtgggtttatttacggcttacagttagccgagacagacagagtaatggttgcattgaagcacttctgttaggaatttacaatttggtaagttgaagatgacagtttgggaaattttaagtattttttaaggtcctctgaaataatacttaaggaatgtttagagaaaaataaattggccaggcgcagtggctc

SEQ ID NO: 341567 - DNA, 910 bp, Homo sapiens
cgctgcagttggcaggctgctgcgggaggcggcggcggtaggaagccggagacagcagggtgacagaattggaaaatatttaactcttaacaaatgaattccccacttgaactctgccgaattcctgtgccacctcctcctttagaaaactgatcttaatacagagataaaagaggagtagaaggtaaaagaaaatgctgggaactgaccgttgtgttgtggaagaatggttatcagaattcaaggcattacctgacactcagatcaccagttatgcagcaactttacaccggaaaaaaacacttgtaccagccctctataaagttattcaagattcaaataatgagctcctggagcctgtctgccatcagctgtttgagctctatcgtagctcagaggttcgacttaagaggttcacactgcagttcttgccagaattgatgtgggtttatttacggcttacagttagccgagacagacagagtaatggttgcattgaagcacttctgttaggaatttacaatttggaaatcgctgataaagatgggaacaataaagttctgtctttcactatcccctccttatccaagccttcaatataccatgaaccttcaacaattggatccatggctttgacagaaggggcattgtgtcagcatgatctcatcagagttgtttatagtgatcttcatcctcagagggaaacattcactgcacagaaccggtttgaagtcctgagttttctcatgctgtgttataattctgctattgtatatatgcctgcctcatcttaccaatctctttgtcggatgggttccagggtttgtgtgagtggctttccacggcaacatgaaaaacactggaaagaactctgtggtcgaatagtattggatcctgaatttatggtgca

SEQ ID NO: 341568 - DNA, 1063 bp, Homo sapiens
cgctgcagttggcaggctgctgcgggaggcggcggcggtaggaagccggagacagcagggtgacaggctggagtgcagtggcgtgatctcggctcactgcagcctcgcctcctgggctcaagtgattctcctgcctctgcctcctgaatagctggcactacagaattggaaaatatttaactcttaacaaatgaattccccacttgaactctgccgaattcctgtgccacctcctcctttagaaaactgatcttaatacagagataaaagaggagtagaaggtaaaagaaaatgctgggaactgaccgttgtgttgtggaagaatggttatcagaattcaaggcattacctgacactcagatcaccagttatgcagcaactttacaccggaaaaaaacacttgtaccagccctctataaagttattcaagattcaaataatgagatacagcctccaagagtgcctctgctgtgtactggagtgagtttgaagaagttcagctcctggagcctgtctgccatcagctgtttgagctctatcgtagctcagaggttcgacttaagaggttcacactgcagttcttgccagaattgatgtgggtttatttacggcttacagttagccgagacagacagagtaatggttgcattgaagcacttctgttaggaatttacaatttggaaatcgctgataaagatgggaacaataaagttctgtctttcactatcccctccttatccaagccttcaatataccatgaaccttcaacaattggatccatggctttgacagaaggggcattgtgtcagcatgatctcatcagagttgtttatagtgatcttcatcctcagagggaaacattcactgcacagaaccggtttgaagtcctgagttttctcatgctgtgttataattctgctattgtatatatgcctgcctcatcttaccaatctctttgtcggatgggttccagggtttgtgtgagtggctttccacggcaacatgaaaaacactggaaagaactctgtggtcgaatagtattggatcctgaatttatggtgca

SEQ ID NO: 341569 - DNA, 173 bp, Homo sapiens
taaaaccgtgtaatgctgaccatagaataggcgtgtgtatggatcaatgcaaaaaaattcagactctaaatataaactcttacatttttggtcacctgattttcaacaagggtgccaagaccattaaaaggaaaaaaaaaaaacaccaaaaaacaaactaacaaaaaaccccc

SEQ ID NO: 341570 - DNA, 122 bp, Homo sapiens
ttcagttattttaatagcagtacttttagagcccttgtacattttttatgtgtgcgaaaattatataatttctaagctgaatttggctgctatagttttacatatcagatgggggagaatga

SEQ ID NO: 341571 - DNA, 114 bp, Homo sapiens
cgtgaaccaccgtgcccagcctgagaaggctttatttctaaactccccacttaatgtaacactttacttctttctttttattgatatagataatatttgtgcatgttttagggg

SEQ ID NO: 341572 - DNA, 936 bp, Homo sapiens
ggaggacacaagactgaggctggagggccagtttggaggcaggtgcaagagtcacagtgagagacagtcagggcctgaactcagacagtgtcagcaaggatggaaaggaggagtcggaggcgagagaggctgaagccaacaggggtgggcagttgaatggaagtgaaagggatggacaggccaatgaggactctcaaatctttagcctagagaatggatagtggtaattccttcaaccaactcagggatcacaggaagggaagaggtggaagagaaatcctgttcccatgctgagctgatgattctgtgggacaccaaatggagatttgtagtagtagactgttggagttagaggtctgaaactcaggggagatattgcttgggaatccccatttatctaaaactatgtactgaatgcctcctgtataccaggcaccgtgatgagtgaagaatagagaatgatgaacaagacagacaagatactgccctcaaggaccttaggttttatgtaggggagactgaccacaaataagtaaacaagcagacaacagaacagcagactgcaatatgtgctatgaaggaataaataaccggtgtctatcatgacaaataaccaggggagcaaggtggccttagagcgggtcagggaagagatgaaggaagaccattcttggcagagcaaacagcaagtgcagatgccaaggcaggaaagcacttgaagttccaggcaatgaggaggtcagtatgagtgagtatgagtgcagcagggcacaagaggtagcccgggcctagaagccctggtgaggagcaatggacagtcaccgaaggctttcagtagcagcaagacatcagatgggaggagggggtgaaagtaaggagagggcaacattcacacgtttaaaggacaagagaagaggaccccgggaaggagcagct

SEQ ID NO: 341573 - DNA, 723 bp, Homo sapiens
ggaggacacaagactgaggctggagggccagtttggaggcaggtgcaagagtcacagtgagagacagtcagggcctgaactcagacagtgtcagcaaggatggaaaggaggagtcggaggcgagagaggctgaagccaacaggggtgggcagttgaatggaagtgaaagggatggacaggccaatgaggactctcaaatctttagcctagagaatggatagtggtaattccttcaaccaactcagggatcacaggaagggaagaggtggaagagaaatcctgttcccatgctgagctgatgattctgtgggacaccaaatggagatttgtagtagtagactgttggagttagaggtctgaaactcaggggagatattgcttgggaatccccatttatctaaaactatgtactgaatgcctcctgtataccaggcaccgtgatgagtgaagaatagagaatgatgaacaagacagacaagatactgccctcaaggaccttaggttttatgtaggggagactgaccacaaataagtaaacaagcagacaacagaacagcagactgcaatatgtgctatgaaggaataaataaccggtgtctatcatgacaaataaccaggggagcaaggtggccttagagcgggttgaaggaattaccactatccattctctaggctaaagatttgagagtcctcattggcctgtccatccctttcacttccatt

SEQ ID NO: 341574 - DNA, 433 bp, Homo sapiens
cctagaggctgaatgggaagtatgagaggacaatagaagttacgatgacatccaggatttatggctaaagcaactggaaaggatggtgcggtcatgagctgagatggagaagatgataagcagagcagactgggggtaggtggaaatctgggtagcagtgttggacatgttaacttcgagatgccgtcagacctttacgtggggattccggtctggggttccaggcaatgaggaggtcagtatgagtgagtatgagtgcagcagggcacaagaggtagcccgggcctagaagccctggtgaggagcaatggacagtcaccgaaggctttcagtagcagcaagacatcagatgggaggagggggtgaaagtaaggagagggcaacattcacacgtttaaaggacaagagaagaggaccccgggaaggagcagct

SEQ ID NO: 341575 - DNA, 2139 bp, Homo sapiens
ccgcgcatctgttacttgtagcagtgactatatttaaatcggggaggatggtgtggagggggcggggaggagaggagaatttttccaaaatctgacggaaagaaaagaaacaaatggttcagatgggacggagggtgggggagggggggagggtgagtaggaaccaggagggctgcctggggtgggggaataaattaaaaaaaggaacgagttaacaacagcaccaggaaagttacttcagtcaaaagacgcttttgaaaagaatatttctccgtacaaaatgagaaattaaacgaacgtaaagtcccccaaaccaaagtttgtgatgtgggatggttggctcggatcccgaggtgggtgggcctatgaggtggttgctaagtcgacgcaagggcggcgggggtggtctcagggatggacaaggggatggagtagagtatgtacagcccccggggctcacaggggagggggacggcggaggccaccgcgaattcgccgtccccccccatcgccccgtcacacagccgagtcaccttttccctttctacactccacactctcagtcccccaccccgcccctttccaagcgtgtcccgggccgcagcagcagaaaccgcaccatctccacccccacattctcctcgcgggaagcgcagcagtgcctccaagggttcttaaagcagagatgaataatacggcagctagtccaatgtctactgcaacttcaagtagtggaaggagtacagggaagtctataagctttgcaacagaattacagagtatgatgtattctttaggtgatgctagaaggcctcttcatgaaacagcagttttggtagaagatgtggtacacactcagttaattaatctgttacagcaagctgctgaagtttctcagctgcggggagcaagggtaatcactcctgaagatcttctgtttttgatgcgcaaagataagaaaaaacttagaagactgctaaaatacatgtttatccgagactacaaatcaaagattgtcaaaggcatcgatgaggatgatcttctcgaagacaaattgagtggcagcaataatgcgaacaaaagacaaaagattgctcaggacttcctcaactctattgaccagacaggagaacttttagcaatgtttgaagatgacgaaattgatgaagttaaacaagaaagaatggagagagcagaaagacaaactcgaattatggattcagctcaatatgcagaattctgtgaaagtcgacaattaagtttctccaaaaaagcttccaaatttcgagactggttggactgcagcagtatggagataaaacccaatgttgtcgcaatggaaatcttagcatatttagcgtatgaaactgtggcacagttagtggatctggctcttcttgtgaggcaagacatggtaaccaaggcaggggaccccttcagccatgccatttctgcaaccttcattcagtatcacaactctgctgagagcactgcagcctgtggtgttgaggctcacagcgatgccatccagccctgccacatcagagaggccattcgacgctacagccacaggattggcccactttccccattcacaaatgcctaccgcaggaatgggatggcttttctagcctgctgatgtgacaactgtgatgtgcctgcaacaacaggaaaggcaatgttatattaaggagtaaaccaagccaattcagcacttcctgtttacttccttgtcatatgtaccatagatggtgacagacctgctctcaaaacaagcttccttcgtttaattctgcattttctgcttaggcaaccaccctatcaatatacttgaacaatgaaacaatttggctacggaagcactgtctctgaattcctccttcaacttgtcagtggaaaggaaagtcccttggtggaatggtaggaatagttttaagcggggtatcacacagtgccttacagtggagaatatcaaagcgttttcagctcttcaatcttcgtatgcatgacatgggtgaacacaagactaataaacaacttgatttccttaggagattctcagtgctctatctgttttttaagtaagaagattgagtttcatgtatattgagtgactaaagtgtaagcttagaaatattt

SEQ ID NO: 341576 - DNA, 400 bp, Homo sapiens
ggaatcattaaagagggaaattgttgctttatggcacggcgagagaagagttaggtagttagtgggagtgtagcatccagaaagaggaaaagatccgctgtgttctctgtgggatgaataatacggcagctagtccaatgtctactgcaacttcaagtagtggaaggagtacagggaagtctataagctttgcaacagaattacagagtatgatctcgtattgttgctgttgagaagtcctggctgggaacggtggctaacacctgtaatcccagcactctgggaggctgaggaaggaggattgcttgggcccaggagtttgagaccagcctgagcaacatagcgagaaccctgtctctactaaaaatgaaaaaataaaaatagctggtgtggtagtact

SEQ ID NO: 341577 - DNA, 1742 bp, Homo sapiens
ccgcgcatctgttacttgtagcagtgactatatttaaatcggggaggatggtgtggagggggcggggaggagaggagaatttttccaaaatctgacggaaagaaaagaaacaaatggttcagatgggacggagggtgggggagggggggagggtgagtaggaaccaggagggctgcctggggtgggggaataaattaaaaaaaggaacgagttaacaacagcaccaggaaagttacttcagtcaaaagacgcttttgaaaagaatatttctccgtacaaaatgagaaattaaacgaacgtaaagtcccccaaaccaaagtttgtgatgtgggatggttggctcggatcccgaggtgggtgggcctatgaggtggttgctaagtcgacgcaagggcggcgggggtggtctcagggatggacaaggggatggagtagagtatgtacagcccccggggctcacaggggagggggacggcggaggccaccgcgaattcgccgtccccccccatcgccccgtcacacagccgagtcaccttttccctttctacactccacactctcagtcccccaccccgcccctttccaagcgtgtcccgggccgcagcagcagaaaccgcaccatctccacccccacattctcctcgcgggaagcgcagcagtgcctccaagggttcttaaagcagagatgaataatacggcagctagtccaatgtctactgcaacttcaagtagtggaaggagtacagggaagtctataagctttgcaacagaattacagagtatgatgtattctttaggtgatgctagaaggcctcttcatgaaacagcagttttggtagaagatgtggtacacactcagttaattaatctgttacagcaagctgctgaagtttctcagctgcggggagcaagggtaatcactcctgaagatcttctgtttttgatgcgcaaagataagaaaaaacttagaagactgctaaaatacatgtttatccgagactacaaatcaaagattgtcaaaggcatcgatgaggatgatcttctcgaagacaaattgagtggcagcaataatgcgaacaaaagacaaaagattgctcaggacttcctcaactctattgaccagacaggagaacttttagcaatgtttgaagatgacgaaattgatgaagttaaacaagaaagaatggagagagcagaaagacaaactcgaattatggattcagctcaatatgcagaattctgtgaaagtcgacaattaagtttctccaaaaaagcttccaaatttcgagactggttggactgcagcagtatggagataaaacccaatgttgtcgcaatggaaatcttagcatatttagcgtatgaaactgtggcacagttagtggatctggctcttcttgtgaggcaagacatggtaaccaaggcaggggaccccttcagccatgccatttctgcaaccttcattcagtatcacaactctgctgagagcactgcagcctgtggtgttgaggctcacagcgatgccatccagccctgccacatcagagaggccattcgacgctacagccacaggattggcccactttccccattcacaaatgcctaccgcaggaatgggatggcttttctagcctgctgatgtgacaactgtgatgtgcctgcaacaacaggaaaggcaatgttatattaaggtgatttcttgtgaacaaaataaaatacaaatttacctttcttttatctga

SEQ ID NO: 341578 - DNA, 1934 bp, Homo sapiens
ccgcgcatctgttacttgtagcagtgactatatttaaatcggggaggatggtgtggagggggcggggaggagaggagaatttttccaaaatctgacggaaagaaaagaaacaaatggttcagatgggacggagggtgggggagggggggagggtgagtaggaaccaggagggctgcctggggtgggggaataaattaaaaaaaggaacgagttaacaacagcaccaggaaagttacttcagtcaaaagacgcttttgaaaagaatatttctccgtacaaaatgagaaattaaacgaacgtaaagtcccccaaaccaaagtttgtgatgtgggatggttggctcggatcccgaggtgggtgggcctatgaggtggttgctaagtcgacgcaagggcggcgggggtggtctcagggatggacaaggggatggagtagagtatgtacagcccccggggctcacaggggagggggacggcggaggccaccgcgaattcgccgtccccccccatcgccccgtcacacagccgagtcaccttttccctttctacactccacactctcagtcccccaccccgcccctttccaagcgtgtcccgggccgcagcagcagaaaccgcaccatctccacccccacattctcctcgcgggaagcgcagcagtgcctccaagggttcttaaagcagagatgaataatacggcagctagtccaatgtctactgcaacttcaagtagtggaaggagtacagggaagtctataagctttgcaacagaattacagagtatgatgtattctttaggtgatgctagaaggcctcttcatgaaacagcagttttggtagaagatgtggtacacactcagttaattaatctgttacagcaagctgctgaagtttctcagctgcggggagcaagggtaatcactcctgaagatcttctgtttttgatgcgcaaagataagaaaaaacttagaagactgctaaaatacatgtttatccgagactacaaatcaaagattgtcaaaggcatcgatgaggatgatcttctcgaagacaaattgagtggcagcaataatgcgaacaaaagacaaaagattgctcaggacttcctcaactctattgaccagacaggagaacttttagcaatgtttgaagatgacgaaattgatgaagttaaacaagaaagaatggagagagcagaaagacaaactcgaattatggattcagctcaatatgcagaattctgtgaaagtcgacaattaagtttctccaaaaaagcttccaaatttcgagactggttggactgcagcagtatggagataaaacccaatgttgtcgcaatggaaatcttagcatatttagcgtatgaaactgtggcacagttagtggatctggctcttcttgtgaggcaagacatggtaaccaaggcaggggaccccttcagccatgccatttctgcaaccttcattcagtatcacaactctgctgagagcactgcagcctgtggtgttgaggctcacagcgatgccatccagccctgccacatcagagaggccattcgacgctacagccacaggattggcccactttccccattcacaaatgcctaccgcaggaatgggatggcttttctagcctgctgatgtgacaactgtgatgtgcctgcaacaacaggaaaggcaatgttatattaagggtcttactctgtcacccaggctgaagtacactggcatgatcacagctcctgggctcaagcaatcctcccacctcagcctcctgagtagttgggactacaaagcacatgccaccatgcccagcattttttttttctttttatagagacagggtctcactatgttgctcaggcttatctcaaactcctggattcaaactgtcctcctgcctcagcctcccaaagtactgcgattataggcatga

SEQ ID NO: 341579 - DNA, 1528 bp, Homo sapiens
cccagcctcgctgccgccttgcagtttgatctcagactgctgtgctagcaatcagggagactccgtgggcgtaggaccctcagagccaggtgtgagatataatctcatggttcgccgctttttaagccggtgtgaaaagcgcaatattccgggtgggagtgacccgattttccaggtattctttaggtgatgctagaaggcctcttcatgaaacagcagttttggtagaagatgtggtacacactcagttaattaatctgttacagcaagctgctgaagtttctcagctgcggggagcaagggtaatcactcctgaagatcttctgtttttgatgcgcaaagataagaaaaaacttagaagactgctaaaatacatgtttatccgagactacaaatcaaagattgtcaaaggcatcgatgaggatgatcttctcgaagacaaattgagtggcagcaataatgcgaacaaaagacaaaagattgctcaggacttcctcaactctattgaccagacaggagaacttttagcaatgtttgaagatgacgaaattgatgaagttaaacaagaaagaatggagagagcagaaagacaaactcgaattatggattcagctcaatatgcagaattctgtgaaagtcgacaattaagtttctccaaaaaagcttccaaatttcgagactggttggactgcagcagtatggagataaaacccaatgttgtcgcaatggaaatcttagcatatttagcgtatgaaactgtggcacagttagtggatctggctcttcttgtgaggcaagacatggtaaccaaggcaggggaccccttcagccatgccatttctgcaaccttcattcagtatcacaactctgctgagagcactgcagcctgtggtgttgaggctcacagcgatgccatccagccctgccacatcagagaggccattcgacgctacagccacaggattggcccactttccccattcacaaatgcctaccgcaggaatgggatggcttttctagcctgctgatgtgacaactgtgatgtgcctgcaacaacaggaaaggcaatgttatattaaggagtaaaccaagccaattcagcacttcctgtttacttccttgtcatatgtaccatagatggtgacagacctgctctcaaaacaagcttccttcgtttaattctgcattttctgcttaggcaaccaccctatcaatatacttgaacaatgaaacaatttggctacggaagcactgtctctgaattcctccttcaacttgtcagtggaaaggaaagtcccttggtggaatggtaggaatagttttaagcggggtatcacacagtgccttacagtggagaatatcaaagcgttttcagctcttcaatcttcgtatgcatgacatgggtgaacacaagactaataaacaacttgatttccttaggagattctcagtgctctatctgttttttaagtaagaagattgagtttcatgtatattgagtgactaaagtgtaagcttagaaatattt

SEQ ID NO: 341580 - DNA, 593 bp, Homo sapiens
gtattctttaggtgatgctagaaggcctcttcatgaaacagcagttttggtagaagatgtggtacacactcagttaattaatctggtaagagcatatataatttgatttggtttctcttctctgcattcttttattaggatggtaacccaacactttaaaaacattttatttacagctggaattcttttttgttagcattattgaagtatactttatatataacaaaatttactagtttaatgcataatttgctgagcctcaacaatggaatattataatattaacttataacacaatcatgatatcgaaaatttgcataatctaaaacaaacccttgttcccctgggcagtcagcagccatcatcatcacagcagaaagattatgactcactgaaggctgagatggttgttagcattttgtaacaataaagtatttttaaattaaggtatgtacattattttttagacatgccatttgacaatcaatagactatagtatagtgtaaacatagcttttatatgcactgagtaacctcataatttgactgtacacctactctgtacccacaaaaattaaaagttaaaaaattta

SEQ ID NO: 341581 - DNA, 1184 bp, Homo sapiens
tgccaggggcattatggctgcctctgttgccccacgcaggtcgccagggaagtgggggaaagccagcagccgcaggcctcacccagctcccatgcagcccacagcccgaaaggccggtctcactccaccatgccctctgcccgtaacagcaccaactttatttccaggcagctggtgagcagggctgagaactttccccaggctaccggcttcctagctgagaaagcaagcctactcacagttcctctgcgtcccacagagcctgcagtggtgatccacctccttcaagggccaaaaaagcttccaaatttcgagactggttggactgcagcagtatggagataaaacccaatgttgtcgcaatggaaatcttagcatatttagcgtatgaaactgtggcacagttagtggatctggctcttcttgtgaggcaagacatggtaaccaaggcaggggaccccttcagccatgccatttctgcaaccttcattcagtatcacaactctgctgagagcactgcagcctgtggtgttgaggctcacagcgatgccatccagccctgccacatcagagaggccattcgacgctacagccacaggattggcccactttccccattcacaatttctttttctttgacagaatgcctaccgcaggaatgggatggcttttctagcctgctgatgtgacaactgtgatgtgcctgcaacaacaggaaaggcaatgttatattaaggagtaaaccaagccaattcagcacttcctgtttacttccttgtcatatgtaccatagatggtgacagacctgctctcaaaacaagcttccttcgtttaattctgcattttctgcttaggcaaccaccctatcaatatacttgaacaatgaaacaatttggctacggaagcactgtctctgaattcctccttcaacttgtcagtggaaaggaaagtcccttggtggaatggtaggaatagttttaagcggggtatcacacagtgccttacagtggagaatatcaaagcgttttcagctcttcaatcttcgtatgcatgacatgggtgaacacaagactaataaacaacttgatttccttaggagattctcagtgctctatctgttttttaagtaagaagattgagtttcatgtatattgagtgactaaagtgtaagcttagaaatattt

SEQ ID NO: 341582 - DNA, 2690 bp, Homo sapiens
ccgcgcatctgttacttgtagcagtgactatatttaaatcggggaggatggtgtggagggggcggggaggagaggagaatttttccaaaatctgacggaaagaaaagaaacaaatggttcagatgggacggagggtgggggagggggggagggtgagtaggaaccaggagggctgcctggggtgggggaataaattaaaaaaaggaacgagttaacaacagcaccaggaaagttacttcagtcaaaagacgcttttgaaaagaatatttctccgtacaaaatgagaaattaaacgaacgtaaagtcccccaaaccaaagtttgtgatgtgggatggttggctcggatcccgaggtgggtgggcctatgaggtggttgctaagtcgacgcaagggcggcgggggtggtctcagggatggacaaggggatggagtagagtatgtacagcccccggggctcacaggggagggggacggcggaggccaccgcgaattcgccgtccccccccatcgccccgtcacacagccgagtcaccttttccctttctacactccacactctcagtcccccaccccgcccctttccaagcgtgtcccgggccgcagcagcagaaaccgcaccatctccacccccacattctcctcgcgggaagcgcagcagtgcctccaagggttcttaaagcagagatgaataatacggcagctagtccaatgtctactgcaacttcaagtagtggaaggagtacagggaagtctataagctttgcaacagaattacagagtatgatgtattctttaggtgatgctagaaggcctcttcatgaaacagcagttttggtagaagatgtggtacacactcagttaattaatctgttacagcaagctgctgaagtttctcagctgcggggagcaagggtaatcactcctgaagatcttctgtttttgatgcgcaaagataagaaaaaacttagaagactgctaaaatacatgtttatccgagactacaaatcaaagattgtcaaaggcatcgatgaggatgatcttctcgaagacaaattgagtggcagcaataatgcgaacaaaagacaaaagattgctcaggacttcctcaactctattgaccagacaggagaacttttagcaatgtttgaagatgacgaaattgatgaagttaaacaagaaagaatggagagagcagaaagacaaactcgaattatggattcagctcaatatgcagaattctgtgaaagtcgacaattaagtttctccaaaaaagcttccaaatttcgagactggttggactgcagcagtatggagataaaacccaatgttgtcgcaatggaaatcttagcatatttagcgtatgaaactgtggcacagttagtggatctggctcttcttgtgaggcaagacatggtaaccaaggcaggggaccccttcagccatgccatttctgcaaccttcattcagtatcacaactctgctgagagcactgcagcctgtggtgttgaggctcacagcgatgccatccagccctgccacatcagagaggccattcgacgctacagccacaggattggcccactttccccattcacaaatgcctaccgcaggaatgggatggcttttctagcctgctgatgtgacaactgtgatgtgcctgcaacaacaggaaaggcaatgttatattaaggtgatttcttgtgaacaaaataaaatacaaatttacctttcttttatctgagggagtgggctggtctgttgtgactttcaacttgctgactcctcctcttttccagcccctcaaccatcggtcttgtttactagatgggctgttcagctaattaatggcaggatgtttaggatagtctgtaggtggacaagaatgcagatcacacagttttgaaattttaatttgagtagatttactgccctcagctcacataccttaaaagcagtggttgcccccgtccagcgttttgtctgcattttatttgatatattttataatccaggtttggaacaaggaaacaaaattaaaaggacagtgagttttcgccttcccttacaccaccaactttactttccaacatttgttgacatgtattttagtgacagctatccattttataaacttacagtaatcaaagatctaacagacctgataaatcacctgttcccacctcctttccccttcactccacttatagtatgtgtcattttcaatgcctgcttcccaacttcctgccatctgcctttcatgtgtgtttttcctcacacagaacctcttcctccatcttcatttccctccttttcctgttcctccaatccccagatccaccactcctgcacatgccatacacatttagaagccaagtattcagaatcagtagaaggggagcagagtgatttcttgcttcctcccttcaaagcactaccacacctagactggaaatgtgggctgggtaatttcttgctgttagcagccgagctacccttctggcatctatactttctccagtaaatgaggaaccgtaactctttggaacaaaccaaaatatagcagatgtaattgtacagttcctgattaaacttcagttgcaaaaaagaaagttatttctttaattctgtgggagttttgtataattttacttttatggtttttacacatacttgaaacactctttctaaa

SEQ ID NO: 341583 - DNA, 2193 bp, Homo sapiens
ccgcgcatctgttacttgtagcagtgactatatttaaatcggggaggatggtgtggagggggcggggaggagaggagaatttttccaaaatctgacggaaagaaaagaaacaaatggttcagatgggacggagggtgggggagggggggagggtgagtaggaaccaggagggctgcctggggtgggggaataaattaaaaaaaggaacgagttaacaacagcaccaggaaagttacttcagtcaaaagacgcttttgaaaagaatatttctccgtacaaaatgagaaattaaacgaacgtaaagtcccccaaaccaaagtttgtgatgtgggatggttggctcggatcccgaggtgggtgggcctatgaggtggttgctaagtcgacgcaagggcggcgggggtggtctcagggatggacaaggggatggagtagagtatgtacagcccccggggctcacaggggagggggacggcggaggccaccgcgaattcgccgtccccccccatcgccccgtcacacagccgagtcaccttttccctttctacactccacactctcagtcccccaccccgcccctttccaagcgtgtcccgggccgcagcagcagaaaccgcaccatctccacccccacattctcctcgcgggaagcgcagcagtgcctccaagggttcttaaagcagagatgaataatacggcagctagtccaatgtctactgcaacttcaagtagtggaaggagtacagggaagtctataagctttgcaacagaattacagagtatgatataccatgctggtgctcaaaaacttttggattttggagcattctggatgttcaggtattctttaggtgatgctagaaggcctcttcatgaaacagcagttttggtagaagatgtggtacacactcagttaattaatctgttacagcaagctgctgaagtttctcagctgcggggagcaagggtaatcactcctgaagatcttctgtttttgatgcgcaaagataagaaaaaacttagaagactgctaaaatacatgtttatccgagactacaaatcaaagattgtcaaaggcatcgatgaggatgatcttctcgaagacaaattgagtggcagcaataatgcgaacaaaagacaaaagattgctcaggacttcctcaactctattgaccagacaggagaacttttagcaatgtttgaagatgacgaaattgatgaagttaaacaagaaagaatggagagagcagaaagacaaactcgaattatggattcagctcaatatgcagaattctgtgaaagtcgacaattaagtttctccaaaaaagcttccaaatttcgagactggttggactgcagcagtatggagataaaacccaatgttgtcgcaatggaaatcttagcatatttagcgtatgaaactgtggcacagttagtggatctggctcttcttgtgaggcaagacatggtaaccaaggcaggggaccccttcagccatgccatttctgcaaccttcattcagtatcacaactctgctgagagcactgcagcctgtggtgttgaggctcacagcgatgccatccagccctgccacatcagagaggccattcgacgctacagccacaggattggcccactttccccattcacaaatgcctaccgcaggaatgggatggcttttctagcctgctgatgtgacaactgtgatgtgcctgcaacaacaggaaaggcaatgttatattaaggagtaaaccaagccaattcagcacttcctgtttacttccttgtcatatgtaccatagatggtgacagacctgctctcaaaacaagcttccttcgtttaattctgcattttctgcttaggcaaccaccctatcaatatacttgaacaatgaaacaatttggctacggaagcactgtctctgaattcctccttcaacttgtcagtggaaaggaaagtcccttggtggaatggtaggaatagttttaagcggggtatcacacagtgccttacagtggagaatatcaaagcgttttcagctcttcaatcttcgtatgcatgacatgggtgaacacaagactaataaacaacttgatttccttaggagattctcagtgctctatctgttttttaagtaagaagattgagtttcatgtatattgagtgactaaagtgtaagcttagaaatattt

SEQ ID NO: 341584 - DNA, 434 bp, Homo sapiens
ctcaggccttttgccactcttcacgtaatatgatttctagtttactcaccagtctggttattctactccaaatggcatccagctgtctaggtcggtgtgacagctgatgcaaccatagtgtggtgtctgaatgtgacccatccaaaatgggaacgagcttgcagccccattctagatcctgtgttctctcaatgaagtataatgttgatttagcatttgggagagccattttacattatatatttatactgaatttatgtttgattcaaactcctaagtttgtgttagttttaaattactgcaattactgagacaccttactcataggcctttggagtcatgatttccagaaagaattaagaagataataatctaggactagtctctgaataatttttcattgactaagtcttaggtaacaatttctgagtgct

SEQ ID NO: 341585 - DNA, 301 bp, Homo sapiens
tttggtggtatgttcgtattttagatagcacagagggaaagccttattgacttggtgagttctgaataaggatctaaagaaagttaagtcatgcagatatgtggggaaagagcattccaagcattccaaatgcaaagaccctgaggcaaaaagctggtgtgttccaggaaaagtaaaagtagtgagtccagttgcctgaagctcatgaatgagagggagaagcaggaagcaggcagaagcaggaagcaggcagaagcaggaagcagtgaagcggcagaagcaggaagcgggtaccgagctc

SEQ ID NO: 341586 - DNA, 328 bp, Homo sapiens
tttgaaatgttattctatccttttcccttcactgccaagagtacttgcatctcctattctcctcttaatacattacaatgtggcttctgccctgatcactcattcttctgaaagtcccacaaagagagtatcaacaaactttctttgttgcctcaaatgccttgtctgaagaattggagtctactggctcaagacttattcaatacttaattcactacctccatgctcccaccattattctcttagttctacctcacctactaattcgtttcagttatgattttagaacattcttttctgcctcaccctgaaaagttaggcacctcag

SEQ ID NO: 341587 - DNA, 560 bp, Homo sapiens
ctcctcattttccccagccacacaggacaggtgtccccaccctctcacctgcactcagaaggtgggctttggactcggaggccctgcctttcccagcccatagcctgccaaatgataatgcactggtttcccagaaaaagaaaataaaaagagaaagaagcagtctgggggccaccgggagatcagaaaagagaactaagtctctctgtggcagggcagtgcttagcagaagggaactgtttttaggaagctcagatcctgatgcactggctcagagagacaatgtgggacatttgaggtcagtggctcatcctttctgcgccccagtttccaattctgcggaacaggcactaatcatacgacaccatgtgtcgtggaaatggatgaataatcagggcctcccacagaggacgaatgccccaaaatgcaaagtcaggagtggcagtgaatactgatcactgggaagtggaggagatgcgttcagacaccaagctgcaaccttggctgtgcacatgcgcttaaagctctccttgaaggatgcatttctgacaaaagaaaga

SEQ ID NO: 341588 - DNA, 758 bp, Homo sapiens
ccactgcgcccggccttattttcttacagttctggaggctacacgtccgagatcagtgtgttagcatggttagtttctggtgaggggtctctttctaggttacagatgactgccttctcactgtgtcctcacatggtggagagagaaagtgcaagttctctggtatctcttcttataagagcactaattctgccatgacgaccctcatgacctcatctaactcgaatgacctctcaaagaccccatctccaaacgtcatcacattgaggcttcaacatgtgaatttggggtgagcaggacacatttcattccatggcaaaatggatcatacatctaaatgtaaaccacaaaactgtgaaacttctagatgataatataggaaaaaaagaggtgaccttggtttgacaatgagtttttaggtacaacaccaaaggcacaatccatggaagaaacaattgacaagctggacttcattaaaatgaaaaacttctgctctgtaaaagacggcatcaactttgggaggccgaggcaggcagatcacccgaggtcaggagttcgagaccagcctggccaacatggtgaaaccccatctctactaaaaatacaaaaaccagctgggtgtgtggtggcacctgtaattccagctactccagaggctgaggcaggagaatcgcctgaacccgggaggcagaggttgcagtgagccgagactgagccactgcactccagcctgggtgacagagtgagactccatctcc

SEQ ID NO: 341589 - DNA, 657 bp, Homo sapiens
gaattggagagattgatcaaaaggtacaaagtttcagttaggagcaagttcaagagctccattgtacagcatggtgactacagttcataacagtgtatagtattcttgaaagatgcccaaagagtagattttaaatgttctcacttcaaatgaatatgtcaggtaatgcacatgaattagtgtgatttagccattccacaatgtatacatgtttcagaacatcatgttgtataccatatatatatacagtttttgtcaatttaaacagtaaatacaaattttgtatttataaatatacacttatatttataaaacaagaggaagcattttatgagattacttatgttatttcaccatttaatagaaacttcaggctggacatggtggctcacacttgtaatcctagcacttttggaggtagggtggcagggagcagattgcatcgcatgaggccagcctggggaacatgcagaaactctgtctctacttaaaattagcggggcgtggtggcgtgtgcctactgtagtcctagctctctgggaagctgaggtgggaggatcacttgaacccaggaagtcgaggatgcagcgagccgtgaccatgatcatgtcactgcactgcagcctgggtgagagagtgagaccctatatcaaaaaa

SEQ ID NO: 341590 - DNA, 748 bp, Homo sapiens
tcctgggtagctgggattacaggcacccgccaccacattcagctactttttgcatttttagtagagatgaggtttcaccatgttggccaggctagtctcgaactcctgacctcaggtgatccaccctcctgggactcccaaagtgctgggattacaggcatgagccaccacacccagcctattctacattttttaaagattaattctaaaatcattttgccaagtaaaagaaaatctcatcagaatttttattggaattggattcacttaaaggttattttaagtgggaagaatcgatgcttcaggttttgaattttgtcatcctagaagaggaagcatatttttccaaagcagtaagattgaaactaagtcagtttttttgtagcacatttaggatctgtgaggcaaaaatcggtagaaatattagaatgtaagtattaaccagcaccagaggaagaaaagactgcattgtggaacaaaaaaaggagaatagatttcagagaattataaaattgtagcgattgatctgtgtaggcattctcctaacagctctccagctaagactgggccaccttgcaaagcagcatgttcccttggtaaatggctcttatttttaagaatgtctttatatagagccagagtgcataccagtgtgattttgccattgccttccaactccagaaagaaaactaactttgccttctctagtacatgagcaccctggagatactaaaactcttattctgac

SEQ ID NO: 341591 - DNA, 825 bp, Homo sapiens
ccttcatctttattcttcttttaaaaaatttctggactattctacattatcatcatcatcatcattattattattattattattattatttgagatggagtcttgctctgtcggccagtctggagtgcagtgacacgatctcagctcactgcagcctctgcctcctgggttcaagtgatttgcccacctcaggtgatccaccctcctgggactcccaaagtgctgggattacaggcatgagccaccacacccagcctattctacattttttaaagattaattctaaaatcattttgccaagtaaaagaaaatctcatcagaatttttattggaattggattcacttaaaggttattttaagtgggaagaatcgatgcttcaggttttgaattttgtcatcctagaagaggaagcatatttttccaaagcagtaagattgaaactaagtcagtttttttgtagcacatttaggatctgtgaggcaaaaatcggtagaaatattagaatgtaagtattaaccagcaccagaggaagaaaagactgcattgtggaacaaaaaaaggagaatagatttcagagaattataaaattgtagcgattgatctgtgtaggcattctcctaacagctctccagctaagactgggccaccttgcaaagcagcatgttcccttggtaaatggctcttatttttaagaatgtctttatatagagccagagtgcataccagtgtgattttgccattgccttccaactccagaaagaaaactaactttgccttctctagtacatgagcaccctggagatactaaaactcttattctgac

SEQ ID NO: 341592 - DNA, 460 bp, Homo sapiens
ccttcatctttattcttcttttaaaaaatttctggactattctacattatcatcatcatcatcattattattattattattattattatttgagatggagtcttgctctgtcggccagtctggagtgcagtgacacgatctcagctcactgcagcctctgcctcctgggttcaagtgatttgcccacctcaggtgatccaccctcctagcacttttggaggtagggtggcagggagcagattgcatcgcatgaggccagcctggggaacatgcagaaactctgtctctacttaaaattagcggggcgtggtggcgtgtgcctactgtagtcctagctctctgggaagctgaggtgggaggatcacttgaacccaggaagtcgaggatgcagcgagccgtgaccatgatcatgtcactgcactgcagcctgggtgagagagtgagaccctatatcaaaaaa

SEQ ID NO: 341593 - DNA, 403 bp, Homo sapiens
tcctgggtagctgggattacaggcacccgccaccacattcagctactttttgcatttttagtagagatgaggtttcaccatgttggccaggctagtctcgaactcctgacctcaggtgatccaccctcctgggactcccaaagtgctgggattacaggcatgagccaccacacccagcctattctacattttttaaagattaattctaaaatcattttgccaagtaaaagaaaatctcatcagaatttttattggaattggattcacttaaaggttattttaagtgggaagaatcgatgcttcaggttttgaattttgtcatcctagaagaggaagcatattctgaactagtcagttttttgtagcacgaagtaagtacgcaccagaggaagaaagatgcatt

SEQ ID NO: 341594 - DNA, 235 bp, Homo sapiens
ttcgtgtgtgggctagtggaggaagacagaggagcagtgggggaaactggccaggagtgaatctgtaggagaagataatgagcaaaggaatgctggtcattctctcaggttggtgttatggaggggctgttgaaaggtgaggaggagtgaaagcaaggaactaaggaaaggaacggataacctactggcctcacctactcatagtcttggttgcatatgatacgacgtgactcag

SEQ ID NO: 341595 - DNA, 196 bp, Homo sapiens
ataatgtaaatatagatagcattggatttgacccataagccataaagattctagaataccagtgttcccaactatggagtgcccaatgagcttcttgacaaactcaggagagtaacctccatttgtgtgacctcctttctttgctctttatttgtgcttttcaaagggatgacatgagcccataaactactcattg

SEQ ID NO: 341596 - DNA, 530 bp, Homo sapiens
tggggagtggggaatggagtatgaagtgaaaggaggagtttggtttgtagagtttgagatgccagagggccatccaagtggaaagataatcaccagacaataggaaatgcaaagttgaagcttgagccaggctggagtcattgattcaggagctgtctatgagttgaagctatacaagtggattaataaaaggataacctcaagaagcaaatgattttagggcttcttttttcgttgaatttagaaaagaatcaagttaacaggaaaaggtggttcacatctgaaatttggtatttaactgcattttagacccactaagtctactccatgctgtctggattcacattcgctttcctattcttggattccataacataatcccatcttgtactttttagatactgatttccccacataggtacatttttgcaattgttttcctctaatgagttgtaagacagataaaatgtgaaaaattggcattaaacatcacttgggaagagtttgtttctttttagcttgaggttggt

SEQ ID NO: 341597 - DNA, 590 bp, Homo sapiens
tggggagtggggaatggagtatgaagtgaaaggaggagtttggtttgtagagtttgagatgccagagggccatccaagtggaaagataatcaccagacaataggaaatgcaaagttgaagcttgagccaggctggagtcattgattcaggagctgtctatgagttgaagctatacaagtggattaataaaaggataacctcaagaagcaaatgattttagggcttcttttttcgttgaatttagaaaagaatcaagttaacaggaaaaggtggttcacatctgaaatttggtatttaactgcattttagacccactaaaaaagctaaaaatagttgatgaagtttggagaagttatgctgaaggttatttgggtccccgtctactccatgctgtctggattcacattcgctttcctattcttggattccataacataatcccatcttgtactttttagatactgatttccccacataggtacatttttgcaattgttttcctctaatgagttgtaagacagataaaatgtgaaaaattggcattaaacatcacttgggaagagtttgtttctttttagcttgaggttggt

SEQ ID NO: 341598 - DNA, 370 bp, Homo sapiens
agcaagtttgaatttcatttctacacacagagttaattcaaacaagccagttacagctgggtgtggtgtcgcacacctatggtcctgcctcagcctcccgagtatctggtattacaggtgcatgccaccacacctggccaacatagcaggtcctcatctctaaaaatatataggaaggaattctttttgtaatatttagtttcttttcctgtggaatatcaaatgcagagttgttctgagccagcattggctgttcgtctgtcctatttttcccttagtacttacattatcgagtttccatgtagttgctcatcttggtggtgaaatgaagagcccgtggttgtccctaagatgtaaatgagtccagcct

SEQ ID NO: 341599 - DNA, 211 bp, Homo sapiens
tcccccgaggtcagggttaaccaacaactctcactaaatcctcaccagtcatccctccacattgtctaaaaaatgaaatcttttgattagattttcacctctctgctctggttagtttatgataaaagtactcttctttggggaatgcccaagagactgtgagaagcaaatgtgagagagctgaagactggatcaagtctttgcagtacat

SEQ ID NO: 341600 - DNA, 443 bp, Homo sapiens
acaacgcgcagcaggactaccacgcccgcagctacttccagagtcacgtggttccgccccttttgcggaaaactgatcaggatcatggcggtacaggaagggatggctggatagtagactacatccacatcttcgggcaaggacaaagatacctcaacaggagaaattgggcagggacagggcattctctccagcaggtgactgggcatgaccactacaatgctgatctgaaaccgatcgatgggttcaatggaaggtttggctaccgcaggaacactccagccctccgtcagagcacgtccgtcttcggagaggtcacccacttccctctgttctaacagcatcttttcccttcatagccatcgacctgaatttctaagacaaatgtttagatgaactcttagtgttattttacgttaaaaaaattaatttgtgtctccaaa

SEQ ID NO: 341601 - DNA, 445 bp, Homo sapiens
aatgaatgttgggcggttctggaggcctcagggaatagttcctcccagggagggtgagaggcatggccgtacaaatgaatgtggccagaaagacatctatctgccttttaaaatgggctttggagacttccagggacctgggtcatccaattctgttggttgtgtttaacatgaacggtaaaagttggaaagcattcacatttggacatgctgtcttgaccatcttcggaatggttcttttacaagcgccattcagaggtagcggggcttggtcctctcagataagccttttgcctctgtcttgtgacaccgtgtttgagagggtattgttggagttagttggaaaagtgttgtcattttttggtgtaatacctcgatacttttaagatgaggtcttgggcctgtggtttaaaaatgatacatggaaaaaaatgatacttgattg

SEQ ID NO: 341602 - DNA, 732 bp, Homo sapiens
gttaattccacctgcaaccttaattccctttgccatgtaatgtaacattcacaggttccagggattaggtcatggacatcatttggggacctacccagcttattccacctaccactgatagttagggggcaagtaaactttactcaaaagtctgtaagtgagggaggtagggaatagtattctagacggagggaacagtgtgtctggggtgttcaaggaagaataaggggatggtgactgaaatggagtaagtgagggggagaatagtggaaaatgaggtcagagaggagaggtaatgggggcagatgtattacatggccctgtaggttattgtcacaattggtctttacccagaaaaggtggaagacaataaggatgagactgttgctgggttcaactagtttgggagtaaaagttagcttagaagcaaggagacaagttaggaggctacttgtagcaatctaggtgagagatgatagtgatagaaaaagtaggcaggcaagaagggaaataatacaataacagggaaagatggaacataagaaacaatagcaagacagtagattttaaactaagcaaatcaggcatgtgcctgtagttccagctactcggaaggctgaggcaggaggattgcttgagcccaggaattcgaggttgcaagggagctgattttgtcactgcactccagcttgggtgacagaacaagaccctatctcaagaaaaaagtaaata

SEQ ID NO: 341603 - DNA, 142 bp, Homo sapiens
atcaccccaacctccttcaggctcatcctctggcctgaacttcctgtgcttcttacttagttgtcctcatgatacattttctcaaagcacagcccgatcacccttaacactgccatgtgtacctagaattaagtttaaaaag

SEQ ID NO: 341604 - DNA, 773 bp, Homo sapiens
tggggataagaaattattttattgatttgtcttattcatagttcttactagaggacctgacatttagtagaaactcaattaatacagtgagtgaactgaatgtggtccctgcccttgaggaagatcaaatttagtgtagtcatatgtcacttaactacggaacatgttctaagacatgagtcattgggcgatgtttttttatgaacatcgtaaagggtacttatgtaaacctagatggtatagcctactacatacctgggctgtacctactacatacctggtctgtccaacagaggactacatacatagtcctttgttgaccaaactgttggtatatggtgtttggaagatatggtgggacaaggcaggaagcagaaatatgcaactcttaagacataatatactaagtacttagaaatgagaccatgtatgggaaaactgaggagagagtaattaattttggctcaaggaaatatttatacaggaagtagtagttggtagaccttacaaaatgagtaagaatttgagaggcctttttggggaagaacattccagactatggtaaatggccagaatagtctcacaggaagagtgcaactttgtggtctttggcagagatacatggttcagtattgttggggacttggattataaggaagagttataaaagtaagaacaggctgagtgtggtggctcatgcctgtaatcccaacacttagagagcccgaagcgggtggatcacctgagataaagagttcgagactagcctgacc

SEQ ID NO: 341605 - DNA, 633 bp, Homo sapiens
agtttagttctactttaattgtgtgtatgaaccaaatattgatgtgctgtatcatttggtatgtgaattgaatgaatatttatgcagatataattattcatcatgaagatatctctttttgaaaatgttaaaatgtgtgttgaccatctataaattatagatgaatacattttcagttagaaaatcttggtatgtcacgtgtcttttaaagaataaaatctgtaacttctacaattgaagaaaaagtttaaatcattgtagaattaatacaatggatagtttttacttttacatttattttagaaatgtctttcatttgaattttctgattaataacaaaattaagcttctacaatgtatagaagatacaaataactgactgtctcactagagaaagaatgcactcctttaggtaggtcagcagtcttaaaagcttgctcttaaattcctgtttttctgcattagtgtgtttataccacagagtcacttttatattataacataagcctaaaataatacattgtgtttgttttacagtcctcatgatatgaatgaagttgggtatggtctaaatatttccagactatctttttatgctttttgtcattgaagaaagagcattgtacaagaagc

SEQ ID NO: 341606 - DNA, 350 bp, Homo sapiens
cctccttgttttcatgttagccatccctctgaccctactctccaaaatgagcctcagccaggctgctgcttttccacatcactaataagattccttttatggtcttgtgaaaagcgaggggctccagacagatcctccggcaggagggtggaaccacctgcaggccccttccccctaaactccaaacacacgttcaagggcagtttgagtattcacagtcagcttgggccagccagatttaaacgcagccagactctttagcttaaagttctccctaataggggattaacaaacaagataaatactcttggtaaaaatgaaatcccacaacagaaacagcccttggacct

SEQ ID NO: 341607 - DNA, 438 bp, Homo sapiens
tcaataattagccacagagccaagactagaactcagggatttgggaaagccagtgcagaacaggccttaagaatggcattatgagggtcacaacacaaatcatgaagttctttatttatctgaaagtctagtagctccctgtaatcttaaaccaaagtgaatgaaacaatttgattgttgtgttatagtataatccaatggaagtattcaaaatttattcaaattcctagaacttaaaagtctgaagagaaaatgggcatcgtttttgtttgggaaaagaggattcagaagactcacagtggaacattcagcgctttcttttacaatagcagagaaaaggagaaaaatattcagagttaacataatccagccacttagtgttttctgcctgaatactcacagaacagagcttataatttcacccagtctcaggcaaaa

SEQ ID NO: 341608 - DNA, 414 bp, Homo sapiens
ctgcagtgcacagatagactggaccagcgctgggtgacggtgctcaatctttctgctgcaatggaatggagtgcactgacgctctgcacaaatatctgcacagggcagtgttatagataaccactcactgctccctgaggggcttgagatcattcgatgtctaagaactactactggcttgtaaatgtcaagagaaattatgaacatttgtagaaaagtaactgtttgactaatttcctgttccatggagcaaacacactgccccatgtatttagaatctggtgctgacagccaggccatggcaagcttcaaggttataggatcataaatgggattagataagccagacagtgcggctcagactccagcactttaaaaatattattaaaaccccaggaaaggcaaacaattttg

SEQ ID NO: 341609 - DNA, 316 bp, Homo sapiens
cctgcagaaccacatgtgagccaatcaaacctcttttctttataaactacccagtctcagtttttgttttttttttttttttttttttttttttttgagacagagtcttgctctgttgcccaggctggagtgcagtggtgtgatcttggctcactgcaagctctgccagttatttctttacagcaatgagagaatggactaatatagcccccatatgaactatcttcctccttctgaaagaaggcttggccatcttttggttttctttcttccttactttttcaacattctctctcttcctttgtggcagctgagg

SEQ ID NO: 341610 - DNA, 818 bp, Homo sapiens
gggaaatgtggtgttctgttctgtgagtgactcatgtaaacgagtaaaagaaactagagtacattgttaaaattacaaggtaaactaattcctactttgctagttagtgtgtcctataattctcatttaaattgcacagattactaaacaactacagaaattttcacccaaagcagttcatagacaaaatttcacagaatttttcagtgtgattttatattgttaaaattcttgtagacttatgaaatatactttcatttggttctcaggataataggctgtatatagtttcttaggcattttgggttccagagcctgtggtactttcctatataattgtcctttttatattcttatattcccgttgatatattgaaagagtttcctgaagttatctgttcctatataattgtcctctttatagtcttatattcccgttgatatatcgaaagagtttcctgaagttatctattgctaatatttagcatttacttttaggagcaaaattctcaggagaattgagaaatctgttgtcatttattttgattatgtccaagtaaaggtcagagatatgaaattaaatgtttgtaactgacaaactagtcatcacagtctacttcaaagggaatgtctgtcacagtttcagtagtgccagggtacatagagatatgttgtatgaaaaccatatggtcttgggaagactgtagaggaatccttttgggaaaagagtatggaatggacaggaacagttcagggaataaatgggattatatccagcgaggttgaagaataggaaaaacagaaacatccagttagaa

SEQ ID NO: 341611 - DNA, 213 bp, Homo sapiens
catcagaggaacataaatacagaacaagtgtagaaaaggaagcaattttcacaggagaatcacttgaacccaggaggcagaggctgcagtgagcagagatagcaccactgcactccagcctgggtgacagagtgagactctgtctcaaaaaaaaaaaaaaatgtagctgggtgtggtggcacacacctgtagttccagctactccagaggctg

SEQ ID NO: 341612 - DNA, 425 bp, Homo sapiens
aactgggatgaccaggacatttgggcgtgaaaggggccctacaagccttaacagatactaaagaacgtcagacaagcagaatgaggatggccccaggcaaggtggaccccaccccagctgcagggaacagcaaggctgcaggtacctgctcatttccagctcccagcctccctcagaacacagactgccttgccattttcttagcgagcggtttgcagcaaagtgctattttgctctcgaacgccttcctttccaattgggacaaacggctatgaatacggcacaccctgttttgcattcaaactgttgggaaagttttgcggctgtaaatatcatgctcttggtgctcaagacagaattattattactttttccttagttcttggaaccagtgataaattaaacatttcttttgcccccccttg

SEQ ID NO: 341613 - DNA, 244 bp, Homo sapiens
tttatcgttgccattaaactaaatatatactgattattttcatcaggcaccagcgttaatgtgtttctcctaagtgagttgacctcatgggaattcatcacatctgtggactatattttagtgttaaaggcttaatgtactactgtttcaaaacttacaagtattggtatttcacatgcttttaaaagtactgttgtactttttttttttttttaagacaaggtctctctgtcacccagactgg

SEQ ID NO: 341614 - DNA, 173 bp, Homo sapiens
gctaccctaatattttctaaatgtttggaaaaagaaaactactactagaagtattcctttaaaacatgtctaccagttatctatcttccctaccaacttccttcctctaatcccaagagcataccacgtcagtcttacaagttgtttcccctcacatctcactacctatgcct

SEQ ID NO: 341615 - DNA, 353 bp, Homo sapiens
gaaaaggaggaaagacaggttagctggggatgatgacggatctgaagcaaagccattcagtgaggctgaatgatggacccttcatgccagtgctgggatttggcacttatgctcctgatcatactcccaaaagccaggctgccgaggccaccaaagtggctattgacgtaggcttccgccatattgattcagcatacttatacctcaagagagaggaaatattctacaccatcaagctttgggctactttctttcgggcagaattggttcacccggccctagaaaggtcactgaagaaacttggaccggactatgtagatctcttcattattcatgtaccatttgctatgaag

SEQ ID NO: 341616 - DNA, 504 bp, Homo sapiens
tccagtatctccctccatgggttcagccctccttctcctgagttgtcaaaaggacagtgaaataaatatgacattttaggttctccaatcccaaagcctatcccaaatcttatactcagtggagagagccctgatccaatcagtccaatagtgctgttgcttcttgcatctaccagtgttgcctcctggccctccagagtttggtgatgaagctagtctgttctgtaagggacctccatgacccatgtctctggggagtaagttgtggctgttgaagggaggtgatactatcaccttttcttagaccattttgtgttgctataatagaatacctgagactgggtaatttataaagaacaaagacttacaggtttggagcctaggaagtccaaggtcaaggggcctgcatctggtagaggccttctttctgtgttatcccctggcagaaggcagaagggcaagagagaggaggggggccaaactcatccctttatcagaatccca

SEQ ID NO: 341617 - DNA, 216 bp, Homo sapiens
aggacttaaatttttggagagacaaatgtcaccttttgtttactttctgtttcttggatttctggctatatgtgctgtattttgaaatctttatgtcttcagcacacgtcagccagtaaattgcattagtttacataggtagttacataggcaacctccgcctcccaggttcaagtgattctcctgcctcagcttccctagtagctgggactacag

SEQ ID NO: 341618 - DNA, 1287 bp, Homo sapiens
  misc_feature (3)..(4): n is a, c, g, or t
  misc_feature (7)..(8): n is a, c, g, or t
ggnncgnngtcgtcgccgccgccaccactgtcgccatgaacagtgtgggggaggcatgcacggacatgaagcgcgagtacgaccagtgcttcaatcgctggttcgccgagaaatttctcaagggggacagctccggggacccgtgcaccgacctcttcaagcgctaccagcagtgtgttcagaaagcaataaaggagaaagagattcctattgaaggactggagttcatgggccatggcaaagaaaagcctgaaaattcttcttgaccttgacagtcaccttgaaggatttcgcaagtccagaaattgaggactctggatttttgtcaactaactctgtgaacatagccatcagatttgatgaggaacttaggagagaggagttttatttcctccttcgatgttttcctctcagttgtaaaagatgaactctttgagatgatttctcacctgctgtggtatcttgcaggaactgtgtgctaaaattgaacaatttttttgagattatggttgcaatacttggcgtggaatcagctttacataaatataccttgtatgcaaacgatgataaactagtcaggatgagcagagctgcctgacctcttgatttctgctgcaaaagacatatacactgtactggggtcactatttatgaaagcaattggttaggacctctttttttcctctcagggaactaatgctctgaaaagggatctgggcacaacagtttcagtgagtgcttttgagcacacttttatttttatatagtaactaatggttaagattgatggtggcctggattagcaaagaggaagacagcttttaacacagttccctgccttcacaagaggtgtcagattaagatgtgaaagctgcaagaatgttgcagtgaacaccatttcagagctctcagtgtgcagttcaggaattaagatacttggaatagctgtggaggaagaacctaaattgcaaagatctgctattgccagctctcaacccaagtcagtgaattgtcaacctgcatatcctaaaaatgtcaaaatgctgcatctggttaaatgtcggggtaggggggaagctgaaggtgctcgcttcatttgccttgtttactcatcctgccctgtaatgtctgtaatcctgaagatggaataaattgtaacatttagtttctatcattaaaaggctcaattaaccaactgaaggggcggcctctgtacccatttcgacctatcgtgagtcgtattccatttaactggacgtcactttacaaacgtcatgactgataaaa

SEQ ID NO: 341619 - DNA, 1650 bp, Homo sapiens
ccattataatattcatgcgctgctttttcatcaaaacctaccctgtcctagagatctatgggcatttggtggatgataatgagcagcccctcccagatagaatgtcaatatttgagcagtaggatattggcatttgttagttaaaggcttaaatcaaaagaatgtccaatggtaggaatttcaaggtgtaggtcagatatttgagaataggggatttttttgatgtgccttaaattataccaaagattactaattattcctctttgcccaaaatacttgcatccaaggttctagtctctgttgctgtgctggtctttagccccactgctggcactgatgtccctccttttcacggagacctatctgaggtacaggatggggctggcaccagatgatgtcccaccacagtccctcacctccggcctccacatgacagaaccaatttacactcaaccatgacctcacccctccttggtttctccctcgatctgtggcccttgttagatcagaatacagtgtgggggaggcatgcacggacatgaagcgcgagtacgaccagtgcttcaatcgctggttcgccgagaaatttctcaagggggacagctccggggacccgtgcaccgacctcttcaagcgctaccagcagtgtgttcagaaagcaataaaggagaaagagattcctattgaaggactggagttcatgggccatggcaaagaaaagcctgaaaattcttcttgaccttgacagtcaccttgaaggatttcgcaagtccagaaattgaggactctggatttttgtcaactaactctgtgaacatagccatcagatttgatgaggaacttaggagagaggagttttatttcctccttcgatgttttcctctcagttgtaaaagatgaactctttgagatgatttctcacctgctgtggtatcttgcaggaactgtgtgctaaaattgaacaatttttttgagattatggttgcaatacttggcgtggaatcagctttacataaatataccttgtatgcaaacgatgataaactagtcaggatgagcagagctgcctgacctcttgatttctgctgcaaaagacatatacactgtactggggtcactatttatgaaagcaattggttaggacctctttttttcctctcagggaactaatgctctgaaaagggatctgggcacaacagtttcagtgagtgcttttgagcacacttttatttttatatagtaactaatggttaagattgatggtggcctggattagcaaagaggaagacagcttttaacacagttccctgccttcacaagaggtgtcagattaagatgtgaaagctgcaagaatgttgcagtgaacaccatttcagagctctcagtgtgcagttcaggaattaagatacttggaatagctgtggaggaagaacctaaattgcaaagatctgctattgccagctctcaacccaagtcagtgaattgtcaacctgcatatcctaaaaatgtcaaaatgctgcatctggttaaatgtcggggtaggggggaagctgaaggtgctcgcttcatttgccttgtttactcatcctgccctgtaatgtctgtaatcctgaagatggaataaattgtaacatttagtttctatcatta

SEQ ID NO: 341620 - DNA, 1364 bp, Homo sapiens
ccattataatattcatgcgctgctttttcatcaaaacctaccctgtcctagagatctatgggcatttggtggatgataatgagcagcccctcccagatagaatgtcaatatttgagcagtaggatattggcatttgttagttaaaggcttaaatcaaaagaatgtccaatggtaggaatttcaaggtgtaggtcagatatttgagaataggggatttttttgatgtgccttaaattataccaaagattactaattattcctctttgcccaaaatacttgcatccaaggttctagtctctgttgctgtgctggtctttagccccactgctggcactgatgtccctccttttcacggagacctatctgaggtacaggatggggctggcaccagatgatgtcccaccacagtccctcacctccggcctccacatgacagaaccaatttacactcaaccatgacctcacccctccttggtttctccctcgatctgtggcccttgttagatcagaatacagtgtgggggaggcatgcacggacatgaagcgcgagtacgaccagtgcttcaatcgctggttcgccgagaaatttctcaagggggacagctccggggacccgtgcaccgacctcttcaagcgctaccagcagtgtgttcagaaagcaataaaggagaaagagattcctattgaaggactggagttcatgggccatggcaaagaaaagcctgaaaattcttcttgaccttgacagtcaccttgaaggatttcgcaagtccagaaattgaggactctggatttttgtcaactaactctgtgaacatagccatcagatttgatgaggaacttaggagagaggagttttatttcctccttcgatgttttcctctcagttgtaaaagatgaactctttgagatgatttctcacctgctgtggtatcttgcaggaactgtgtgctaaaattgaacaatttttttgagattatggttgcaatacttggcgtggaatcagctttacataaatataccttgtatgcaaacgatgataaactagtcaggatgagcagagctgcctgacctcttgatttctgctgcaaaagacatatacactgtactggggtcactatttatgaaagcaattggttaggacctctttttttcctctctcctaagttcctcatcaaatctgatggctatgttcacagagttagttgacaaaaatccagagtcctcaattactggacttgcgaaatccttcaaggtgactgtcaaggtcaagaagaattttcaggcttttctttgccatggcccatgaactccagtccttcaataggaatctctttctcctttattgctttctgaacacactg

SEQ ID NO: 341621 - DNA, 1177 bp, Homo sapiens
  misc_feature (3)..(4): n is a, c, g, or t
  misc_feature (7)..(8): n is a, c, g, or t
ggnncgnngtcgtcgccgccgccaccactgtcgccatgaacagtgtgggggaggcatgcacggacatgaagcgcgagtacgaccagtgcttcaatcgctggttcgccgagaaatttctcaagggggacagctccggggacccgtgcaccgacctcttcaagcgctaccagcagtgtgttcagaaagcaataaaggagaaagagattcctattgaaggactggagttcatgggccatggcaaagaaaagcctgaaaattcttcttgaccttgacagtcaccttgaaggatttcgcaagtccagaaattgaggactctggatttttgtcaactaactctgtgaacatagccatcagatttgatgaggaacttaggagagaggagttttatttcctccttcgatgttttcctctcagttgtaaaagatgaactctttgagatgatttctcacctgctgtggtatcttgcaggaactgtgtgctaaaattgaacaatttttttgagattatggttgcaatacttggcgtggaatcagctttacataaatataccttgtatgcaaacgatgataaactagtcaggatgagcagagctgcctgacctcttgatttctgctgcaaaagacatatacactgtactggggtcactatttatgaaagcaattggttaggacctctttttttcctctcagggaactaatgctctgaaaagggatctgggcacaacagtttcagtgagtgcttttgagcacacttttatttttatatagtaactaatggttaagattgatggtggcctggattagcaaagaggaagacagcttttaacacagttccctgccttcacaagaggtgtcagattaagatgtgaaagctgcaagaatgttgcagtgaacaccatttcagagctctcagtgtgcagttcaggaattaagatacttggaatagctgtggaggaagaacctaaattgcaaagatctgctattgccagctctcaacccaagtcagtgaattgtcaacctgcatatcctaaaaatgtcaaaatgctgcatctggttaaatgtcggggtaggggggaagctgaaggtgctcgcttcatttgccttgtttactcatcctgccctgtaatgtctgtaatcctgaagatggaataaattgtaacatttagtttctatcatta

SEQ ID NO: 341622 - DNA, 1910 bp, Homo sapiens
ccattataatattcatgcgctgctttttcatcaaaacctaccctgtcctagagatctatgggcatttggtggatgataatgagcagcccctcccagatagaatgtcaatatttgagcagtaggatattggcatttgttagttaaaggcttaaatcaaaagaatgtccaatggtaggaatttcaaggtgtaggtcagatatttgagaataggggatttttttgatgtgccttaaattataccaaagattactaattattcctctttgcccaaaatacttgcatccaaggttctagtctctgttgctgtgctggtctttagccccactgctggcactgatgtccctccttttcacggagacctatctgaggtacaggatggggctggcaccagatgatgtcccaccacagtccctcacctccggcctccacatgacagaaccaatttacactcaaccatgacctcacccctccttggtttctccctcgatctgtggcccttgttagatcagaatacagtgtgggggaggcatgcacggacatgaagcgcgagtacgaccagtgcttcaatcgctggttcgccgagaaatttctcaagggggacagctccggggacccgtgcaccgacctcttcaagcgctaccagcagtgtgttcaggtgagccctcccgcctctgttcccaggccctgcattctcggcgctgtgtcccaccacactcatcgtattttacggggattgggactggactggaagggtggagaaaagtcgcagtgaggccagtggcaggagctcgctcccctaccatcaccaccgaggccacttgggtgtctctccgaatgacaaatattggggcagtgcttttcaagaagcacagtcacatcctttggttcatttggtgttcaccctaaactcgcaagaaagcaataaaggagaaagagattcctattgaaggactggagttcatgggccatggcaaagaaaagcctgaaaattcttcttgaccttgacagtcaccttgaaggatttcgcaagtccagaaattgaggactctggatttttgtcaactaactctgtgaacatagccatcagatttgatgaggaacttaggagagaggagttttatttcctccttcgatgttttcctctcagttgtaaaagatgaactctttgagatgatttctcacctgctgtggtatcttgcaggaactgtgtgctaaaattgaacaatttttttgagattatggttgcaatacttggcgtggaatcagctttacataaatataccttgtatgcaaacgatgataaactagtcaggatgagcagagctgcctgacctcttgatttctgctgcaaaagacatatacactgtactggggtcactatttatgaaagcaattggttaggacctctttttttcctctcagggaactaatgctctgaaaagggatctgggcacaacagtttcagtgagtgcttttgagcacacttttatttttatatagtaactaatggttaagattgatggtggcctggattagcaaagaggaagacagcttttaacacagttccctgccttcacaagaggtgtcagattaagatgtgaaagctgcaagaatgttgcagtgaacaccatttcagagctctcagtgtgcagttcaggaattaagatacttggaatagctgtggaggaagaacctaaattgcaaagatctgctattgccagctctcaacccaagtcagtgaattgtcaacctgcatatcctaaaaatgtcaaaatgctgcatctggttaaatgtcggggtaggggggaagctgaaggtgctcgcttcatttgccttgtttactcatcctgccctgtaatgtctgtaatcctgaagatggaataaattgtaacatttagtttctatcatta

SEQ ID NO: 341623 - DNA, 823 bp, Homo sapiens
ccacatttgcaggacttgatctcagtgagagattgaggaaagccaaggaaaacaccttcctgggataatatttgacctttatgtccgaactgtaggctgaatcatctgcttcaatgggttctagcagagaaagtgagtttatggtttatccatctcagtcggccaagagagtcccagtttatacctgctgcctttgtgtcattaacactacccccttttacttgtgcttgtccccccttgcacaacaaattatagagttaccttatttattctgaggagtaagatttttgagaatgaaatttatagtgttcaagacttctccaaagcatttactgacagtaaaaaatacaagtacacttaggcagtcagagtacaaaggactgtcaactgaaagaaggggaaggggtattttcaatgatgaaaatcaacttcttagcactcaactttttggcagaggagtaaatactgcaaacagaatgacaagcaagacgtgccctcagggaactttctacctgcttctttctttatgctggatgcctgcctttctgcaccctgcccttctcagcctttgccaggggtctagacgttcccattgacctcttctttctcatgctctatcttcttctgctttttcctgtagcccagtgtcctctttcctcttttcccatctgttcctttatgcagaaaggtgttgaactgtagacttaagtgagggcatgtcttgtcagctgttgtatatgtactctttagcacagggtttggtctgtgggaggtgctaagagtgagtgagtgtgtgtgtgtgtgtgtgtgtgagagtgtatgt

SEQ ID NO: 341624 - DNA, 923 bp, Homo sapiens
  misc_feature (818)..(820): n is a, c, g, or t
  misc_feature (828)..(828): n is a, c, g, or t
  misc_feature (834)..(834): n is a, c, g, or t
  misc_feature (839)..(839): n is a, c, g, or t
  misc_feature (849)..(849): n is a, c, g, or t
  misc_feature (851)..(851): n is a, c, g, or t
  misc_feature (853)..(853): n is a, c, g, or t
  misc_feature (855)..(855): n is a, c, g, or t
  misc_feature (878)..(878): n is a, c, g, or t
  misc_feature (885)..(885): n is a, c, g, or t
aaatgtgaagcatgtgacaaagttttcagtcgcaaatcacaccttaaaagacataggataattcatactgaagagaaatcttctgagtgtaataaatgtggcatgtttttcagacattgttcatacattgcagttcattggcaacctcatactggagagaaaccttacaaatgtcatgattgaggcaaggtcttcagtcaagcttcatcctatgcaaaacaggagaattcatacaggagagaaacctcacaagtgtgatgattgtggcaaagcctttacttcacattcacacctcgttggacatcagagaatccatactggacagaaatcttgcaaatgtcatcagtgtggcaaggtcttcagtccgaggtcactccttgcagaacatgagaaaattcatttttgagataactgttcccaatgcagtgagtatagcaaaccatcaagcattaattgacattggagtcaattcagcattgacttgagtttgtgttgacttaacattgagttcaagccttaattgacattcaagtgtttatgttaagaggatggggccaggtgttggtggctcgggcctgtaatcccagcacgttggaagaccaaggcacataggtcacttgaggtcagaagtttgaaaccaccatgggcaacagatgtcggcactttcgccatcctgttttttggtcttattttcttatttatttatttatctatttgagatggagtgtcactcttgttgccagctggagtgcatgatgtgatctcagtcacacaaactccggctccgggtcaagcgattctctgctcagctccctgtnnnggttcggntttgcnccccngtatttgttngngncngggtcccttggggtgggcccccngttgccngggtccgtggtaggggacgcggggtaaagggagaggcg

SEQ ID NO: 341625 - DNA, 277 bp, Homo sapiens
agtaacactacaacaattgcaaatcattggagaatccatgatgaagagaaatcttctgagtgtaataaatgtggcatgtttttcagacattgttcatacattgcagttcattggcaacctcatactggagagaaaccttacaaatgtcatgattgaggcaaggtcttcagtcaagcttcatcctatgcaaaacaggagaattcatacaggagagaaacctcacaagtgtgatgattgtggcaaagcctttacttcacattcacacctcgttggacat

SEQ ID NO: 341626 - DNA, 648 bp, Homo sapiens
cctgaaaaggcacatattatgatctaggtccagggacatttaaggcaaatttacacttactgtcactgtggagtatctctataaatagatgtttataggtggaccagtccttagaattcttccgtacaaacacccaggggtgttccacttccagaatttattttctcactcattactctactttgttttaaactttcatttctcagcatatgcaagaacagcacttgtcacacaaaggagctgatataattaaaccggatgatgggccccacaagtaaagccagccattcatgaaagctggtcaccagaggccatttcaaacaatgcatattttaaagtcatctaaagtaatcccttctctcttctgacttggtttccatgaagtctcaagcacatgtgtgctgcaaaaaggaggtttattaaaacctgatgtgatattagagattacagtgcaacagggttgggctgattttaatatctcagtcttcaaaaagaaaagcaatctttaataatatttgcaagcttactaaaacatcctgcatagaaaggaagatagatgatgtttattaattaaggaaaaaccaaaataaagactgcactcatgttctcttgatagggtatatataaatttgcataataaattgaggg

SEQ ID NO: 341627 - DNA, 384 bp, Homo sapiens
catctggtggaagaattggggttgtttccacattttggctattgtgaatagtactgctatgaacatttatgtacaaatgtccatttgagtctctgctttcaagtcttttgagtacatacctaggagtggaattactagatcatgtgggaattgtttttgagaaactgccaagtggagaccttcatttaaaaaaatctagagccagggtgtggtggctcacacctataatcccagcactttgagaggctgaggtgggaggatcacttgaagccaggagttcgagaccagcctgggcaacatagtgagactctgtctgtacaaaaacatgaaaatattagctgggtgtggtagcgcttacctgtagtcccagctgtttgggaggct

SEQ ID NO: 341628 - DNA, 368 bp, Homo sapiens
gtatacatcgttatgagtgtgtattgccaccattttcccaggggttaaaagacaggtagactattgcctattaacccagggttctccgaaccgattggtcattattgtcattactgcttttctcatttgtcattattacatcatttctttctgtgctcattgtaatctataatgacgaaatagcagatcttttgcttgttaacagtgttttgtgtctttgttaggagatttcataccatgttaatcattatggaaacactacttaagagaatatggctgaaatatgtttgggtttttaaaaatatctttcttacagactaatattgtctgtggacctttctacatttgtttgtttgtttttgaaacag

SEQ ID NO: 341629 - DNA, 487 bp, Homo sapiens
tggtttagaaaatttcatttgcttctcgtgaagtacaagactgaagattcatattgcacataaaaaattaattcttggtccattattattttcaacctgtgttaataatgtattagatgagtttattgcatagatgtgaatgtatagatgggcacattttgggttagactggtcagatgtgattctgagatcactcttattccaaaccaaatttaatgctattggtttaatgttttaagaaatatgactctcagttcataagaggggtttattcaaagtgtatgttgttttagtaaaggctatatttctgatattgattaagccatcttccactggtgtacgaatgattaattcactattaaatcttaggacatgagcaagccacaggaccaacattttaaaaactaccaaagtacaagtacaactgtataaaaaggacataaaagcctaatatacagctttcctaatattatgtctattttaacag

SEQ ID NO: 341630 - DNA, 770 bp, Homo sapiens
accaaattgggaggagggagatcctcaaggatgggaaacattcaagcagaggattaaagcatcaggagcattctgctgggactgagaagcggagggcactgcattcatatctgtgcaaaaactcagacaagtccttttggctcctggcaaccctggtagggtagactgacgcctagagttcagaatgcatagaataatagagagagatgggggacaagcctggaagggtgaacaaaggaggttagattttaacctggcctcaactttagaacctgagggaaaggattctgaatgagaattaaagacccatgagtgccctcagtcataccttgcaaatactggtgactcaccacagtttttctgcctatgaagaccttgactataatgaggataacttttatcttcattgatttggttaaaatggaacaattagagtcaagaaatttgtgaaaggtttaatttaatctaaatctctggagaagaccactggcaaaatcaatggtactttattaattcattaaaattcagatatttataacaatttaaaatcatgtttgcactggctaggttaaaaaagattcttgatcctaactagtaaatgccagctttgaccctgctgggaagaaaaaaaaaatagttccattaaaagaatgagaagacaatttcaaatttactataaagctacagtaatcaagacagtgcagtattggcatatggaaacacatgtagaaacagaattgaggccaggcacggtggctcacgcctgtaat

SEQ ID NO: 341631 - DNA, 751 bp, Homo sapiens
cggtcggggtcagagtgcgcggaggtgagtcggctcccaggccagtgccagtacttgggcttgccagtggcggattacttcaagcagtggattaatctgaaaaaggcttacagcttcgccatgggctgctggcccaagaatggacttctagacatgaacaagggcctcagcctgcaacacataggccggccccacagcggcattgacgactgcaagaacattgccaacatcatgaagacactcgcctatcgaggcttcatcttcaagcagacatcgaagccgttctgattggccgaggacaggatggggcaggacagggtagctgtttggcccagcccagaatcctcctctccctcaccagaggggaagagggagagtggcatagctctgtgtccagagtgtccccagctgccctgtgggctcatgcccttggcgtgggcttgtgcccttgcaagggcttggccacttggcccttctggagcagacactttgtgccccccatccccacccctcaatctcagcccagtatcagcccctcccattgcgggcctgggctagggggacccaggcactcaccgcctcctccctggtacacaggcttctgtggggccaccaagcccctcctgtgccccctcccatccatagtgcatggtgtgtggtgcccccagggctccaggacagatcaggccccaccttgtgtctacccccatccccgctgtgaacgtgccactgaataaagtcggggaaacga

SEQ ID NO: 341632 - DNA, 1761 bp, Homo sapiens
cggtcggggtcagagtgcgcggaggtgagtcgtgtgttgtggactcgtggtgctggctgccgctgttcaggcggccgggaacgggcggtggggagcgggcggagctggccctgcctctgcctggccggcgccgcagtcggcgcgggccgcgcccgccgccgccaactgccctgagcgcttgctgaggccgagggagacgtcggggcctgcacctggagggagcctgccgcgctggccccgaggagggggcgttgccatggcgacagcctctcccgctgctgacggggggcgggggcggccctgggaaggagggctggtctcctggccccccgcccctccccttactctcccctggacttggatgggcccgagttgggggcaacaccccgggcattggggctttccagctctcacagaaccttcagcatccccagctgccggtcttggcatcttcgaagtaaggagagttttagatgcttctggatgttcaatgctagcacctttacagactggagcagctcgattttcttcgtatttactttcaagagcaagaaaagtgctgggctcccacttattttctccctgtggtgttccggagttctgctccatatccaccagaaagctggcggcccacggctttggcgcatccatggcggcaatggtgtccttccctccccagaggtatcactactttttagtgctggactttgaggccacgtgcgacaagccacagattcatcctcaggaaatcatcgagttccccatcctaaagctaaatggccggaccatggagattgagtctacctttcacatgtatgtccagcctgtagtccatccacagcttaccccattctgtacagagctcaccgggattattcaagccatggtggatggtcagccaagcctgcagcaagtgctggagagggtcgatgaatggatggcgaaggaaggcctcttagatccaaacgtcaagtcaatttttgtcacctgtggagactgggacttaaaagtcatgctcccaggccagtgccagtacttgggcttgccagtggcggattacttcaagcagtggattaatctgaaaaaggcttacagcttcgccatgggctgctggcccaagaatggacttctagacatgaacaagggcctcagcctgcaacacataggccggccccacagcggcattgacgactgcaagaacattgccaacatcatgaagacactcgcctatcgaggcttcatcttcaagcagacatcgaagccgttctgattggccgaggacaggatggggcaggacagggtagctgtttggcccagcccagaatcctcctctccctcaccagaggggaagagggagagtggcatagctctgtgtccagagtgtccccagctgccctgtgggctcatgcccttggcgtgggcttgtgcccttgcaagggcttggccacttggcccttctggagcagacactttgtgccccccatccccacccctcaatctcagcccagtatcagcccctcccattgcgggcctgggctagggggacccaggcactcaccgcctcctccctggtacacaggcttctgtggggccaccaagcccctcctgtgccccctcccatccatagtgcatggtgtgtggtgcccccagggctccaggacagatcaggccccaccttgtgtctacccccatccccgctgtgaacgtgccactgaataaagtcggggaaacgaggcactgggtgtgtgtgcaaagccatct

SEQ ID NO: 341633 - DNA, 1685 bp, Homo sapiens
cggtcggggtcagagtgcgcggaggtgagtcgtgtgttgtggactcgtggtgctggctgccgctgttcaggcggccgggaacgggcggtggggagcgggcggagctggccctgcctctgcctggccggcgccgcagtcggcgcgggccgcgcccgccgccgccaactgccctgagcgcttgctgaggccgagggagacgtcggggcctgcacctggagggagcctgccgcgctggccccgaggagggggcgttgccatggcgacagcctctcccgctgctgacggggggcgggggcggccctgggaaggagggctggtctcctggccccccgcccctccccttactctcccctggacttggatgggcccgagttgggggcaacaccccgggttttagatgcttctggatgttcaatgctagcacctttacagactggagcagctcgattttcttcgtatttactttcaagagcaagaaaagtgctgggctcccacttattttctccctgtggtgttccggagttctgctccatatccaccagaaagctggcggcccacggctttggcgcatccatggcggcaatggtgtccttccctccccagaggtatcactactttttagtgctggactttgaggccacgtgcgacaagccacagattcatcctcaggaaatcatcgagttccccatcctaaagctaaatggccggaccatggagattgagtctacctttcacatgtatgtccagcctgtagtccatccacagcttaccccattctgtacagagctcaccgggattattcaagccatggtggatggtcagccaagcctgcagcaagtgctggagagggtcgatgaatggatggcgaaggaaggcctcttagatccaaacgtcaagtcaatttttgtcacctgtggagactgggacttaaaagtcatgctcccaggccagtgccagtacttgggcttgccagtggcggattacttcaagcagtggattaatctgaaaaaggcttacagcttcgccatgggctgctggcccaagaatggacttctagacatgaacaagggcctcagcctgcaacacataggccggccccacagcggcattgacgactgcaagaacattgccaacatcatgaagacactcgcctatcgaggcttcatcttcaagcagacatcgaagccgttctgattggccgaggacaggatggggcaggacagggtagctgtttggcccagcccagaatcctcctctccctcaccagaggggaagagggagagtggcatagctctgtgtccagagtgtccccagctgccctgtgggctcatgcccttggcgtgggcttgtgcccttgcaagggcttggccacttggcccttctggagcagacactttgtgccccccatccccacccctcaatctcagcccagtatcagcccctcccattgcgggcctgggctagggggacccaggcactcaccgcctcctccctggtacacaggcttctgtggggccaccaagcccctcctgtgccccctcccatccatagtgcatggtgtgtggtgcccccagggctccaggacagatcaggccccaccttgtgtctacccccatccccgctgtgaacgtgccactgaataaagtcggggaaacgaggcactgggtgtgtgtgcaaagccatct

SEQ ID NO: 341634 - DNA, 1915 bp, Homo sapiens
cggtcggggtcagagtgcgcggaggtgagtcgtgtgttgtggactcgtggtgctggctgccgctgttcaggcggccgggaacgggcggtggggagcgggcggagctggccctgcctctgcctggccggcgccgcagtcggcgcgggccgcgcccgccgccgccaactgccctgagcgcttgctgaggccgagggagacgtcggggcctgcacctggagggagcctgccgcgctggccccgaggagggggcgttgccatggcgacagcctctcccgctgctgacggggggcgggggcggccctgggaaggagggctggtctcctggccccccgcccctccccttactctcccctggacttggatgggcccgagttgggggcaacaccccgggcattggggctttccagctctcacagaaccttcagcatccccagctgccggtcttggcatcttcgaagtaaggagagttttagatgcttctggatgttcaatgctagcacctttacagactggagcagctcgattttcttcgtatttactttcaagagcaagaaaagtgctgggctcccacttattttctccctgtggtgttccggagttctgctccatatccaccagaaagctggcggcccacggctttggcgcatccatggcggcaatggtgtccttccctccccagaggtatcactactttttagtgctggactttgaggccacgtgcgacaagccacagattcatcctcaggaaatcatcgagttccccatcctaaagctaaatggccggaccatggagattgagtctacctttcacatgtatgtccagcctgtagtccatccacagcttaccccattctgtacagagctcaccgggattattcaagccatggtggatggtcagccaagcctgcagcaagtgctggagagggtcgatgaatggatggcgaaggaaggcctcttagatccaaacgtcaagtcaatttttgtcacctgtggagactgggacttaaaagtcatgctcccaggccagtgccagtacttgggcttgccagtggcggattacttcaagcagtggattaatctgaaaaaggcttacagcttcgccatgggctgctggcccaagaatggacttctagacatgaacaagggcctcagcctgcaacacataggccggccccacagcggcattggacccagaagactgatgaggctgccaggtatggcagatctgctcagctgttctcagtagccaacccctccctggctgggttcccttcacttggctgtaggtgatctggctataacctggcacttctagttgtggcatcccagaccaggagaaagacgactgcaagaacattgccaacatcatgaagacactcgcctatcgaggcttcatcttcaagcagacatcgaagccgttctgattggccgaggacaggatggggcaggacagggtagctgtttggcccagcccagaatcctcctctccctcaccagaggggaagagggagagtggcatagctctgtgtccagagtgtccccagctgccctgtgggctcatgcccttggcgtgggcttgtgcccttgcaagggcttggccacttggcccttctggagcagacactttgtgccccccatccccacccctcaatctcagcccagtatcagcccctcccattgcgggcctgggctagggggacccaggcactcaccgcctcctccctggtacacaggcttctgtggggccaccaagcccctcctgtgccccctcccatccatagtgcatggtgtgtggtgcccccagggctccaggacagatcaggccccaccttgtgtctacccccatccccgctgtgaacgtgccactgaataaagtcggggaaacgaggcactgggtgtgtgtgcaaagccatct

SEQ ID NO: 341635 - DNA, 1661 bp, Homo sapiens
cggtcggggtcagagtgcgcggaggtgagtcgtgtgttgtggactcgtggtgctggctgccgctgttcaggcggccgggaacgggcggtggggagcgggcggagctggccctgcctctgcctggccggcgccgcagtcggcgcgggccgcgcccgccgccgccaactgccctgagcgcttgctgaggccgagggagacgtcggggcctgcacctggagggagcctgccgcgctggccccgaggagggggcgttgccatggcgacagcctctcccgctgctgacggggggcgggggcggccctgggaaggagggctggtctcctggccccccgcccctccccttactctcccctggacttggatgggcccgagttgggggcaacaccccgggcattggggctttccagctctcacagaaccttcagcatccccagctgccggtcttggcatcttcgaagtaaggagagttttagatgcttctggatgttcaatgctagcacctttacagactggagcagctcgattttcttcgtatttactttcaagagcaagaaaagtgctgggctcccacttattttctccctgtggtgttccggagttctgctccatatccaccagaaagctggcggcccacggctttggcgcatccatggcggcaatggtgtccttccctccccagaggtatcactactttttagtgctggactttgaggccacgtgcgacaagccacagattcatcctcaggaaatcatcgagttccccatcctaaagctaaatggccggaccatggagattgagtctacctttcacatgtatgtccagcctgtagtccatccacagcttaccccattctgtacagagctcaccgggattattcaagccatggtggatggtcagccaagcctgcagcaagtgctggagagggtcgatgaatggatggcgaaggaaggcctcttagatccaaacgtcaagtcaatttttgtcacctgtggagactgggacttaaaagtcatgctcccaggccagtgccagtacttgggcttgccagtggcggattacttcaagcagtggattaatctgaaaaagacgactgcaagaacattgccaacatcatgaagacactcgcctatcgaggcttcatcttcaagcagacatcgaagccgttctgattggccgaggacaggatggggcaggacagggtagctgtttggcccagcccagaatcctcctctccctcaccagaggggaagagggagagtggcatagctctgtgtccagagtgtccccagctgccctgtgggctcatgcccttggcgtgggcttgtgcccttgcaagggcttggccacttggcccttctggagcagacactttgtgccccccatccccacccctcaatctcagcccagtatcagcccctcccattgcgggcctgggctagggggacccaggcactcaccgcctcctccctggtacacaggcttctgtggggccaccaagcccctcctgtgccccctcccatccatagtgcatggtgtgtggtgcccccagggctccaggacagatcaggccccaccttgtgtctacccccatccccgctgtgaacgtgccactgaataaagtcggggaaacgaggcactgggtgtgtgtgcaaagccatct

SEQ ID NO: 341636 - DNA, 1407 bp, Homo sapiens
cggtcggggtcagagtgcgcggaggtgagtcgtgtgttgtggactcgtggtgctggctgccgctgttcaggcggccgggaacgggcggtggggagcgggcggagctggccctgcctctgcctggccggcgccgcagtcggcgcgggccgcgcccgccgccgccaactgccctgagcgcttgctgaggccgagggagacgtcggggcctgcacctggagggagcctgccgcgctggccccgaggagggggcgttgccatggcgacagcctctcccgctgctgacggggggcgggggcggccctgggaaggagggctggtctcctggccccccgcccctccccttactctcccctggacttggatgggcccgagttgggggcaacaccccggggaaatcatcgagttccccatcctaaagctaaatggccggaccatggagattgagtctacctttcacatgtatgtccagcctgtagtccatccacagcttaccccattctgtacagagctcaccgggattattcaagccatggtggatggtcagccaagcctgcagcaagtgctggagagggtcgatgaatggatggcgaaggaaggcctcttagatccaaacgtcaagtcaatttttgtcacctgtggagactgggacttaaaagtcatgctcccaggccagtgccagtacttgggcttgccagtggcggattacttcaagcagtggattaatctgaaaaaggcttacagcttcgccatgggctgctggcccaagaatggacttctagacatgaacaagggcctcagcctgcaacacataggccggccccacagcggcattgacgactgcaagaacattgccaacatcatgaagacactcgcctatcgaggcttcatcttcaagcagacatcgaagccgttctgattggccgaggacaggatggggcaggacagggtagctgtttggcccagcccagaatcctcctctccctcaccagaggggaagagggagagtggcatagctctgtgtccagagtgtccccagctgccctgtgggctcatgcccttggcgtgggcttgtgcccttgcaagggcttggccacttggcccttctggagcagacactttgtgccccccatccccacccctcaatctcagcccagtatcagcccctcccattgcgggcctgggctagggggacccaggcactcaccgcctcctccctggtacacaggcttctgtggggccaccaagcccctcctgtgccccctcccatccatagtgcatggtgtgtggtgcccccagggctccaggacagatcaggccccaccttgtgtctacccccatccccgctgtgaacgtgccactgaataaagtcggggaaacgaggcactgggtgtgtgtgcaaagccatct

SEQ ID NO: 341637 - DNA, 1206 bp, Homo sapiens
tagcagttatcccgaagtttgagtttagagtttgaggtgtagtatccttcatggggatttgatccttggtattgaaatagacttgttgcagagatgtgtatttatccacagcatcattggggctttccagctctcacagaaccttcagcatccccagctgccggtcttggcatcttcgaagtaaggagaggaaatcatcgagttccccatcctaaagctaaatggccggaccatggagattgagtctacctttcacatgtatgtccagcctgtagtccatccacagcttaccccattctgtacagagctcaccgggattattcaagccatggtggatggtcagccaagcctgcagcaagtgctggagagggtcgatgaatggatggcgaaggaaggcctcttagatccaaacgtcaagtcaatttttgtcacctgtggagactgggacttaaaagtcatgctcccaggccagtgccagtacttgggcttgccagtggcggattacttcaagcagtggattaatctgaaaaaggcttacagcttcgccatgggctgctggcccaagaatggacttctagacatgaacaagggcctcagcctgcaacacataggccggccccacagcggcattgacgactgcaagaacattgccaacatcatgaagacactcgcctatcgaggcttcatcttcaagcagacatcgaagccgttctgattggccgaggacaggatggggcaggacagggtagctgtttggcccagcccagaatcctcctctccctcaccagaggggaagagggagagtggcatagctctgtgtccagagtgtccccagctgccctgtgggctcatgcccttggcgtgggcttgtgcccttgcaagggcttggccacttggcccttctggagcagacactttgtgccccccatccccacccctcaatctcagcccagtatcagcccctcccattgcgggcctgggctagggggacccaggcactcaccgcctcctccctggtacacaggcttctgtggggccaccaagcccctcctgtgccccctcccatccatagtgcatggtgtgtggtgcccccagggctccaggacagatcaggccccaccttgtgtctacccccatccccgctgtgaacgtgccactgaataaagtcggggaaacgaggcactgggtgtgtgtgcaaagccatct

SEQ ID NO: 341638 - DNA, 1056 bp, Homo sapiens
  misc_feature (24)..(24): n is a, c, g, or t
  misc_feature (40)..(40): n is a, c, g, or t
aacttagctaggtcgaggctgggngtgaatcggccgaggngaaatcatcgagttccccatcctaaagctaaatggccggaccatggagattgagtctacctttcacatgtatgtccagcctgtagtccatccacagcttaccccattctgtacagagctcaccgggattattcaagccatggtggatggtcagccaagcctgcagcaagtgctggagagggtcgatgaatggatggcgaaggaaggcctcttagatccaaacgtcaagtcaatttttgtcacctgtggagactgggacttaaaagtcatgctcccaggccagtgccagtacttgggcttgccagtggcggattacttcaagcagtggattaatctgaaaaaggcttacagcttcgccatgggctgctggcccaagaatggacttctagacatgaacaagggcctcagcctgcaacacataggccggccccacagcggcattgacgactgcaagaacattgccaacatcatgaagacactcgcctatcgaggcttcatcttcaagcagacatcgaagccgttctgattggccgaggacaggatggggcaggacagggtagctgtttggcccagcccagaatcctcctctccctcaccagaggggaagagggagagtggcatagctctgtgtccagagtgtccccagctgccctgtgggctcatgcccttggcgtgggcttgtgcccttgcaagggcttggccacttggcccttctggagcagacactttgtgccccccatccccacccctcaatctcagcccagtatcagcccctcccattgcgggcctgggctagggggacccaggcactcaccgcctcctccctggtacacaggcttctgtggggccaccaagcccctcctgtgccccctcccatccatagtgcatggtgtgtggtgcccccagggctccaggacagatcaggccccaccttgtgtctacccccatccccgctgtgaacgtgccactgaataaagtcggggaaacgaggcactgggtgtgtgtgcaaagccatct

SEQ ID NO: 341639 - DNA, 1335 bp, Homo sapiens
gaaattggctgagagaaaaggtcagggtcaggaataacagtttcattatctgagcaactggacatagaggctggcacttgggcacattgtcacaaatctttgtgttgggattaatgccactaacctgtagtgttggggttccatctctgatcattatcagctaaaaatcttcaaaatgtttgtcatgcttcaggtgccctggctgcagagttgtgccaacttggtgcagattggggcacctctcccactactgggctgtttgggccagtattttgaggttctgggaagtatggaagtactggctgggcaatatgggaaggaaatcatcgagttccccatcctaaagctaaatggccggaccatggagattgagtctacctttcacatgtatgtccagcctgtagtccatccacagcttaccccattctgtacagagctcaccgggattattcaagccatggtggatggtcagccaagcctgcagcaagtgctggagagggtcgatgaatggatggcgaaggaaggcctcttagatccaaacgtcaagtcaatttttgtcacctgtggagactgggacttaaaagtcatgctcccaggccagtgccagtacttgggcttgccagtggcggattacttcaagcagtggattaatctgaaaaaggcttacagcttcgccatgggctgctggcccaagaatggacttctagacatgaacaagggcctcagcctgcaacacataggccggccccacagcggcattgacgactgcaagaacattgccaacatcatgaagacactcgcctatcgaggcttcatcttcaagcagacatcgaagccgttctgattggccgaggacaggatggggcaggacagggtagctgtttggcccagcccagaatcctcctctccctcaccagaggggaagagggagagtggcatagctctgtgtccagagtgtccccagctgccctgtgggctcatgcccttggcgtgggcttgtgcccttgcaagggcttggccacttggcccttctggagcagacactttgtgccccccatccccacccctcaatctcagcccagtatcagcccctcccattgcgggcctgggctagggggacccaggcactcaccgcctcctccctggtacacaggcttctgtggggccaccaagcccctcctgtgccccctcccatccatagtgcatggtgtgtggtgcccccagggctccaggacagatcaggccccaccttgtgtctacccccatccccgctgtgaacgtgccactgaataaagtcggggaaacgaggcactgggtgtgtgtgcaaagccatct

SEQ ID NO: 341640 - DNA, 846 bp, Homo sapiens
gggactgaggcagcatggctcaggagctacttatcttattctcaacccagaaacttcactgtccccaaggcccctctgactcagcggtgaagccaagaaatctgagagcaagaaagagaaaactccacctgaaaatactcgggaccataatacttgggatcaaactgagctggcttacagcttcgccatgggctgctggcccaagaatggacttctagacatgaacaagggcctcagcctgcaacacataggccggccccacagcggcattgacgactgcaagaacattgccaacatcatgaagacactcgcctatcgaggcttcatcttcaagcagacatcgaagccgttctgattggccgaggacaggatggggcaggacagggtagctgtttggcccagcccagaatcctcctctccctcaccagaggggaagagggagagtggcatagctctgtgtccagagtgtccccagctgccctgtgggctcatgcccttggcgtgggcttgtgcccttgcaagggcttggccacttggcccttctggagcagacactttgtgccccccatccccacccctcaatctcagcccagtatcagcccctcccattgcgggcctgggctagggggacccaggcactcaccgcctcctccctggtacacaggcttctgtggggccaccaagcccctcctgtgccccctcccatccatagtgcatggtgtgtggtgcccccagggctccaggacagatcaggccccaccttgtgtctacccccatccccgctgtgaacgtgccactgaataaagtcggggaaacgaggcactgggtgtgtgtgcaaagccatct

SEQ ID NO: 341641 - DNA, 701 bp, Homo sapiens
cggtcggggtcagagtgcgcggaggtgagtcgtgtgttgtggactcgtggtgctggctgccgctgttcaggcggccgggaacgggcggtggggagcgggcggagctggccctgcctctgcctggccggcgccgcagtcggcgcgggccgcgcccgccgccgccaactgccctgagcgcttgctgaggccgagggagacgtcggggcctgcacctggagggagcctgccgcgctggccccgaggagggggcgttgccatggcgacagcctctcccgctgctgacggggggcgggggcggccctgggaaggagggctggtctcctggccccccgcccctccccttactctcccctggacttggatgggcccgagttgggggcaacaccccgggcattggggctttccagctctcacagaaccttcagcatccccagctgccggtcttggcatcttcgaagtaaggagagttttagatgcttctggatgttcaatgctagcacctttacagactggagcagctcgattttcttcgtatttactttcaagagcaagaaaagtgctgggctcccacttattttctccctgtggtgttccggagttctgctccatatccaccagaaagctggcggcccacggctttggcgcatccatggcggcaatggtgtccttccctcctgaggatgaatctgtggcttgtcgcc

SEQ ID NO: 341642 - DNA, 460 bp, Homo sapiens
gcttacagcttcgccatgggctgctggcccaagaatggacttctagacatgaacaagggcctcagcctgcaacacataggccggccccacagcggcattggtcagtcccttcgcatattcccccggcagctccatccatcgtcccttgcccgcgtgccccagtccccaggcacatagagagtttccatggctcattcagtgccccaacagggctctctacataggtggggggatggtggaaggggggtggcatgagaaaattactgaatgggaccactggaaggcaccactcaaagtggtattttggaggaggctggggtctgggctttgggtgagtcacagatggccttggactcaggccaaggtcctccttcactggctgcatctctagtgggcaatgtcctcagtgggtggggacatgtcagcttacccaccccccatggagctggaggaggctgtt

SEQ ID NO: 341643 - DNA, 836 bp, Homo sapiens
  misc_feature (2)..(2): n is a, c, g, or t
  misc_feature (25)..(25): n is a, c, g, or t
  misc_feature (28)..(28): n is a, c, g, or t
  misc_feature (60)..(60): n is a, c, g, or t
  misc_feature (97)..(97): n is a, c, g, or t
gntgaaaaaagggttccgaaggaantgnaatggccaaaggaaaggccttttttagatccnaaacgtcaaagtcaaattttttgtcaaccttgtgaanaattgggacttaaaagtcatgctcccaggccagtgccagtacttgggcttgccagtggcggattacttcaagcagtggattaatctgaaaaaggcttacagcttcgccatgggctgctggcccaagaatggacttctagacatgaacaagggcctcagcctgcaacacataggccggccccacagcggcattgacgactgcaagaacattgccaacatcatgaagacactcgcctatcgaggcttcatcttcaagcagacatcgaagccgttctgattggccgaggacaggatggggcaggacagggtagctgtttggcccagcccagaatcctcctctccctcaccagaggggaagagggagagtggcatagctctgtgtccagagtgtccccagctgccctgtgggctcatgcccttggcgtgggcttgtgcccttgcaagggcttggccacttggcccttctggagcagacactttgtgccccccatccccacccctcaatctcagcccagtatcagcccctcccattgcgggcctgggctagggggacccaggcactcaccgcctcctccctggtacacaggcttctgtggggccaccaagcccctcctgtgccccctcccatccatagtgcatggtgtgtggtgcccccagggctccaggacagatcaggccccaccttgtgtctacccccatccccgctgtgaacgtgccactgaataaagtcggggaaacga

SEQ ID NO: 341644 - DNA, 1733 bp, Homo sapiens
cggtcggggtcagagtgcgcggaggtgagtcgtgtgttgtggactcgtggtgctggctgccgctgttcaggcggccgggaacgggcggtggggagcgggcggagctggccctgcctctgcctggccggcgccgcagtcggcgcgggccgcgcccgccgccgccaactgccctgagcgcttgctgaggccgagggagacgtcggggcctgcacctggagggagcctgccgcgctggccccgaggagggggcgttgccatggcgacagcctctcccgctgctgacggggggcgggggcggccctgggaaggagggctggtctcctggccccccgcccctccccttactctcccctggacttggatgggcccgagttgggggcaacaccccgggcattggggctttccagctctcacagaaccttcagcatccccagctgccggtcttggcatcttcgaagtaaggagagttttagatgcttctggatgttcaatgctagcacctttacagactggagcagctcgattttcttcgtatttactttcaagagcaagaaaagtgctgggctcccacttattttctccctgtggtgttccggagttctgctccatatccaccagaaagctggcggcccacggctttggcgcatccatggcggcaatggtgtccttccctccccagaggtatcactactttttagtgctggactttgaggccacgtgcgacaagccacagattcatcctcaggaaatcatcgagttccccatcctaaagctaaatggccggaccatggagattgagtctacctttcacatgtatgtccagcctgtagtccatccacagcttaccccattctgtacagagctcaccgggattattcaagccatggtggatggtcagccaagcctgcagcaagtgctggagagggtcgatgaatggatggcgaaggaaggcctcttagatccaaacgtcaagtcaatttttgtcacctgtggagactgggacttaaaagtcatgctcccaggccagtgccagtacttgggcttgccagtggcggattacttcaagcagtggattaatctgaaaaaggcttacagcttcgccatgggctgctggcccaagaatggacttctagacatgaacaagggcctcagcctgcaacacataggccggccccacagcggcattgacgactgcaagaacattgccaacatcatgaagacactcgcctatcgaggcttcatcttcaagcagacatcgaagccgttctgattggccgaggacaggatggggcaggacagggtagctgtttggcccagcccagaatcctcctctccctcaccagaggggaagagggagagtggcatagctctgtgtccagagtgtccccagctgccctgtgggctcatgcccttggcgtgggcttgtgcccttgcaagggcttggccacttggcccttctggagcagacactttgtgccccccatccccacccctcaatctcagcccagtatcagcccctcccattgcgggcctgggctagggggacccaggcactcaccgcctcctccctggtacacaggcttctgtggggccaccaagcccctcctgtgccccctcccatccatagtgcatggtgtgtggtgcccccagggctccaggacagatcaggccccaccttgtgtctacccccatccccgctgtgaacgtgccactgaataaagtcggggaaacga

SEQ ID NO: 341645 - DNA, 1927 bp, Homo sapiens
cggtcggggtcagagtgcgcggaggtgagtcgtgtgttgtggactcgtggtgctggctgccgctgttcaggcggccgggaacgggcggtggggagcgggcggagctggccctgcctctgcctggccggcgccgcagtcggcgcgggccgcgcccgccgccgccaactgccctgagcgcttgctgaggccgagggagacgtcggggcctgcacctggagggagcctgccgcgctggccccgaggagggggcgttgccatggcgacagcctctcccgctgctgacggggggcgggggcggccctgggaaggagggctggtctcctggccccccgcccctccccttactctcccctggacttggatgggcccgagttgggggcaacaccccgggcattggggctttccagctctcacagaaccttcagcatccccagctgccggtcttggcatcttcgaagtaaggagagttttagatgcttctggatgttcaatgctagcacctttacagactggagcagctcgattttcttcgtatttactttcaagagcaagaaaagtgctgggctcccacttattttctccctgtggtgttccggagttctgctccatatccaccagaaagctggcggcccacggctttggcgcatccatggcggcaatggtgtccttccctccccagaggtatcactactttttagtgctggactttgaggccacgtgcgacaagccacagattcatcctcaggaaatcatcgagttccccatcctaaagctaaatggccggaccatggagattgagtctacctttcacatgtatgtccagcctgtagtccatccacagcttaccccattctgtacagagctcaccgggattattcaagccatggtggatggtcagccaagcctgcagcaagtgctggagagggtcgatgaatggatggcgaaggaaggcctcttagatccaaacgtcaagtcaatttttgtcacctgtggagactgggacttaaaagtcatgctcccaggccagtgccagtacttgggcttgccagtggcggattacttcaagcagtggattaatctgaaaaaggcttacagcttcgccatgggctgctggcccaagaatggacttctagacatgaacaagggcctcagcctgcaacacataggccggccccacagcggcattgggtctgcactggcctgcctggatagtgcctggggagagggtgctggctccttccttcctgagctgacccccttggagccccagagacatctgaggaattggttcttgccagacaccagactgttcttcagtagcaaccatagatggaagaatggctagatggatggacgactgcaagaacattgccaacatcatgaagacactcgcctatcgaggcttcatcttcaagcagacatcgaagccgttctgattggccgaggacaggatggggcaggacagggtagctgtttggcccagcccagaatcctcctctccctcaccagaggggaagagggagagtggcatagctctgtgtccagagtgtccccagctgccctgtgggctcatgcccttggcgtgggcttgtgcccttgcaagggcttggccacttggcccttctggagcagacactttgtgccccccatccccacccctcaatctcagcccagtatcagcccctcccattgcgggcctgggctagggggacccaggcactcaccgcctcctccctggtacacaggcttctgtggggccaccaagcccctcctgtgccccctcccatccatagtgcatggtgtgtggtgcccccagggctccaggacagatcaggccccaccttgtgtctacccccatccccgctgtgaacgtgccactgaataaagtcggggaaacgaggcactgggtgtgtgtgcaaagccatct

SEQ ID NO: 341646 - DNA, 1845 bp, Homo sapiens
cggtcggggtcagagtgcgcggaggtgagtcgtgtgttgtggactcgtggtgctggctgccgctgttcaggcggccgggaacgggcggtggggagcgggcggagctggccctgcctctgcctggccggcgccgcagtcggcgcgggccgcgcccgccgccgccaactgccctgagcgcttgctgaggccgagggagacgtcggggcctgcacctggagggagcctgccgcgctggccccgaggagggggcgttgccatggcgacagcctctcccgctgctgacggggggcgggggcggccctgggaaggagggctggtctcctggccccccgcccctccccttactctcccctggacttggatgggcccgagttgggggcaacaccccgggcattggggctttccagctctcacagaaccttcagcatccccagctgccggtcttggcatcttcgaagtaaggagagttttagatgcttctggatgttcaatgctagcacctttacagactggagcagctcgattttcttcgtatttactttcaagagcaagaaaagtgctgggctcccacttattttctccctgtggtgttccggagttctgctccatatccaccagaaagctggcggcccacggctttggcgcatccatggcggcaatggtgtccttccctccccagaggtatcactactttttagtgctggactttgaggccacgtgcgacaagccacagattcatcctcaggaaatcatcgagttccccatcctaaagctaaatggccggaccatggagattgagtctacctttcacatgtatgtccagcctgtagtccatccacagcttaccccattctgtacagagctcaccgggattattcaagccatggtggatggtcagccaagcctgcagcaagtgctggagagggtcgatgaatggatggcgaaggaaggcctcttagatccaaacgtcaagtcaatttttgtcacctgtggagactgggacttaaaagtcatgctcccaggccagtgccagtacttgggcttgccagtggcggattacttcaagcagtggattaatctgaaaaagggcagcagtcctggaacagcctcaggaacctcatgctaccagtcagaggaagctcagagaaaggagaacacaccgggggtcaaggcttacagcttcgccatgggctgctggcccaagaatggacttctagacatgaacaagggcctcagcctgcaacacataggccggccccacagcggcattgacgactgcaagaacattgccaacatcatgaagacactcgcctatcgaggcttcatcttcaagcagacatcgaagccgttctgattggccgaggacaggatggggcaggacagggtagctgtttggcccagcccagaatcctcctctccctcaccagaggggaagagggagagtggcatagctctgtgtccagagtgtccccagctgccctgtgggctcatgcccttggcgtgggcttgtgcccttgcaagggcttggccacttggcccttctggagcagacactttgtgccccccatccccacccctcaatctcagcccagtatcagcccctcccattgcgggcctgggctagggggacccaggcactcaccgcctcctccctggtacacaggcttctgtggggccaccaagcccctcctgtgccccctcccatccatagtgcatggtgtgtggtgcccccagggctccaggacagatcaggccccaccttgtgtctacccccatccccgctgtgaacgtgccactgaataaagtcggggaaacgaggcactgggtgtgtgtgcaaagccatct

SEQ ID NO: 341647 - DNA, 1899 bp, Homo sapiens
cggtcggggtcagagtgcgcggaggtgagtcgtgtgttgtggactcgtggtgctggctgccgctgttcaggcggccgggaacgggcggtggggagcgggcggagctggccctgcctctgcctggccggcgccgcagtcggcgcgggccgcgcccgccgccgccaactgccctgagcgcttgctgaggccgagggagacgtcggggcctgcacctggagggagcctgccgcgctggccccgaggagggggcgttgccatggcgacagcctctcccgctgctgacggggggcgggggcggccctgggaaggagggctggtctcctggccccccgcccctccccttactctcccctggacttggatgggcccgagttgggggcaacaccccgggcattggggctttccagctctcacagaaccttcagcatccccagctgccggtcttggcatcttcgaagtaaggagagttttagatgcttctggatgttcaatgctagcacctttacagactggagcagctcgattttcttcgtatttactttcaagagcaagaaaagtgctgggctcccacttattttctccctgtggtgttccggagttctgctccatatccaccagaaagctggcggcccacggctttggcgcatccatggcggcaatggtgtccttccctccccagaggtatcactactttttagtgctggactttgaggccacgtgcgacaagccacagattcatcctcaggaaatcatcgagttccccatcctaaagctaaatggccggaccatggagattgagtctacctttcacatgtatgtccagcctgtagtccatccacagcttaccccattctgtacagagctcaccgggattattcaagccatggtggatggtcagccaagcctgcagcaagtgctggagagggtcgatgaatggatggcgaaggaaggcctcttagatccaaacgtcaagtcaatttttgtcacctgtggagactgggacttaaaagtcatgctcccaggccagtgccagtacttgggcttgccagtggcggattacttcaagcagtggattaatctgaaaaaggcttacagcttcgccatgggctgctggcccaagaatggacttctagacatgaacaagggcctcagcctgcaacacataggccggccccacagcggcattgggtctgcactggcctgcctggatagtgcctggggagagggtgctggctccttccttcctgagctgacccccttggagccccagagacatctgaggaattggttcttgccagacaccagactgttcttcagtagcaaccatagatggaagaatggctagatggatggacgactgcaagaacattgccaacatcatgaagacactcgcctatcgaggcttcatcttcaagcagacatcgaagccgttctgattggccgaggacaggatggggcaggacagggtagctgtttggcccagcccagaatcctcctctccctcaccagaggggaagagggagagtggcatagctctgtgtccagagtgtccccagctgccctgtgggctcatgcccttggcgtgggcttgtgcccttgcaagggcttggccacttggcccttctggagcagacactttgtgccccccatccccacccctcaatctcagcccagtatcagcccctcccattgcgggcctgggctagggggacccaggcactcaccgcctcctccctggtacacaggcttctgtggggccaccaagcccctcctgtgccccctcccatccatagtgcatggtgtgtggtgcccccagggctccaggacagatcaggccccaccttgtgtctacccccatccccgctgtgaacgtgccactgaataaagtcggggaaacga

SEQ ID NO: 341648 - DNA, 1059 bp, Homo sapiens
ggacgcgtgggtcgacccacgcgtcgggtcagagtgcgcggaggaaatcatcgagttccccatcctaaagctaaatggccggaccatggagattgagtctacctttcacatgtatgtccagcctgtagtccatccacagcttaccccattctgtacagagctcaccgggattattcaagccatggtggatggtcagccaagcctgcagcaagtgctggagagggtcgatgaatggatggcgaaggaaggcctcttagatccaaacgtcaagtcaatttttgtcacctgtggagactgggacttaaaagtcatgctcccaggccagtgccagtacttgggcttgccagtggcggattacttcaagcagtggattaatctgaaaaaggcttacagcttcgccatgggctgctggcccaagaatggacttctagacatgaacaagggcctcagcctgcaacacataggccggccccacagcggcattgacgactgcaagaacattgccaacatcatgaagacactcgcctatcgaggcttcatcttcaagcagacatcgaagccgttctgattggccgaggacaggatggggcaggacagggtagctgtttggcccagcccagaatcctcctctccctcaccagaggggaagagggagagtggcatagctctgtgtccagagtgtccccagctgccctgtgggctcatgcccttggcgtgggcttgtgcccttgcaagggcttggccacttggcccttctggagcagacactttgtgccccccatccccacccctcaatctcagcccagtatcagcccctcccattgcgggcctgggctagggggacccaggcactcaccgcctcctccctggtacacaggcttctgtggggccaccaagcccctcctgtgccccctcccatccatagtgcatggtgtgtggtgcccccagggctccaggacagatcaggccccaccttgtgtctacccccatccccgctgtgaacgtgccactgaataaagtcggggaaacgaggcactgggtgtgtgtgcaaagccatct

SEQ ID NO: 341649 - DNA, 931 bp, Homo sapiens
cggtcggggtcagagtgcgcggaggtgagtcgctcaccgggattattcaagccatggtggatggtcagccaagcctgcagcaagtgctggagagggtcgatgaatggatggcgaaggaaggcctcttagatccaaacgtcaagtcaatttttgtcacctgtggagactgggacttaaaagtcatgctcccaggccagtgccagtacttgggcttgccagtggcggattacttcaagcagtggattaatctgaaaaaggcttacagcttcgccatgggctgctggcccaagaatggacttctagacatgaacaagggcctcagcctgcaacacataggccggccccacagcggcattgacgactgcaagaacattgccaacatcatgaagacactcgcctatcgaggcttcatcttcaagcagacatcgaagccgttctgattggccgaggacaggatggggcaggacagggtagctgtttggcccagcccagaatcctcctctccctcaccagaggggaagagggagagtggcatagctctgtgtccagagtgtccccagctgccctgtgggctcatgcccttggcgtgggcttgtgcccttgcaagggcttggccacttggcccttctggagcagacactttgtgccccccatccccacccctcaatctcagcccagtatcagcccctcccattgcgggcctgggctagggggacccaggcactcaccgcctcctccctggtacacaggcttctgtggggccaccaagcccctcctgtgccccctcccatccatagtgcatggtgtgtggtgcccccagggctccaggacagatcaggccccaccttgtgtctacccccatccccgctgtgaacgtgccactgaataaagtcggggaaacgaggcactgggtgtgtgtgcaaagccatct

SEQ ID NO: 341650 - DNA, 1027 bp, Homo sapiens
cggtcggggtcagagtgcgcggaggtgagtcgtgtgttgtggactcgtggtgctggctgccgctgttcaggcggccgggaacgggcggtggggagcgggcggagctggccctgcctctgcctggccggcgccgcagtcggcgcgggccgcgcccgccgccgccaactgccctgagcgcttgctgaggccgagggagacgtcggggcctgcacctggagggagcctgccgcgctggccccgaggagggggcgttgccatggcgacagcctctcccgctgctgacggggggcgggggcggccctgggaaggagggctggtctcctggccccccgcccctccccttactctcccctggacttggatgggcccgagttgggggcaacaccccgggttttagatgcttctggatgttcaatgctagcacctttacagactggagcagctcgattttcttcgtatttactttcaagagcaagaaaagtgctgggctcccacttattttctccctgtggtgttccggagttctgctccatatccaccagaaagctggcggcccacggctttggcgcatccatggcggcaatggtgtccttccctccccagaggtatcactactttttagtgctggactttgaggccacgtgcgacaagccacagattcatcctcagaaatcagtcggaggattcccacattccggttaaaatgacttacaaaactgggccgagaacacaatgggaggcatcagagggtctaaccttgtagaacagttgatatagtcccaggccttgagagtaccacagtccgactaagttaaaagcaccagatttcgatggtaccataagtgttagaacaggaggataaattacagaggcgatggggtgggaatggtaagccaaaggctggaaagcaaagtagttgggaagaagggtacgatgaattgggaatggcgaagagaaagggagtagtaaaatcaagaaaaagagagagagaagttatggttaaatgagaaagactaggtaggtaaag

SEQ ID NO: 341651 - DNA, 548 bp, Homo sapiens
cggtcggggtcagagtgcgcggaggtgagtcgtgtgttgtggactcgtggtgctggctgccgctgttcaggcggccgggaacgggcggtggggagcgggcggagctggccctgcctctgcctggccggcgccgcagtcggcgcgggccgcgcccgccgccgccaactgccctgagcgcttgctgaggccgagggagacgtcggggcctgcacctggagggagcctgccgcgctggccccgaggagggggcgttgccatggcgacagcctctcccgctgctgacggggggcgggggcggccctgggaaggagggctggtctcctggccccccgcccctccccttactctcccctggacttggatgggcccgagttgggggcaacaccccggggtgggtgatgctgaatggccccgccaagattgggccctggttaatgcatgcggggtgagggtcgcggtgcgcagaatttatgcaacctggggtgctggcccatgtgcttaccctggatgcttacttaatctactgagtaatgttctggcggaggggg

SEQ ID NO: 341652 - DNA, 1091 bp, Homo sapiens
cttattgtagtatagcagtattaaattggtgctttgcagataaagaattttttctgaaatgggtattataatgttgttaaacgtatataataaaaaatatatcttcacattctagtatatctggttttgaagaatgaatatgtaaattgcgcagaaatgggtatgaaaagactttctcattaacatttggattgtgaatgctcgagtttataaatgaaaatatttactctatataaagaagttttgtcttttggaatttgtaataagttcatttaatatactcttgctccagggatttcagtatttgtcttgaagaaataataaaatctcacctgtcaacttttcttattgtagcttttgtgaagtatagaaggctaaagcaaattggttaaattagacattgaaaaaagtatatgattattatctccaaaatattgagactttacacataacagcttttgggggctagatttagaaaatcactaacataaaacaattagaatgttcttaattatagttttcagaactgactatgtagaaaaaaatacactcaagtttgtgttctatgtttacatgttgttttgacaaaaatgaatgttatgtttgaatttagttttgggagatttcagtttttttgtattcagaaaagtcttgtttgtctggttgtatttcccccaattttcataacttttatttaactgggttagttgtcatacaaaattcagctaatgctccactaggggtagggttgcatatacatagagcacagatatggcttctactccaaagagctcatgatctaagatatagcttgaagagtacttaactatgaaacatttaaattactgagctgacaaaataaaatgaatgatctgtaataagattaataaagctttttgacaaaaataattttttacctagattttgaagaagtggtgtgtataggttggtggaaagggaaggagataacagctagggggaagagcatgttaaaaaagcacagatattttgggatgctgaggcaggtggagcacctgaggtcaggagtttgagaccagcctcgccaacatggtgaaacccagtctttacta

SEQ ID NO: 341653 - DNA, 701 bp, Homo sapiens
gacacacctgttactcagcctcaggacatcctgatgacacgtgcccaaggtggtcgggcatagcttggttttatacattttagggagacatgagacatcaatcaatataagaagtacattgattcggtctggaaaggtggggcagcttgaagcaaaggcaggaagcctccaagcagggagggaacttccaggtcgcagataggtgagagacaaacggttgcattcttttgagtttctgattagtctttccaatggaggcaatcagatatgcatctatcttaatgagcagagggataactttgaatagaatgggaagcaggtttgccctaagcagttcccagcttgagttttccttagtgattttgggggcccaagatattttcctttcacaggtgtgacccgacactcctggcctacatccttgactgaaagaagtgctgcatcacggaacaaacgctaaggtgattattaggtctctcaccctctccttttctcattcttactctttctctctcactttcactctagctttccctctctctgcctctctcccattccctccactggacccttgaacttagggataagctgttaatagtcccctactattgtacctgtatttctctacaagttgcctagctagatctttgggaaaagtcccttcggttttttttgtttttgttttttttttgagacagagt

SEQ ID NO: 341654 - DNA, 133 bp, Homo sapiens
tggatctcgcaggattgatgcattttatctaatttgttgaaattatgagtacagagttgttgttagaccatttttaaaagttaccattgtgggccaggtggggtagttcatgactgaaattctagcactttgg

SEQ ID NO: 341655 - DNA, 334 bp, Homo sapiens
ggttttattgtcagtttttacttaataattttaagaagtaatgcatgcctgtccacatccattcctatatggcctagaacaattaattggctctaagtcttttgactcttaaagccctcagccatagggagtcctgcggaggaaaaaataacactgcagaattatatgacttctcctgtgacaaaagcttttctctcccaaatactagtatatggtgcaatacaaaagtgatgggaaaaatagatttgtctactgttaacaagtctataacaatttaaacaccaaggaccaggcactttttgcatttaatttataccctcctcaggatactata

SEQ ID NO: 341656 - DNA, 1026 bp, Homo sapiens
aacattttcctgtttcagtggccttaatagttgagtaatgctgttccccttaggtgaggggtagtcagcacagtataaaaaaattttacaggtgccgtgtgagagctgttccttctggttcttggcactgttcctcttcctctagactgctaggaaggaataagctgaaaatttcaattgtgtaattttttagtgtttttgtccctgaagcctgtgaaactttaggctctaaaaacattttgttaggtgactatcgtagacaaaattacttttaaaaatgctgagtatgggtgtcgttggaaattgatttccagtccagtaaatggtcttgctgtgggatagaatcattttctcaggccatgtaacttgaaaaatagtactggattcacactacgtacgaataatgagatacagactaacggtggatggttatgcggaaataaatactaaggaaaacattagttttccatatcgtgttcattctggagcattgagtaatagtttggtgcagttgagaatttttttccctcagtttgccaaacattaaattatctttgcaaggacaccctgttgagaaaggaacctttttgaaacttacccctagtccaaatttttaagttgttagtaggtacacttagttcacctatcctaaagctgaacatgttctatgcttgaatgtaatcatttctttcccctctcttaagggactcaactgtaaaacagagaagatgagctctatttccgtaaagtggttataagagtacagttaaacacttgtggtgtacgactgctagtatatttaaaaatcaaaactcatttgtcttctatttcgaaaccatcagtgatttcccattgcctttggaatagtctgactaaattcaagggctcttttaaaagatcaagtcataacctgcctttttagctaaatctgccactctcctagtgtactctgtctggtataccaaactctgcagtatttgttctggcaaatttttatgccctgtgttctttgacactcctgacttt

SEQ ID NO: 341657 - DNA, 897 bp, Homo sapiens
agcccgcggcccgccaataccaatgtccctataaaattacctcttgttaagaatcactgctttggagttcccatcatggcgcagcagttagtgaacccaactagcatccatgaggatgcaggttcgatccctggccttgctcagtgggttaaggatctggtgttgccgtgagctgtggtgtaggtcacagatgcagcttggatgctgcattgtgtggctctggcataaggcggggccgtacaaggccccgtggtgatgcctcaaaacaccacttaggtttgggttcgtttagttcgagtttggggttttcatttgaacttgtttgatgtctgcagtttctgccatgacctgggtagaacctatgggattacccgtctcctggaataactgtttgacgttttccaaagttgtagagttagtatggcctctgtttaaagtggctggggccaaaataagggatgagttattatctcctactaaccttttagttttgtaaatcactaagaaaattgtttgcttggaagatataagttgaattggaaactcattactatctatttctgaactgctaagaaccctttcagttttcttacagctgagacacttttaaacagcgggcaaatgttatcaaatgaatatttgattgtgttttttctcttcacttccccttaaccactttagaaattccagagatttttttcccctcagaatattagttttggaagattgtgcccagctatatattttttagcagttctaatggtgcccatttatcctgacctaaccagttatttaaataattttttaaaccaccacgaataataaatggcatgtgaaactgatctgttggtaactggaagaaaactcagcatctgtatttatacaataaaattgatt

SEQ ID NO: 341658 - DNA, 325 bp, Homo sapiens
cctcccagtcctgctgctcgtgacacaggattcgcttcagggcgtagaagtgtccatcctgtaacccctccactaggtccacatggctgaacccactctcccccaggttctggatgaagaaatagctattgtcaatgatgacatttccctaagagcaggcacacagtgcatggcccatgatgtctcagtcatcctcctcaaggactgtctgaggctgccaaagggctcgtccaggatgagtgggctcttccaggcaatgcactaagcgcccagggatcatgattctcatctagagtaaacaggtcctggtgatgccagttcagca

SEQ ID NO: 341659 - DNA, 808 bp, Homo sapiens
ttggggaagtggatcgagagttctgtgtccaagtgtatatttgcatatttacatttagctagaaaaataaaaactgcccttagtacaggaagatggggaaggcagatagcctctgctctaggagcttaatcagcaagtcaccagggctattttcagagcttccagtgagtttttggctatgctaagggagttcacgagccacgtttggcagcagagattggagaaagttgttccacgtaagaaatgagaggaattcggattttgcccctaagaagaagacaacaatgaagagggggaaggggattagctgaataacatgcaaagagtctgcaccctgagttatgaaaatgatcaatggatttttaaaaagtcataccagaaatgtctgttgtttagtattatttagtgtttagtgttattgctatgatgtaaagctcttcatttcttcaaagcttcctaagttttccacatcacagaagccttgcaagtatttctgccatgttctccacctggatggtggtggtgtggaacagggacagtcaccaggaatggccagaggaccctggatcgaacaattcatcagaagcaggagcaccctccagaagtttgtggaaaacttgagatggacattagactttgcaaactccaaagggtgatgctggttcaaggcacatttgccctgacctgaagggtcaatgtgaccacttctagtctttatgagcagggctgtgtgtgtttcagtggcagtgtgtctctaagaagtgtgggctttcattgtctgtataattaaaccctgtgcttgcaatta

SEQ ID NO: 341660 - DNA, 398 bp, Homo sapiens
tcttacacagtcttgtaattatttttcatgttttcctctctcattggatggtcagatctccctgaagaagacaattgtgtctttacatttttgtaccccctaggctagcacaactgcttgacatataataggatttttaaaagtagtctgagcattatatatctacaattctatgaaaaaatcataaatataagcataaaattcatgatggttttctacttttccctttctgttgcaatgacacattggttcagttaccaagaagcaggccaattaatcagccctactttcacttccccaaaagagactgacccccaactctaactactaaagcagtgcttgacctatttgctcctaccatcttcttcccatgctggttcccatgcgacaactcacct

SEQ ID NO: 341661 - DNA, 344 bp, Homo sapiens
gcttcctcccacacatacccttgacatgtctcaaggcccagatatgaggctgctgatcagagtcaggatgccacttttcggtataagctcactggctccataagaagaaaccttatttttatcactttctactctaacccaccaagtaagcaaagataacaagacttcttggtatatatcaataaaaaagctgtgctgtgcctggcagaaactggcactacgatccaaagaaaaggcatcaaaactaaatatgaactaattgctggtttcccttatatttactcactgttgttgttactgacaaacacaatgagagataccagacttcaagtccctgaaaaggt

SEQ ID NO: 341662 - DNA, 315 bp, Homo sapiens
tcagtagtagtaatggccctctctgccccattcactagcctctgtcatttcattggctccccagtaaggagacagggcaggtgtccatttcacagatggggaaaactgagggataataaacagggttgccatgaggatgaaatgaggtcatatatatgaagccttgggcggagcctaacacaaattagcaagtgctcaatatatgctagccacgcaacggctattaggcatccaatggcacactagtggatcagtggctggtggggctctcagcagccccttccaggcctcccagcccccaggcagaaggtggag

SEQ ID NO: 341663 - DNA, 370 bp, Homo sapiens
agaacctgtgaaggagttgagaggcaatggccatgaggtaggagggaaaccaagtgaacagagtatttttgggaggagcgatgacatgtcaaatgctgctgatcaagtgaaataaggactgaggatagaagatttaaacaatataagtttccttggtgaccttgacaaaaacagatttggtgatgtggtgggcaaacacctgatagtaggagagggttgagacagcaagtatagacagctctttagggagtaattttgctgcaaagagaacagaaaaatgggatagtggctactaggggaaaagaaatcaatatatgggttaattaattaattaattaatttatttattttttagacagagtcttgctcc

SEQ ID NO: 341664 - DNA, 442 bp, Homo sapiens
caggctggagtgcagtggtgtgatcttggctcactacagcctcagcctcccaagttcaagcgattctcatgcctcccgaacagctgggtttacaggtgtgtgtaccaccaggcctagctaattttttgtatttttgtaaagacagggtttcaccatgttggccaggctggtctcaaactcctgacctcaggtgatccacctgcctcagcctcccaaagtgctaggattacaggcatgagccactgtgcctagtccttgtggacattcttaacttagggctttgaaagacaagagaaaggttagttaaaaggattgactctatactatggagtgaattatgtacaggtatagcttaggtataactatatactgtgtatagagttataataattttcaggcataattaattgcgactcatttctctttactttttgaaaaaaaa

SEQ ID NO: 341665 - DNA, 614 bp, Homo sapiens
cttccccagtagctgggaatacaggcgtgtgccaccatgcccggctaattttttttgtatatttagtagagacagggtttcaccatgttagccagaatggtctcgatctcctgaactcgtgatccacctgccttggcctcccaaaatgctggaattacaggtgtgagccactgcgcccggctaaaatttcaaattaaatatttctgagcttaattcttcctatcccaagaataatatctttttccccccttctggaagttctttttgatacatcagtattgccagttaagagtagagaaagaatataaactctggaatcacattgcttgactccttcacttataaactagatggctataggcaagtcattttagctttctgtgcttctgtttcctaatctataaaatatggataaagtatgctttcctcatatggttgatgtgagagttaaatgagataatatagatgtagcactttatacaatgcctggcacatagtaagttctcaataaaggttgattcttgttatcatcatccttcagagaacactggaaaatccattattttggattgttgctgtagttttttccacatggaatctctctggaaaaccag

SEQ ID NO: 341666 - DNA, 616 bp, Homo sapiens
  misc_feature (17)..(17): n is a, c, g, or t
  misc_feature (31)..(31): n is a, c, g, or t
  misc_feature (136)..(136): n is a, c, g, or t
  misc_feature (176)..(176): n is a, c, g, or t
  misc_feature (267)..(267): n is a, c, g, or t
  misc_feature (317)..(317): n is a, c, g, or t
aaaagataatgaaacanaaagctggttcttngaaaagataaacaaaatgatagaccattagtgagattaaccaagaagacagaagatccaaataagctcaattcacggtggctcatgcccacaatcccagcatttngggaggccaaggcaggcatatcacttgaggtcaggagttngtgaccagcctggacaacatggtgaaaccctctctctactaaaaatacaaaaatcagcagggcatgcaggtgggcgcctgtattcccagcngctcgggaggctgaagcaggagaatggcgtgaacccaggaggcagagctngcagtgagccataacaaatttgagatgagcaattaatagatggaccggccaacaaacactatgtggaggaataagtgaggccaaagctgatggatgatgcaaagtgaggacgtaacatatttcgctggggaaccagacagatatgcagagtaagcgctctgataggggaagtacgggctgttatgggcgcttcatactgggaacattaatgggaggtggaagttcgtagttgaagctgaaacctgttgggtgaggtggagttcgccaggtgaagtggtagacttggggaagaggagagg

SEQ ID NO: 341667 - DNA, 627 bp, Homo sapiens
ctcagcctcctgagtagctgggaccacaggtgtgcaccaccatacccggctaatttttttattttttgtagagacagggttttgccatgttgcccagactggtctcgaactcctggaatcaagcaagccaccccccacttggcctcccgaagtgctaggagtacaggcaagagccactgcacctggccctgttaacttcttatgtcatttccccactttaatatatttgagggctagttctgtgtcatgtatgtattttaacatcactaccgcatctggtgcagagaggggcattctgtagtcttcgtacttcttatcttcactattgctgatgagccataacaaatttgagatgagcaattaatagatggaccggccaacaaacactatgtggaggaataagtgaggccaaagctgatggatgatgcaaagtgaggacgtaacatatttcgctggggaaccagacagatatgcagagtaagcgctctgataggggaagtacgggctgttatgggcgcttcatactgggaacattaatgggaggtggaagttcgtagttgaagctgaaacctgttgggtgaggtggagttcgccaggtgaagtggtagacttggggaagaggagagg

SEQ ID NO: 341668 - DNA, 871 bp, Homo sapiens
atgcagcctgcaggacacaggtcggataagcctggtttatactctagtggggagctgttagcaatggaaatggtcagttgttcagtagattagaaagtgcagagaagagcagggcagagaagggtgagacagcgtggggtccaggtgtatgccccacctggctgctgtgtgttgcttgctgaccccctcatgggccttcgagtgtaagggagagtcctcttcatgccctcgcaccctcctgggtctctagggcttgtgtgtccccaggggaggagccccctggacacaccctggcgggtgctggctggcaaagagggaggcgttgagggcccgggcagcgcctccatcctggccaggcaagtgcagcttcaggttgtgagaaccgtggtcacctgtgtgttttaaagatgacggcagtgataggtccccttttgggcctggcatggaaattagtcacattcgtagaccctgtcacagagtgggcactggtgatgtcatcttttatagttcttattttcaattgattcagctttttctagcagcatggcgtgttttacgaacgtgtgttttgctgttactgctgctactcatagtatggttttgtctaatgtaagacagaagagaataatctactgttatctccatgaagtacaaacacaaatacagttgaatatagtttttctaatagaaattaaggttagttttagccaaggagcacctttgctgttggcttatatgttaatgtgtttagcaccttgaggtgtccttactggcaggtagggttgcatcttgagtgtaaagatttaacaggaaaataagtccagtgcacatgtcttaaaattaatagcaatttcagcaatatgttaaaaac

SEQ ID NO: 341669 - DNA, 484 bp, Homo sapiens
ctaaagttaaacgttttgggtttggcatttcttaatccagtgcctagaactttgggtcaaaattgaattgaatactttccacacatctatcaggagaatagcattcctgcctagtgatctgatgaccatgggaagtcatccatagctttctgaaatatacactcttgttctagggagaaatgctgtcccaataacctccttgtatatgaggggacagaatccagccatcctgtggccccaagggaggttctgtacaactctgcgggagtggtcacccatgatgtaaagtctggtttctttacacgaggaagtacagagtggcaggagcagttcacaattgagctgaggaatcactctcttccttagggctctgagaagcgtgaatgaagaataatggtgtttaggagccctccagagcccaaccatgctggcatcctgagcttggacttctagcctccagaactgtgagaaatatatttctgct

SEQ ID NO: 341670 - DNA, 428 bp, Homo sapiens
ataaaaataaataaaaactaggcccataattactatggttagcaggcaggtaagcggttggcccaggtagcactttgacagaccaggtgtgctcaccctggaaacagggttctgggcatcagttcatacagtgagttgtcagattaggagaatgagaaaaacagatttgggtggaggttagaggtgaagttaaaggctaacagcaggacaggaactttgggctaagcctggctctgagcaggctctgatggtctggcattgttttctgggggctcttactgcctagaagccccttggaagtggccatcctactcactccactgtctccttctctcctcttcatcctccttaaggcctttcaatgtcacttccttcacagctgatccaggagacctgacatttcccccgtctttttttttgatacggag

SEQ ID NO: 341671 - DNA, 453 bp, Homo sapiens
ataaaaataaataaaaactaggcccataattactatggttagcaggcaggtaagcggttggcccaggtagcactttgacagaccaggtgtgctcaccctggaaacagggttctgggcatcagttcatacagtgagttgtcagattaggagaatgagaaaaacagatttgggtggaggttagaggtgaagttaaaggctaacagcaggacaggaactttgggctaagcctggctctgagcaggctctgatggtctggcattgttttctgggggctcttactgcctagaagccccttggaagtggccatcctactcactccactgtctccttctttttttttttacaatggtatgggggtcagaacatttaacataagatgtactctcatgacaaaatttcagggtgtacgattatgttattggatgaccatgggaaccggtgtcataggtgcag

SEQ ID NO: 341672 - DNA, 188 bp, Homo sapiens
ggttcttattcagtatttttatcagtgattgggagttgcggttgaaaccaggctgggagagacagctgatgacagtcagaatccagaaaataatccgtacaaacgatgacaatggtaaagtgaagttgataatgctttaaataacaaagctgtatgtcacgctgtgaatatacttgaaaaaaaatcaa

SEQ ID NO: 341673 - DNA, 511 bp, Homo sapiens
  misc_feature (50)..(50): n is a, c, g, or t
atgaaccatatacaaaataacttcctagttacataaaattcaacactcantatgctttgctgactaatgttgaccagattgtccaggaaacacagaggctggagttaatctgaagagcaccacttctcctctctctcctgaaaaaatttgccactgatatttttactggataaaattcaaaaatgtttcaattcacaaaggctaattgttgaactggtgtcgtagaagaaattgtctacaggagccaaggtgaaagtctctgatgacggcggaactggctccattagaccatggttcatcctcttttaaaaccaaatttttttttcttctggcctacaagtattttttttttaaaaaagaaaaaaagcctacattggcatcaagttctgtatcaatccatcttacattgccatccatgatttaacagactgtagaatcttgaataatctatatcactttaacaaataaatgttttactatgacagaaaatgcacattgcctgatttgtgaa

SEQ ID NO: 341674 - DNA, 467 bp, Homo sapiens
  misc_feature (37)..(37): n is a, c, g, or t
  misc_feature (42)..(42): n is a, c, g, or t
ttcagtagctactgctgactaatgttgaccagattgntccangaaacacagaggctggagttaatctgaagagcaccacttctcctctctctcctgaaaaaatttgccactgatatttttactggataaaattcaaaaatgtttcaattcacaaaggctaattgttgaactggtgtcgtagaagaaattgtctacaggagccaaggtgaaagtctctgatgacggcggaactggctccattagaccatggttcatcctcttttaaaaccaaatttttttttcttctggcctacaagtattttttttttaaaaaagaaaaaaagcctacattggcatcaagttctgtatcaatccatcttacattgccatccatgatttaacagactgtagaatcttgaataatctatatcactttaacaaataaatgttttactatgacagaaaatgcacattgcctgatttgtgaa

SEQ ID NO: 341675 - DNA, 480 bp, Homo sapiens
cgattctgtcacagaggggcccacgtctaaaagagcacatataaagccaaatgctttgctgactaatgttgaccagattgtccaggaaacacagaggctggagttaatctgaagagcaccacttctcctctctctcctgaaaaaatttgccactgatatttttactggataaaattcaaaaatgtttcaattcacaaaggctaattgttgaactggtgtcgtagaagaaattgtctacaggagccaaggtgaaagtctctgatgacggcggaactggctccattagaccatggttcatcctcttttaaaaccaaatttttttttcttctggcctacaagtattttttttttaaaaaagaaaaaaagcctacattggcatcaagttctgtatcaatccatcttacattgccatccatgatttaacagactgtagaatcttgaataatctatatcactttaacaaataaatgttttactatg

SEQ ID NO: 341676 - DNA, 445 bp, Homo sapiens
ttctttctttcttcctttctttctttttttcctttttctttttctttcatttcagaggctggagttaatctgaagagcaccacttctcctctctctcctgaaaaaatttgccactgatatttttactggataaaattcaaaaatgtttcaattcacaaaggctaattgttgaactggtgtcgtagaagaaattgtctacaggagccaaggtgaaagtctctgatgacggcggaactggctccattagaccatggttcatcctcttttaaaaccaaatttttttttcttctggcctacaagtattttttttttaaaaaagaaaaaaagcctacattggcatcaagttctgtatcaatccatcttacattgccatccatgatttaacagactgtagaatcttgaataatctatatcactttaacaaataaatgttttactatgacag

SEQ ID NO: 341677 - DNA, 530 bp, Homo sapiens
agatggtctcaatgggcttaaggacttttgaaggtaatttatggttctaagtagaaacccaaaaatcatagtgatatttttaaaactgcaattatagttgaaaaatagcaaaattttacaaaatacatgacaattttgccaagtcgagacccagctctctaccatgatttcctcaactaacaaaaaaggagataaacctctcacctaaaccagtattgcaaagactttttcatggctaaataaacacatacgttttgaggaaagtgagattttaagaatagtcattttatagctaaaatgtacactctggtttgtgctgacatttctggcttgtgtgacatttcaaatcacagagtgttatactagaagaaaactgaggaatccagtagcccaacccactcatttgtcagatgagaaaactgattcccagaaattgtccaacaagttatttgtttatcacatagctgctgctaaaacccaggctgcttggtttctaggcatgtgtttttcatgctacatttaaaaaaaaa

SEQ ID NO: 341678 - DNA, 430 bp, Homo sapiens
tgttcctcagtgattcacacacctttttcttctaatccatcaagaagtctcgagtccaagaatattgtcatttattcaagcatgcattttgtgctccatacattcattcagttattcattcaacaaattttgttagcactcactgtgtgccagacgctatgcatgtaactgtactgtgtgccaggcaagactaggccctaccctcaaggagttcaaagctaaacactcttttttctctgttttccaggcccagaacaaaacaatgttcattacgtatttgctgaattactcactttagccaacatctattgtaaatttcgtgtatgtataacctatattcagaggacagacggggagagaattctcaggtagagcatgaatgtatctccatccctccctgccctcaaggagtttctgatctagcagagga

SEQ ID NO: 341679 - DNA, 695 bp, Homo sapiens
gcgcaaacgccgggagtagccgaaggggacgccgggaacaggaatttcttcacatggctcctggagaagtgaccatcacagttcgcctcatccgttcctttgaacatcgcaatttcaaacctgtagtgtatcacggagtgaatttggaccaaactgtaaaggaatttatcgtatttctaaagcaagatgtccctttaaggaccaacctgccaccaccattcagaaattataaatatgatgcactaaagattattcatcaagcacataaatcaaagacaaatgaacttgtgttgagtttggaagatgacgaaagactcctgctgaaagaagacagcactctgaaagcagctggaatcgccagtgaaactgaaattgcattcttctgtgaagaagattataggaactacaaagctaatcccatttcatcctggtgaaaacatctcgagggcttcctttttgcatacctgtattaagctctttattccactgctgagtttttgaaattgacaaacaaatcttaaaaaattaatcccaggctatactctttgagctaaaatctggttatttctttctcttcaggtctttctttccttctctctttctttttctttgttgttgtaaaataatatattatgagaaaaacatttgatctttttaaagggaaataaattgttattaaaaattaaaaaaaaaaa

SEQ ID NO: 341680 - DNA, 1164 bp, Homo sapiens
tcgagagttgggttcagtcctggcccgttgtggggacggcacgcgggggaaggggaggggacggagaccgaagaacggaggtccttatgtttcttttctttccttaaatcttgcccggcctgaagaggccggaagttgcatctctggacaagtaaactctgagacctgggaatggcgggcgggacccgctcctcccttggggtctagaggagacccccggagatggtccctgatgagcagcgtgatggtggaaagctggactggtctcccgaaaggcgaagccgaggcttcttcctctgaacttttgggccagctgaggggcccacggacatagggcacccacaataggcgtgtgtctgctgtgtgtttgtgttcggccgtcctgcttctctgtttccacacgtacacatgcccctgtgttactttggttcatcttctgtactctgtcagttttctgctggtcagaacatctgtgactgtgacagagctgtccaggattgcagtggataggaatttcttcacatggctcctggagaagtgaccatcacagttcgcctcatccgttcctttgaacatcgcaatttcaaacctgtagtgtatcacggagtgaatttggaccaaactgtaaaggaatttatcgtatttctaaagcaagatgtccctttaaggaccaacctgccaccaccattcagaaattataaatatgatgcactaaagattattcatcaagcacataaatcaaagacaaatgaacttgtgttgagtttggaagatgacgaaagactcctgctgaaagaagacagcactctgaaagcagctggaatcgccagtgaaactgaaattgcattcttctgtgaagaagattataggaactacaaagctaatcccatttcatcctggtgaaaacatctcgagggcttcctttttgcatacctgtattaagctctttattccactgctgagtttttgaaattgacaaacaaatcttaaaaaattaatcccaggctatactctttgagctaaaatctggttatttctttctcttcaggtctttctttccttctctctttctttttctttgttgttgtaaaataatatattatgagaaaaacatttgatctttttaaagggaaataaattgttattaaaaattaaaaaaaaaaa

SEQ ID NO: 341681 - DNA, 602 bp, Homo sapiens
gcgcaaacgccgggagtagccgaaggggacgccgggaacaggaatttcttcacatggctcctggagaagtgaccatcacagttcgcctcatccgttcctttgaacatcgcaatttcaaacctgtagtgtatcacggagtgaatttggaccaaactgtaaaggaatttatcgtatttctaaagcaagacaagttgcaagaacaagacaaagaattcctggatgttcttcacacagattccttgtgttaacattttgctatgtttgttttattcctgcggaggccaaagcaactccatcttggatactgatctgccatattgacttctcattagccccagtttcaagatacctctaagatttccaggttatctactattccctatgtaagaacaggtacttactataaatcctgaccttaggtcaagcaaccttgatgttattgtactttgcttgccctacacatcccttcagatcaccctttccctatgatataagccctgggtctggggggtagtggtgcgtggatcccttgtcttgtcctgccaaagcctgagacacagacatggcttctgtttgtaagttcctattaaatatgtctttct

SEQ ID NO: 341682 - DNA, 345 bp, Homo sapiens
tttcactctagaattgcatggcctgacttccactctggaaattttcttgctcttttttttttcttcaaaataactttccagtttctttcttttctttctttcttttttttaagaacttgtaacagacagatgtaggtcattccatctggcttaatcacttgattttcttatctgtcttatcccattgctaatctgtttttattttgttttcaggagacttcttcaacttgatattccaaactcatttactgactcttttgtttttgctatgatagtttcatttcccaagcatgaataaactgtttttttcaatatccatgtgtatgtgtgtgcttgtgtgtgtgt

SEQ ID NO: 341683 - DNA, 172 bp, Homo sapiens
gactcagacatggatcttgtcttaagggaacttgaaggcaagtttatctataaactcaaatgtagtttatctataatataacagaaaaatttctgtgagagtctagaagagacagattatttatggttaaaaggcaatacataaatgaagagatagggctttgaaattgcac

SEQ ID NO: 341684 - DNA, 304 bp, Homo sapiens
ctcgactcaaggcctgacacaacttctgttgtcttcttgatcaccttccttgaagagaggggccaaagccggcacgttctgcggagactgtctctagacctaggaaggggcacaccagggcagcggacgatttgctccgcgtctctcaaaactactgccagcccaattagtaaaccgagagggcagccctgagatgcaggatggccagagagttgaaatgagtctgggagttaagagtgggatggggcggacgaacaggcgtggggagggtaaacaacgcaccaggagcgggagtgagaacagg

SEQ ID NO: 341685 - DNA, 293 bp, Homo sapiens
tactgtagatctgtgctgggtctgaattatgcatttttgagttctgtatttgtcttgagttcttttgttgaaaagtgtaacttgcaagttgggtgtgcagtagaaatctcatccctgatacacagaaatagggatgccatggtttttgtgcagctcccacatcctctctggtttcctagggttctactttttgaccaattcacacacaaaattgcatgagctaataaataaataaataagcacagcactttaaatgaaaaaaaaaaaacttccttaaaattatattattatca

SEQ ID NO: 341686 - DNA, 763 bp, Homo sapiens
tagatatgactagagaacctattgccactgttaaaggaagaaattaattatacataaattagtggcaaccatattttactttgtaattaacataattcattattaaaagggctctaacgaattatgctagtttgtttgaattgaagtaaatcattgaaagctaaaaaacttaatttcaagtctttcaaaaatagttcttagatgtctaataggcagacatactatctcctttgtctgaatgcagattactatacttgcaattaagatattgtatgtcaagattctttgatatcgtcatgaaacttaattatttctgggtttattttctatattttgcttaagagtgttgaataaaattttactgcctattaagatttacattaaacttttgggggcaataagcaattatcaatcatgcaaatacaattaaaatcagttttaaagcttgtggaaaacttgaatattgttatcacaaatatttgggtaaatatgtttgcttaaaacaaacaccaataaaataagtactgaacatttgcaaattttcatatccgttcagatagaaaaaatagtcattttctagaaaaaatggtgtgacatgtttcaaagggcctcaacatatgccagataaatggaagaagaagtgaggaacttcacacaagagaacaaaggaatttctctgatattctggtaagatggcacgttggagatggaagggtgaccgacgaaatttaaaaggcgaggtggcgggaagaaaggttggtaa

SEQ ID NO: 341687 - DNA, 691 bp, Homo sapiens
tagatatgactagagaacctattgccactgttaaaggaagaaattaattatacataaattagtggcaaccatattttactttgtaattaacataattcattattaaaagggctctaacgaattatgctagtttgtttgaattgaagtaaatcattgaaagctaaaaaacttaatttcaagtctttcaaaaatagttcttagatgtctaataggcagacatactatctcctttgtctgaatgcagattactatacttgcaattaagatattgtatgtcaagattctttgatatcgtcatgaaacttaattatttctgggtttattttctatattttgcttaagagtgttgaataaaattttactgcctattaagatttacattaaacttttgggggcaataagcaattatcaatcatgcaaatacaattaaaatcagttttaaagcttgtggaaaacttgaatattgttatcacaaatatttgggtaaatatgtttgcttaaaacaaacaccaataaaataagtactgaacatttgcaaattttcatatccgttcagatagaaaaaatagtcattttctagaaaaaatggtgtgacatgtttcaaagggcctcaacatatgccagataaatggaagaagaagtgaggaacttcacacaagagaacaaaaagcaaattttctctgaatatttc

SEQ ID NO: 341688 - DNA, 236 bp, Homo sapiens
atctacagcaataaaatagttttctgtccaggtgaagaaaaacttgataagcctaataatattgtagcaatgcacaagctgccacctgggagatcaaaattcaaaatcagcctgtagctcaggctctaagcttatgagactgagtgtgcagcaaagaaaatgaattcggtctctggggaagagcttctgaggattgtcactggtgttggttatggagaaggcaatacacaatttcg

SEQ ID NO: 341689 - DNA, 318 bp, Homo sapiens
agcatgatgtaaaagcaattggtctaatctactctgttttacagacggggaaattaacagaggtttcattcagaatttgaacttgccacttgcccagagcccctgagtagaaaacacagtgacatcactaactaacttgcccctgctgctacctggtacctgggctctccccacaggggtcttgatgaaatgcagagatctgtggagtcttagaaatctgggcttcatgcctagggacaaaatgagggggatttgaaggcagtgaaggaccacagtttttgagatgctctgttttctttctgcttgacatgtagccca

SEQ ID NO: 341690 - DNA, 653 bp, Homo sapiens
cctcaaatgtcaacaggggccaggcaggaaaagtaagagtaaagaaaaataagaatatttttcacttccataaaaaacaaaggcaggagaagaccctgctttactggtttgagagcccggggacctttgtcagcctccctccaaaaaaaggcaagtgaggcaactgaccccctgcttcagtgcggagaggccaacagagcatggacaggctgtggggagggtgggcttgccagccccatctcaagtggcagccgctcttcagctccagctgatttttgccctgtgggaatgtgtgcccgaccttcccagatcttcccattttttcagagaagccaaaaatttgggttttgatgggacacctcttgatttttaaatgctggctcacagtttgttaatggggtcaaataaatcccacgtgtaggtcacttgtggataatctctgccgtagacctcactctggtgtgaggtggggtaggagtgtgacaggagccacgggggatgggaacaaggactgtggtggcattcggatcatggttgtctcacagcctggcagagcagctggccacagtaagtgctgaataataagtggacacattacgggggcctccgggaagagctgctgcagcatgtggctgcctcggcaggcccagcca

SEQ ID NO: 341691 - DNA, 324 bp, Homo sapiens
tgcactccagcctgggaaacagagcaagacctgtctcaaaaataaataaaaaataaaagtaaaaagaatgcttagtgttactggtcagtgaattgatagttacaaagacactatccaaaaaatcaaaggtggaagaatacatgcctgagcatgagttgccagcgctccccttcttcaagttggggaacttcacaagctggtcacagacagctcaccccagttcctctttttaattcttccatcctcttctaactcctaccacccctgggcttctctggctctgttctctctgattcaccacctcctctttctgtgcccgccttt

SEQ ID NO: 341692 - DNA, 303 bp, Homo sapiens
tccaactggggatctctactgaacttcgatgtccagagtttttattggagtttcactatgtcagtgtgattgatgggccccatgattgaactcagtctctagtttgcttccattccctggaagttagaaggtcaggctgatatcacatgatgcaaagctccacctctccttatagagttggtctttctgcacagccagccctcatcctgaagctatctatgtgtccataatgagttacctcagtagcatatcaaagacactcctgtaactcaagaaaatacaaggatttagagtctccctcag

SEQ ID NO: 341693 - DNA, 282 bp, Homo sapiens
caagtcttctttcttctccctgtccataaatgggctctggtatggtctcaaggtctcggcccaccactcagcatcaacccggcacttgcgggtcactgtcatccagactgggtcgtacctctgtgtgacatctcggacccagccgtcactgtcaatgcccaccacataggtcatgggcttggtggcgtacttgtaacaggtcagaggctggcccaccacaccgtgcacacagtctacacatacccacttttcctcctgctcacagaacacctctagccactg

SEQ ID NO: 341694 - DNA, 607 bp, Homo sapiens
gttaaagcttaaaagtgagaatggaaaagggatgaatgaatgaacatgatgaggtgagagggaagaagtagagggaaaaggagaacaagaaactcttctctgcgtggcacctaggatgaatggtttctggggacatccctgatggcagttttgtggagaggtgcaaagctttatgtggtaagaaatgagctgtaggctcagtgcagtggctcacgcctgtaatcccagcactttgggaggccgaggtgggcggatcatgaggtcaggagttcgagagcagcctggccaacatggtgaaaccatgtctctacaaaaaaatagaaaaagaatccctgcgtggtggtgagcacctgtagtcccagttactcaggaggctgaggcatgagaatcgcttaaacctcggaggcggaggctgcagtgagctgagatggtgccactgcactcccgcctgggtgacagagctgggtggtggctcaagatatgttttgtaaacctgaagatttgagatcatataagccaaatcgaaacttaattggcattcacaacttttggttctagagactccatgatcaactaagagccaccaagcatttcccatgtagactat

SEQ ID NO: 341695 - DNA, 708 bp, Homo sapiens
gttctagtgactgctggtcagtgtgtctcccctacctcacaccgatggtgggacaggcccgtgtctgcctttgtgagatgggccctgcaccttgcatataccaggttcccagccacagggggcagtaggtacaacaggtgtcatgtggggcaggctcctccttcaaaatctgaggcccgggggagccacccaggtcctgctcaccacccagcttcaggggggccttcaggcaggaggagtgtctcctggttttgcctagctcccctgcatcccctgtgccaggcccgtacctgcctctgacacccctctgtctcttcctgcagacgatgatgcttttgagcctgtggaggtcagcctgccagcccctggggatggtgggagtgaaggtgcattactccggcgcctggagcagcctctgcccactgcgggggcctctctggcagacctggaagactctgccgacagcagcagcgccctgctcgtgccccctgaccctgcccagagcgggagcaccccagctgcagaggcactgccagggggtggccgccacagccgcagctccctcaatactgtggtgtagacggcctggcctgtaccccaacggtctgggagcacctgtctgttgtagaaaacaccggtccctggggagacttgaaaggcccctgtcccagcctggacgccatcgtcggccgctgtttttcctcaaga

SEQ ID NO: 341696 - DNA, 4483 bp, Homo sapiens
aggcggggcggggcggcgcggcgcgggccgagcaggacggccgccatcttgcgcgcagctggagtcggtgcctgaggttgcagccgagagtgtgcgccagcccgcggcccagccgaagctctttcccgccgcctctccgcgcctcgcccaggttcagccccgcctgaccctccgcttggcacggtcccctgaccctcagtccggcccggtccggccttccagccgccccggggacgatgaacggaggataaatggtgcccaaggcagacagcggcgccttcctgctgctcttcctgctcgtgctcactgtcaccgagccgctgcggccagagctgcggtgcaaccctgggcagtttgcgtgtcgcagcggcaccatccagtgcatccccctcccctggcagtgtgacggctgggcgacttgcgaggatgagagcgacgaagccaactgtccagaagtgaccggggaggtgcgtcctcatcatgggaaggaggctgtggatccgcggcaggggcgggccagaggaggcgacccttcgcacttccacgcggtgaacgtggcgcagcccgttcgcttcagcagtttcctagggaagtgcccgacagggtggcaccactacgaaggcacggccagctgctaccgggtctacctgagcggggagaactactgggatgccgcgcagacctgccagcgcctgaatggctctctcgccaccttctccactgaccaggagctgcgctttgtcctggcccaggaatgggaccagcccgagcggagctttggttggaaggaccagcgcaagttgtgggttggctatcagtatgttatcactggccggaaccgctccttggaaggtcgctgggaggtggcattcaaaggctcttcagaggtgttcctgcccccagaccccatctttgcctcggccatgtctgagaacgacaacgtgttctgtgcccagcttcagtgcttccatttccccaccctgcggcaccacgacctccacagctggcacgccgagagctgctacgagaagtcttcatttctgtgtaaaagaagtcaaacatgtgttgacatcaaggacaacgtggtggatgaagggttctacttcacccctaagggggacgacccatgcctgagctgcacctgccatggaggggagcctgagatgtgtgtggctgctctctgtgagaggccccagggctgccaacagtaccgcaaggaccccaaagagtgctgcaagttcatgtgtctggacccagatggcaacagtctgtttgactccatggccagcgggatgcgcctggtcgtcagctgcatctcctccttcctcatcctgtcactgctgctcttcatggtccaccggctgcgccagcggcgccgggagcgcatcgagtccctgattggagcaaacttgcaccacttcaacctcggccgcaggatccctggctttgattacggcccagacgggtttggcacgggcctcacgccgctgcatctttctgacgacggagagggtgggactttccatttccacgaccctccacctccctacacggcatacaagtacccggacatcggccagcccgacgaccctccgccgccctacgaggcctccatccacccggacagtgtgttctatgaccctgcagacgatgatgcttttgagcctgtggaggtcagcctgccagcccctggggatggtgggagtgaaggtgcattactccggcgcctggagcagcctctgcccactgcgggggcctctctggcagacctggaagactctgccgacagcagcagcgccctgctcgtgccccctgaccctgcccagagcgggagcaccccagctgcagaggcactgccagggggtggccgccacagccgcagctccctcaatactgtggtgtagacggcctggcctgtaccccaacggtctgggagcacctgtctgttgtagaaaacaccggtccctggggagacttgaaaggcccctgtcccagcctggacgccacgcactgccgcacgtcactggcgggctcgcgtgtgtacatagagaccacagcccgccttctgccaaaagaagtgatggcctgcaccgagcttccttgagggcttcagaaacatgcatagctttggatcactgtcttctcctttataaatggcagaagagtgacaaaattcattcagaccgcacatgttagaggcagggaatgaagaaggtactgtgggccatggccacacctgatgcgtttttggtgggcttacttggtgcagtgtgctgtccagagagacctgctgacccagtctgggacaggcacagtgggagctgccacagtgccccttgctggccgccctcaggagggggcctctggaccgtcagtgtggcgtaggcagtgggtctgcttcagggaggcagcctcttgactttgtcacaacggttgcactgaagatggcccccacaagcccagttgtgaatatcaaggtgaccctgcccctggctgggagctcccctggggctctggaacctgaagccctgagaaggagagcttggaaggaggttgagctcttcactgtgtctttccatctgggctctgcagcccagctctgtggcaggaggcctgaccccaccccatcagtccctctcccagcattgctgtgcatggctccctcaggaagaagctctggagtggggccgaggccccagatgctctgctggggtctggggactgagctgcctcctgtctctccactctggagccctgggctcttgcctcctgttgaattgcccctgggcctgcccccggccccatttgtgccataaagggttgcttcattgcaggaggggtggctgaaaccaccatcctgggctgcatctatctccttaaagtccactccttacatcaccgccactactgcagctcagtgcccagcggccgcatgcacacctcccggcccctcctcagcagcgcaggggctgggggcccttcctggcacccttttgcctgacggaccctgttgcctgctcctgggcagtggttttgttgcctgacacagggcctttaacatttctgaggtttggagattaagcgggttctgtgcgatttttagcacatccatatcttttctacgttgaatgtctggatctttcctttgtatgtttgtgtctctgtgtgtgtatgtggccaagcgtctgcaggtgagggtggcacatggaacttcacgggtcactgggggcccactcttccagggtcatcgatgcatcctgggctgtgctgaggcagtgctgtctcgctcagtctttccagaccagcggggcagcacctgggaggcctgtctgaagcatgcagttctgtggtgctgctcggggatggactccatgcacagtccacttcttgacacattctcacactgtggctggagacccattttttccatcccatgtggaatgagaatcttgagttgcccacagacagacttgacctttgtgccagaactgtccagagctgtgagttttgttactgaattgcctgtccctgagcttggcctgctggagcatgatgctggaggctgtgtgcgggcaggcttgtgctccccttggagaagggctgctacttaacaaggaagtcctggccacaggagtcccctactggctgcagaggacgaagcaggaagcatgccgtggatcccacatgcactggggcagggcagccaggttccagagcagcaggcatgtgcattatgggtgccaggtggccagtgagggcccgaggaccacgcagcagagtcccccacgggcctgagcctgagagctcagaggattcctgccaggcctcagaactgtgtgtgcgggacagggtggctggcacgagatgtgtgggactgggacgcttcctttggggaccagaggaacattaggggccggtcagacacgtagggggcagtgaggaaacggggtaaagtggaccatgcaggctgcagagggtgggccttgggctggccggggttgctgggtggccccttccccatgggcctccacaagcactcaggccactggcacgttgggccaggcagaaggtccacatggcagggctgcctggaacaccgctgccactgtggctccaggaggcccttgggagcatgaggagagctggactcgctcatctgttcttgcaccaccatccagaatgccccctttgcaaggcctgctgcagtccccagtctgaccagcaagtcccggggtcacccttgctgaaccttgtgctccaggggtcctcctcctctaggaccagcttgccacggtttctcagagcccaggtgccctctgacctgccatgcggaggtgggatttgatactgtacattgtcttgatgcctgtttttttatgttttcattaagggtttttagtttttggttgggttgacactaacttttcttaagatgctgtgagaatcatttcatccaaatgccaaataaacttgtgttccggaa

SEQ ID NO: 341697 - DNA, 4093 bp, Homo sapiens
aggcggggcggggcggcgcggcgcgggccgagcaggacggccgccatcttgcgcgcagctggagtcggtgcctgaggttgcagccgagagtgtgcgccagcccgcggcccagccgaagctctttcccgccgcctctccgcgcctcgcccaggttcagccccgcctgaccctccgcttggcacggtcccctgaccctcagtccggcccggtccggccttccagccgccccggggacgatgaacggaggataaatggtgcccaaggcagacagcggcgccttcctgctgctcttcctgctcgtgctcactgtcaccgagccgctgcggccagagctgcggtgcaaccctgggcagtttgcgtgtcgcagcggcaccatccagtgcatccccctcccctggcagtgtgacggctgggcgacttgcgaggatgagagcgacgaagccaactgtccagaagtgaccggggaggtgcgtcctcatcatgggaaggaggctgtggatccgcggcaggggcgggccagaggaggcgacccttcgcacttccacgcggtgaacgtggcgcagcccgttcgcttcagcagtttcctagggaagtgcccgacagggtggcaccactacgaaggcacggccagctgctaccgggtctacctgagcggggagaactactgggatgccgcgcagacctgccagcgcctgaatggctctctcgccaccttctccactgaccaggagctgcgctttgtcctggcccaggaatgggaccagcccgagcggagctttggttggaaggaccagcgcaagttgtgggttggctatcagtatgttatcactggccggaaccgctccttggaaggtcgctgggaggtggcattcaaaggctcttcagaggtgttcctgcccccagaccccatctttgcctcggccatgtctgagaacgacaacgtgttctgtgcccagcttcagtgcttccatttccccaccctgcggcaccacgacctccacagctggcacgccgagagctgctacgagaagtcttcatttctgtgtaaaagaagtcaaacatgtgttgacatcaaggacaacgtggtggatgaagggttctacttcacccctaagggggacgacccatgcctgagctgcacctgccatggaggggagcctgagatgtgtgtggctgctctctgtgagaggccccagggctgccaacagtaccgcaaggaccccaaagagtgctgcaagttcatgtgtctggacccagacgatgatgcttttgagcctgtggaggtcagcctgccagcccctggggatggtgggagtgaaggtgcattactccggcgcctggagcagcctctgcccactgcgggggcctctctggcagacctggaagactctgccgacagcagcagcgccctgctcgtgccccctgaccctgcccagagcgggagcaccccagctgcagaggcactgccagggggtggccgccacagccgcagctccctcaatactgtggtgtagacggcctggcctgtaccccaacggtctgggagcacctgtctgttgtagaaaacaccggtccctggggagacttgaaaggcccctgtcccagcctggacgccacgcactgccgcacgtcactggcgggctcgcgtgtgtacatagagaccacagcccgccttctgccaaaagaagtgatggcctgcaccgagcttccttgagggcttcagaaacatgcatagctttggatcactgtcttctcctttataaatggcagaagagtgacaaaattcattcagaccgcacatgttagaggcagggaatgaagaaggtactgtgggccatggccacacctgatgcgtttttggtgggcttacttggtgcagtgtgctgtccagagagacctgctgacccagtctgggacaggcacagtgggagctgccacagtgccccttgctggccgccctcaggagggggcctctggaccgtcagtgtggcgtaggcagtgggtctgcttcagggaggcagcctcttgactttgtcacaacggttgcactgaagatggcccccacaagcccagttgtgaatatcaaggtgaccctgcccctggctgggagctcccctggggctctggaacctgaagccctgagaaggagagcttggaaggaggttgagctcttcactgtgtctttccatctgggctctgcagcccagctctgtggcaggaggcctgaccccaccccatcagtccctctcccagcattgctgtgcatggctccctcaggaagaagctctggagtggggccgaggccccagatgctctgctggggtctggggactgagctgcctcctgtctctccactctggagccctgggctcttgcctcctgttgaattgcccctgggcctgcccccggccccatttgtgccataaagggttgcttcattgcaggaggggtggctgaaaccaccatcctgggctgcatctatctccttaaagtccactccttacatcaccgccactactgcagctcagtgcccagcggccgcatgcacacctcccggcccctcctcagcagcgcaggggctgggggcccttcctggcacccttttgcctgacggaccctgttgcctgctcctgggcagtggttttgttgcctgacacagggcctttaacatttctgaggtttggagattaagcgggttctgtgcgatttttagcacatccatatcttttctacgttgaatgtctggatctttcctttgtatgtttgtgtctctgtgtgtgtatgtggccaagcgtctgcaggtgagggtggcacatggaacttcacgggtcactgggggcccactcttccagggtcatcgatgcatcctgggctgtgctgaggcagtgctgtctcgctcagtctttccagaccagcggggcagcacctgggaggcctgtctgaagcatgcagttctgtggtgctgctcggggatggactccatgcacagtccacttcttgacacattctcacactgtggctggagacccattttttccatcccatgtggaatgagaatcttgagttgcccacagacagacttgacctttgtgccagaactgtccagagctgtgagttttgttactgaattgcctgtccctgagcttggcctgctggagcatgatgctggaggctgtgtgcgggcaggcttgtgctccccttggagaagggctgctacttaacaaggaagtcctggccacaggagtcccctactggctgcagaggacgaagcaggaagcatgccgtggatcccacatgcactggggcagggcagccaggttccagagcagcaggcatgtgcattatgggtgccaggtggccagtgagggcccgaggaccacgcagcagagtcccccacgggcctgagcctgagagctcagaggattcctgccaggcctcagaactgtgtgtgcgggacagggtggctggcacgagatgtgtgggactgggacgcttcctttggggaccagaggaacattaggggccggtcagacacgtagggggcagtgaggaaacggggtaaagtggaccatgcaggctgcagagggtgggccttgggctggccggggttgctgggtggccccttccccatgggcctccacaagcactcaggccactggcacgttgggccaggcagaaggtccacatggcagggctgcctggaacaccgctgccactgtggctccaggaggcccttgggagcatgaggagagctggactcgctcatctgttcttgcaccaccatccagaatgccccctttgcaaggcctgctgcagtccccagtctgaccagcaagtcccggggtcacccttgctgaaccttgtgctccaggggtcctcctcctctaggaccagcttgccacggtttctcagagcccaggtgccctctgacctgccatgcggaggtgggatttgatactgtacattgtcttgatgcctgtttttttatgttttcattaagggtttttagtttttggttgggttgacactaacttttcttaagatgctgtgagaatcatttcatccaaatgccaaataaacttgtgttccggaa

SEQ ID NO: 341698 - DNA, 4360 bp, Homo sapiens
aggcggggcggggcggcgcggcgcgggccgagcaggacggccgccatcttgcgcgcagctggagtcggtgcctgaggttgcagccgagagtgtgcgccagcccgcggcccagccgaagctctttcccgccgcctctccgcgcctcgcccaggttcagccccgcctgaccctccgcttggcacggtcccctgaccctcagtccggcccggtccggccttccagccgccccggggacgatgaacggaggataaatggtgcccaaggcagacagcggcgccttcctgctgctcttcctgctcgtgctcactgtcaccgagccgctgcggccagaagtgaccggggaggtgcgtcctcatcatgggaaggaggctgtggatccgcggcaggggcgggccagaggaggcgacccttcgcacttccacgcggtgaacgtggcgcagcccgttcgcttcagcagtttcctagggaagtgcccgacagggtggcaccactacgaaggcacggccagctgctaccgggtctacctgagcggggagaactactgggatgccgcgcagacctgccagcgcctgaatggctctctcgccaccttctccactgaccaggagctgcgctttgtcctggcccaggaatgggaccagcccgagcggagctttggttggaaggaccagcgcaagttgtgggttggctatcagtatgttatcactggccggaaccgctccttggaaggtcgctgggaggtggcattcaaaggctcttcagaggtgttcctgcccccagaccccatctttgcctcggccatgtctgagaacgacaacgtgttctgtgcccagcttcagtgcttccatttccccaccctgcggcaccacgacctccacagctggcacgccgagagctgctacgagaagtcttcatttctgtgtaaaagaagtcaaacatgtgttgacatcaaggacaacgtggtggatgaagggttctacttcacccctaagggggacgacccatgcctgagctgcacctgccatggaggggagcctgagatgtgtgtggctgctctctgtgagaggccccagggctgccaacagtaccgcaaggaccccaaagagtgctgcaagttcatgtgtctggacccagatggcaacagtctgtttgactccatggccagcgggatgcgcctggtcgtcagctgcatctcctccttcctcatcctgtcactgctgctcttcatggtccaccggctgcgccagcggcgccgggagcgcatcgagtccctgattggagcaaacttgcaccacttcaacctcggccgcaggatccctggctttgattacggcccagacgggtttggcacgggcctcacgccgctgcatctttctgacgacggagagggtgggactttccatttccacgaccctccacctccctacacggcatacaagtacccggacatcggccagcccgacgaccctccgccgccctacgaggcctccatccacccggacagtgtgttctatgaccctgcagacgatgatgcttttgagcctgtggaggtcagcctgccagcccctggggatggtgggagtgaaggtgcattactccggcgcctggagcagcctctgcccactgcgggggcctctctggcagacctggaagactctgccgacagcagcagcgccctgctcgtgccccctgaccctgcccagagcgggagcaccccagctgcagaggcactgccagggggtggccgccacagccgcagctccctcaatactgtggtgtagacggcctggcctgtaccccaacggtctgggagcacctgtctgttgtagaaaacaccggtccctggggagacttgaaaggcccctgtcccagcctggacgccacgcactgccgcacgtcactggcgggctcgcgtgtgtacatagagaccacagcccgccttctgccaaaagaagtgatggcctgcaccgagcttccttgagggcttcagaaacatgcatagctttggatcactgtcttctcctttataaatggcagaagagtgacaaaattcattcagaccgcacatgttagaggcagggaatgaagaaggtactgtgggccatggccacacctgatgcgtttttggtgggcttacttggtgcagtgtgctgtccagagagacctgctgacccagtctgggacaggcacagtgggagctgccacagtgccccttgctggccgccctcaggagggggcctctggaccgtcagtgtggcgtaggcagtgggtctgcttcagggaggcagcctcttgactttgtcacaacggttgcactgaagatggcccccacaagcccagttgtgaatatcaaggtgaccctgcccctggctgggagctcccctggggctctggaacctgaagccctgagaaggagagcttggaaggaggttgagctcttcactgtgtctttccatctgggctctgcagcccagctctgtggcaggaggcctgaccccaccccatcagtccctctcccagcattgctgtgcatggctccctcaggaagaagctctggagtggggccgaggccccagatgctctgctggggtctggggactgagctgcctcctgtctctccactctggagccctgggctcttgcctcctgttgaattgcccctgggcctgcccccggccccatttgtgccataaagggttgcttcattgcaggaggggtggctgaaaccaccatcctgggctgcatctatctccttaaagtccactccttacatcaccgccactactgcagctcagtgcccagcggccgcatgcacacctcccggcccctcctcagcagcgcaggggctgggggcccttcctggcacccttttgcctgacggaccctgttgcctgctcctgggcagtggttttgttgcctgacacagggcctttaacatttctgaggtttggagattaagcgggttctgtgcgatttttagcacatccatatcttttctacgttgaatgtctggatctttcctttgtatgtttgtgtctctgtgtgtgtatgtggccaagcgtctgcaggtgagggtggcacatggaacttcacgggtcactgggggcccactcttccagggtcatcgatgcatcctgggctgtgctgaggcagtgctgtctcgctcagtctttccagaccagcggggcagcacctgggaggcctgtctgaagcatgcagttctgtggtgctgctcggggatggactccatgcacagtccacttcttgacacattctcacactgtggctggagacccattttttccatcccatgtggaatgagaatcttgagttgcccacagacagacttgacctttgtgccagaactgtccagagctgtgagttttgttactgaattgcctgtccctgagcttggcctgctggagcatgatgctggaggctgtgtgcgggcaggcttgtgctccccttggagaagggctgctacttaacaaggaagtcctggccacaggagtcccctactggctgcagaggacgaagcaggaagcatgccgtggatcccacatgcactggggcagggcagccaggttccagagcagcaggcatgtgcattatgggtgccaggtggccagtgagggcccgaggaccacgcagcagagtcccccacgggcctgagcctgagagctcagaggattcctgccaggcctcagaactgtgtgtgcgggacagggtggctggcacgagatgtgtgggactgggacgcttcctttggggaccagaggaacattaggggccggtcagacacgtagggggcagtgaggaaacggggtaaagtggaccatgcaggctgcagagggtgggccttgggctggccggggttgctgggtggccccttccccatgggcctccacaagcactcaggccactggcacgttgggccaggcagaaggtccacatggcagggctgcctggaacaccgctgccactgtggctccaggaggcccttgggagcatgaggagagctggactcgctcatctgttcttgcaccaccatccagaatgccccctttgcaaggcctgctgcagtccccagtctgaccagcaagtcccggggtcacccttgctgaaccttgtgctccaggggtcctcctcctctaggaccagcttgccacggtttctcagagcccaggtgccctctgacctgccatgcggaggtgggatttgatactgtacattgtcttgatgcctgtttttttatgttttcattaagggtttttagtttttggttgggttgacactaacttttcttaagatgctgtgagaatcatttcatccaaatgccaaataaacttgtgttccggaa

SEQ ID NO: 341699 - DNA, 3678 bp, Homo sapiens
aggcggggcggggcggcgcggcgcgggccgagcaggacggccgccatcttgcgcgcagctggagtcggtgcctgaggttgcagccgagagtgtgcgccagcccgcggcccagccgaagctctttcccgccgcctctccgcgcctcgcccaggttcagccccgcctgaccctccgcttggcacggtcccctgaccctcagtccggcccggtccggccttccagccgccccggggacgatgaacggaggataaatggtgcccaaggcagacagcggcgccttcctgctgctcttcctgctcgtgctcactgtcaccgagccgctgcggccagagctgcggtgcaaccctgggcagtttgcgtgtcgcagcggcaccatccagtgcatccccctcccctggcagtgtgacggctgggcgacttgcgaggatgagagcgacgaagccaactgtccagaagtgaccggggaggtgcgtcctcatcatgggaaggaggctgtggatccgcggcaggggcgggccagaggaggcgacccttcgcacttccacgcggtgaacgtggcgcagcccgttcgcttcagcagtttcctagggaagtgcccgacagggtggcaccactacgaaggcacggccagctgctaccgggtctacctgagcggggagaactactgggatgccgcgcagacctgccagcgcctgaatggctctctcgccaccttctccactgaccaggagctgcgctttgtcctggcccaggaatgggaccagcccgagcggagctttggttggaaggaccagcgcaagttgtgggttggctatcagtatgttatcactggccggaaccgctccttggaaggtcgctgggaggtggcattcaaaggctcttcagaggtgttcctgcccccagaccccatctttgcctcggccatgtctgagaacgacaacgtgttctgtgcccagcttcagtgcttccatttccccaccctgcggcaccacgacctccacagctggcacgccgagagctgctacgagaagtcttcatttctgtgtaaaagaagtcaaacatgtgttgacatcaaggacaacgtggtggatgaagggttctacttcacccctaagggggacgacccatgcctgagctgcacctgccatggaggggagcctgagatgtgtgtggctgctctctgtgagaggccccagggctgccaacagtaccgcaaggaccccaaagagtgctgcaagttcatgtgtctggacccagatggcaacagtctgtttgactccatggccagcgggatgcgcctggtcgtcagctgcatctcctccttcctcatcctgtcactgctgctcttcatggtccaccggctgcgccagcggcgccgggagcgcatcgagtccctgattggagcaaacttgcaccacttcaacctcggccgcaggatccctggctttgattacggcccagacgggtttggcacgggcctcacgccgctgcatctttctgacgacggagagggtgggactttccatttccacgaccctccacctccctacacggcatacaagtacccggacatcggccagcccgacgaccctccgccgccctacgaggcctccatccacccggacagtgtgttctatgaccctgcagacgatgatgcttttgagcctgtggaggtcagcctgccagcccctggggatggtgggagtgaaggtgcattactccggcgcctggagcagcctctgcccactgcgggggcctctctggcagacctggaagactctgccgacagcagcagcgccctgctcgtgccccctgaccctgcccagagcgggagcaccccagctgcagaggcactgccagggggtggccgccacagccgcagctccctcaatactgtggtgtagacggcctggcctgtaccccaacggtctgggagcacctgtctgttgtagaaaacaccggtccctggggagacttgaaaggcccctgtcccagcctggacgccacgcactgccgcacgtcactggcgggctcgcgtgtgtacatagagaccacagcccgccttctgccaaaagaagtgatggcctgcaccgagcttccttgagggcttcagaaacatgcatagctttggatcactgtcttctcctttataaatggcagaagagtgacaaaattcattcagaccgcacatgttagaggcagggaatgaagaaggtactgtgggccatggccacacctgatgcgtttttggtgggcttacttggtgcagtgtgctgtccagagagacctgctgacccagtctgggacaggcacagtgggagctgccacagtgccccttgctggccgccctcaggagggggcctctggaccgtcagtgtggcgtaggcagtgggtctgcttcagggaggcagcctcttgactttgtcacaacggttgcactgaagatggcccccacaagcccagttgtgaatatcaaggtgaccctgcccctggctgggagctcccctggggctctggaacctgaagccctgagaaggagagcttggaaggaggttgagctcttcactgtgtctttccatctgggctctgcagcccagctctgtggcaggaggcctgaccccaccccatcagtccctctcccagcattgctgtgcatggctccctcaggaagaagctctggagtggggccgaggccccagatgctctgctggggtctggggactgagctgcctcctgtctctccactctggagccctgggctcttgcctcctgttgaattgcccctgggcctgcccccggccccatttgtgccataaagggttgcttcattgcaggaggggtggctgaaaccaccatcctgggctgcatctatctccttaaagtccactccttacatcaccgccactactgcagctcagtgcccagcggccgcatgcacacctcccggcccctcctcagcagcgcaggggctgggggcccttcctggcacccttttgcctgacggaccctgttgcctgctcctgggcagtggttttgttgcctgacacagggcctttaacatttctgaggtttggagattaagcgggttctgtgcgatttttagcacatccatatcttttctacgttgaatgtctggatctttcctttgtatgtttgtgtctctgtgtgtgtatgtggccaagcgtctgcaggtgagggtggcacatggaacttcacgggtcactgggggcccactcttccagggtcatcgatgcatcctgggctgtgctgaggcagtgctgtctcgctcagtctttccagaccagcggggcagcacctgggaggcctgtctgaagcatgcagttctgtggtgctgctcggggatggactccatgcacagtccacttcttgacacattctcacactgtggctggagacccattttttccatcccatgtggaatgagaatcttgagttgcccacagacagacttgacctttgtgccagaactgtccagagctgtgagttttgttactgaattgtgttgggcccatttcgactgaaggtgctgggtggctgccctcggtctaggtaatcacaggcttcctgcattagaaatggtcggtgatgtcaaaagcattcctgtagactccagtcagcttctactgctaggtcagtcatcttcagaccccattactg

SEQ ID NO: 341700 - DNA, 4077 bp, Homo sapiens
aggcggggcggggcggcgcggcgcgggccgagcaggacggccgccatcttgcgcgcagctggagtcggtgcctgaggttgcagccgagagtgtgcgccagcccgcggcccagccgaagctctttcccgccgcctctccgcgcctcgcccaggttcagccccgcctgaccctccgcttggcacggtcccctgaccctcagtccggcccggtccggccttccagccgccccggggacgatgaacggaggataaatggtgcccaaggcagacagcggcgccttcctgctgctcttcctgctcgtgctcactgtcaccgagccgctgcggccagagctgcggtgcaaccctgggcagtttgcgtgtcgcagcggcaccatccagtgcatccccctcccctggcagtgtgacggctgggcgacttgcgaggatgagagcgacgaagccaactgtccagaagtgaccggggaggtgcgtcctcatcatgggaaggaggctgtggatccgcggcaggggcgggccagaggaggcgacccttcgcacttccacgcggtgaacgtggcgcagcccgttcgcttcagcagtttcctagggaagtgcccgacagggtggcaccactacgaaggcacggccagctgctaccgggtctacctgagcggggagaactactgggatgccgcgcagacctgccagcgcctgaatggctctctcgccaccttctccactgaccaggagctgcgctttgtcctggcccaggaatgggaccagcccgagcggagctttggttggaaggaccagcgcaagttgtgggttggctatcagtatgttatcactggccggaaccgctccttggaaggtcgctgggaggtggcattcaaaggctcttcagaggtgttcctgcccccagaccccatctttgcctcggccatgtctgagaacgacaacgtgttctgtgcccagcttcagtgcttccatttccccaccctgcggcaccacgacctccacagctggcacgccgagagctgctacgagaagtcttcatttctgtgtaaaagaagtcaaacatgtgttgacatcaaggacaacgtggtggatgaagggttctacttcacccctaagggggacgacccatgcctgagctgcacctgccatggaggggagcctgagatgtgtgtggctgctctctgtgagaggccccagggctgccaacagtaccgcaaggaccccaaagagtgctgcaagttcatgtgtctggacccagatggcaacagtctgtttgactccatggccagcgggatgcgcctggtcgtcagctgcatctcctccttcctcatcctgtcactgctgctcttcatggtccaccggctgcgccagcggcgccgggagcgcatcgagtccctgattggagcaaacttgcaccacttcaacctcggccgcaggatccctggctttgattacggcccagacgggtttggcacgggcctcacgccgctgcatctttctgacgacggagagggtgggactttccatttccacgaccctccacctccctacacggcatacaagtacccggacatcggccagcccgacgaccctccgccgccctacgaggcctccatccacccggacagtgtgttctatgaccctgcagacgatgatgcttttgagcctgtggaggtcagcctgccagcccctggggatggtgggagtgaaggtgcattactccggcgcctggagcagcctctgcccactgcgggggcctctctggcagacctggaagactctgccgacagcagcagcgccctgctcgtgccccctgaccctgcccagagcgggagcaccccagctgcagaggcactgccagggggtggccgccacagccgcagctccctcaatactgtggtgtagacggcctggcctgtaccccaacggtctgggagcacctgtctgttgtagaaaacaccggtccctggggagacttgaaaggcccctgtcccagcctggacgccacgcactgccgcacgtcactggcgggctcgcgtgtgtacatagagaccacagcccgccttctgccaaaagaagtgatggcctgcaccgagcttccttgagggcttcagaaacatgcatagctttggatcactgtcttctcctttataaatggcagaagagtgacaaaattcattcagaccgcacatgttagaggcagggaatgaagaaggtactgtgggccatggccacacctgatgcgtttttggtgggcttacttggtgcagtgtgctgtccagagagacctgctgacccagtctgggacaggcacagtgggagctgccacagtgccccttgctggccgccctcaggagggggcctctggaccgtcagtgtggcgtaggcagtgggtctgcttcagggaggcagcctcttgactttgtcacaacggttgcatgaaaccaccatcctgggctgcatctatctccttaaagtccactccttacatcaccgccactactgcagctcagtgcccagcggccgcatgcacacctcccggcccctcctcagcagcgcaggggctgggggcccttcctggcacccttttgcctgacggaccctgttgcctgctcctgggcagtggttttgttgcctgacacagggcctttaacatttctgaggtttggagattaagcgggttctgtgcgatttttagcacatccatatcttttctacgttgaatgtctggatctttcctttgtatgtttgtgtctctgtgtgtgtatgtggccaagcgtctgcaggtgagggtggcacatggaacttcacgggtcactgggggcccactcttccagggtcatcgatgcatcctgggctgtgctgaggcagtgctgtctcgctcagtctttccagaccagcggggcagcacctgggaggcctgtctgaagcatgcagttctgtggtgctgctcggggatggactccatgcacagtccacttcttgacacattctcacactgtggctggagacccattttttccatcccatgtggaatgagaatcttgagttgcccacagacagacttgacctttgtgccagaactgtccagagctgtgagttttgttactgaattgcctgtccctgagcttggcctgctggagcatgatgctggaggctgtgtgcgggcaggcttgtgctccccttggagaagggctgctacttaacaaggaagtcctggccacaggagtcccctactggctgcagaggacgaagcaggaagcatgccgtggatcccacatgcactggggcagggcagccaggttccagagcagcaggcatgtgcattatgggtgccaggtggccagtgagggcccgaggaccacgcagcagagtcccccacgggcctgagcctgagagctcagaggattcctgccaggcctcagaactgtgtgtgcgggacagggtggctggcacgagatgtgtgggactgggacgcttcctttggggaccagaggaacattaggggccggtcagacacgtagggggcagtgaggaaacggggtaaagtggaccatgcaggctgcagagggtgggccttgggctggccggggttgctgggtggccccttccccatgggcctccacaagcactcaggccactggcacgttgggccaggcagaaggtccacatggcagggctgcctggaacaccgctgccactgtggctccaggaggcccttgggagcatgaggagagctggactcgctcatctgttcttgcaccaccatccagaatgccccctttgcaaggcctgctgcagtccccagtctgaccagcaagtcccggggtcacccttgctgaaccttgtgctccaggggtcctcctcctctaggaccagcttgccacggtttctcagagcccaggtgccctctgacctgccatgcggaggtgggatttgatactgtacattgtcttgatgcctgtttttttatgttttcattaagggtttttagtttttggttgggttgacactaacttttcttaagatgctgtgagaatcatttcatccaaatgccaaataaacttgtgttccggaa

SEQ ID NO: 341701 - DNA, 3471 bp, Homo sapiens
aggcggggcggggcggcgcggcgcgggccgagcaggacggccgccatcttgcgcgcagctggagtcggtgcctgaggttgcagccgagagtgtgcgccagcccgcggcccagccgaagctctttcccgccgcctctccgcgcctcgcccaggttcagccccgcctgaccctccgcttggcacggtcccctgaccctcagtccggcccggtccggccttccagccgccccggggacgatgaacggaggataaatggtgcccaaggcagacagcggcgccttcctgctgctcttcctgctcgtgctcactgtcaccgagccgctgcggccagagctgcggtgcaaccctgggcagtttgcgtgtcgcagcggcaccatccagtgcatccccctcccctggcagtgtgacggctgggcgacttgcgaggatgagagcgacgaagccaactgtccagaagtgaccggggaggtgcgtcctcatcatgggaaggaggctgtggatccgcggcaggggcgggccagaggaggcgacccttcgcacttccacgcggtgaacgtggcgcagcccgttcgcttcagcagtttcctagggaagtgcccgacagggtggcaccactacgaaggcacggccagctgctaccgggtctacctgagcggggagaactactgggatgccgcgcagacctgccagcgcctgaatggctctctcgccaccttctccactgaccaggagctgcgctttgtcctggcccaggaatgggaccagcccgagcggagctttggttggaaggaccagcgcaagttgtgggttggctatcagtatgttatcactggccggaaccgctccttggaaggtcgctgggaggtggcattcaaaggctcttcagaggtgttcctgcccccagaccccatctttgcctcggccatgtctgagaacgacaacgtgttctgtgcccagcttcagtgcttccatttccccaccctgcggcaccacgacctccacagctggcacgccgagagctgctacgagaagtcttcatttctgtgtaaaagaagtcaaacatgtgttgacatcaaggacaacgtggtggatgaagggttctacttcacccctaagggggacgacccatgcctgagctgcacctgccatggaggggagcctgagatgtgtgtggctgctctctgtgagaggccccagggctgccaacagtaccgcaaggaccccaaagagtgctgcaagttcatgtgtctggacccagatggcaacagtctgtttgactccatggccagcgggatgcgcctggtcgtcagctgcatctcctccttcctcatcctgtcactgctgctcttcatggtccaccggctgcgccagcggcgccgggagcgcatcgagtccctgattggagcaaacttgcaccacttcaacctcggccgcaggatccctggctttgattacggcccagacgggtttggcacgggcctcacgccgctgcatctttctgacgacggagagggtgggactttccatttccacgaccctccacctccctacacggcatacaagtacccggacatcggccagcccgacgaccctccgccgccctacgaggcctccatccacccggacagtgtgttctatgaccctgcagacgatgatgcttttgagcctgtggaggtcagcctgccagcccctggggatggtgggagtgaaggtgcattactccggcgcctggagcagcctctgcccactgcgggggcctctctggcagacctggaagactctgccgacagcagcagcgccctgctcgtgccccctgaccctgcccagagcgggagcaccccagctgcagaggcactgccagggggtggccgccacagccgcagctccctcaatactgtggtgtagacggcctggcctgtaccccaacggtctgggagcacctgtctgttgtagaaaacaccggtccctggggagacttgaaaggcccctgtcccagcctggacgccacgcactgccgcacgtcactggcgggctcgcgtgtgtacatagagaccacagcccgccttctgccaaaagaagtgatggcctgcaccgagcttccttgagggcttcagaaacatgcatagctttggatcactgtcttctcctttataaatggcagaagagtgacaaaattcattcagaccgcacatgttagaggcagggaatgaagaaggtactgtgggccatggccacacctgatgcgtttttggtgggcttacttggtgcagtgtgctgtccagagagacctgctgacccagtctgggacaggcacagtgggagctgccacagtgccccttgctggccgccctcaggagggggcctctggaccgtcagtgtggcgtaggcagtgggtctgcttcagggaggcagcctcttgactttgtcacaacggttgcactgaagatggcccccacaagcccagttgtgaatatcaaggtgaccctgcccctggctgggagctcccctggggctctggaacctgaagccctgagaaggagagcttggaaggaggttgagctcttcactgtgtctttccatctgggctctgcagcccagctctgtggcaggaggcctgaccccaccccatcagtccctctcccagcattgctgtgcatggctccctcaggaagaagctctggagtggggccgaggccccagatgctctgctggggtctggggactgagctgcctcctgtctctccactctggagccctgggctcttgcctcctgttgaattgcccctgggcctgcccccggccccatttgtgccataaagggttgcttcattgcaggaggggtggctgaaaccaccatcctgggctgcatctatctccttaaagtccactccttacatcaccgccactactgcagctcagtgcccagcggccgcatgcacacctcccggcccctcctcagcagcgcaggggctgggggcccttcctggcacccttttgcctgacggaccctgttgcctgctcctgggcagtggttttgttgcctgacacagggcctttaacatttctgaggtttggagattaagcgggttctgtgcgatttttagcacatccatatcttttctacgttgaatgtctggatctttcctttgtatgtctgggcactcggcgtgcacacgccgagtatccacacgtgtccccacagttctgtcatatcatagtacaggaatttcaacctgttatccatcgactacgtctttcgacctcgccttaggccccgacttacccagagcagatcagctttactctggaaaccttagatattcggccggaaggattctcaccttcctctcgctactcattccggcattctctcttcttaaaaacccactgctcctttcggtacagcttcttctctttaagaatgctcctctaccaatcatcttgcgatgattccacagcttcggcgtgtgca

SEQ ID NO: 341702 - DNA, 1471 bp, Homo sapiens
aggcggggcggggcggcgcggcgcgggccgagcaggacggccgccatcttgcgcgcagctggagtcggtgcctgaggttgcagccgagagtgtgcgccagcccgcggcccagccgaagctctttcccgccgcctctccgcgcctcgcccaggttcagccccgcctgaccctccgcttggcacggtcccctgaccctcagtccggcccggtccggccttccagccgccccggggacgatgaacggaggataaatggtgcccaaggcagacagcggcgccttcctgctgctcttcctgctcgtgctcactgtcaccgagccgctgcggccagagctgcggtgcaaccctgggcagtttgcgtgtcgcagcggcaccatccagtgcatccccctcccctggcagtgtgacggctgggcgacttgcgaggatgagagcgacgaagccaactgtccagaagtgaccggggaggtgcgtcctcatcatgggaaggaggctgtggatccgcggcaggggcgggccagaggaggcgacccttcgcacttccacgcggtgaacgtggcgcagcccgttcgcttcagcagtttcctagggaagtgcccgacagggtggcaccactacgaaggcacggccagctgctaccgggtctacctgagcggggagaactactgggatgccgcgcagacctgccagcgcctgaatggctctctcgccaccttctccactgaccaggagctgcgctttgtcctggcccaggaatgggaccagcccgagcggagctttggttggaaggaccagcgcaagttgtgggttggctatcagtatgttatcactggccggaaccgctccttggaaggtcgctgggaggtggcattcaaaggctcttcagaggtgttcctgcccccagaccccatctttgcctcggccatgtctgagaacgacaacgtgttctgtgcccagcttcagtgcttccatttccccaccctgcggcaccacgacctccacagctggcacgccgagagctgctacgagaagtcttcatttctgtgtaaaagaagtcaaacatgtgttgacatcaaggacaacgtggtggatgaagggttctacttcacccctaagggggacgacccatgcctgagctgcacctgccatggaggggagcctgagatgtgtgtggctgctctctgtgagaggccccagggctgccaacagtaccgcaaggaccccaaagagtgctgcaagttcatgtgtctggacccagatggcaacagtctgtttgactccatggccagcgggatgcgcctggtcgtcagctgcatctcctccttcctcatcctgtcactgctgctcttcatggtccaccggctgcgccagcggcgccgggagcgcatcgagtccctgattggagcaaacttgcaccacttaacctcgccgcagatcctgcttatacgccaacggtatgacggcctcacaca

SEQ ID NO: 341703 - DNA, 1260 bp, Homo sapiens
aagggaattcgtgctggtgctaagggaattcgtgctgggctgtgctgaggcagtgctgtctcgctcagtctttccagaccagcggggcagcacctgggaggcctgtctgaagcatgcagttctgtggtgctgctcggggatggactccatgcacagtccacttcttgacacattctcacactgtggctggagacccattttttccatcccatgtggaatgagaatcttgagttgcccacagacagacttgacctttgtgccagaactgtccagagctgtgagttttgttactgaattgcctgtccctgagcttggcctgctggagcatgatgctggaggctgtgtgcgggcaggcttgtgctccccttggagaagggctgctacttaacaaggaagtcctggccacaggagtcccctactggctgcagaggacgaagcaggaagcatgccgtggatcccacatgcactggggcagggcagccaggttccagagcagcaggcatgtgcattatgggtgccaggtggccagtgagggcccgaggaccacgcagcagagtcccccacgggcctgagcctgagagctcagaggattcctgccaggcctcagaactgtgtgtgcgggacagggtggctggcacgagatgtgtgggactgggacgcttcctttggggaccagaggaacattaggggccggtcagacacgtagggggcagtgaggaaacggggtaaagtggaccatgcaggctgcagagggtgggccttgggctggccggggttgctgggtggccccttccccatgggcctccacaagcactcaggccactggcacgttgggccaggcagaaggtccacatggcagggctgcctggaacaccgctgccactgtggctccaggaggcccttgggagcatgaggagagctggactcgctcatctgttcttgcaccaccatccagaatgccccctttgcaaggcctgctgcagtccccagtctgaccagcaagtcccggggtcacccttgctgaaccttgtgctccaggggtcctcctcctctaggaccagcttgccacggtttctcagagcccaggtgccctctgacctgccatgcggaggtgggatttgatactgtacattgtcttgatgcctgtttttttatgttttcattaagggtttttagtttttggttgggttgacactaacttttcttaagatgctgtgagaatcatttcatccaaatgccaaataaacttgtgttccggaa

SEQ ID NO: 341704 - DNA, 1166 bp, Homo sapiens
gcgaggtctgattgattgctgcccatgaagcgctggtgatggatgacggactccatgcacagtccacttcttgacacattctcacactgtggctggagacccattttttccatcccatgtggaatgagaatcttgagttgcccacagacagacttgacctttgtgccagaactgtccagagctgtgagttttgttactgaattgcctgtccctgagcttggcctgctggagcatgatgctggaggctgtgtgcgggcaggcttgtgctccccttggagaagggctgctacttaacaaggaagtcctggccacaggagtcccctactggctgcagaggacgaagcaggaagcatgccgtggatcccacatgcactggggcagggcagccaggttccagagcagcaggcatgtgcattatgggtgccaggtggccagtgagggcccgaggaccacgcagcagagtcccccacgggcctgagcctgagagctcagaggattcctgccaggcctcagaactgtgtgtgcgggacagggtggctggcacgagatgtgtgggactgggacgcttcctttggggaccagaggaacattaggggccggtcagacacgtagggggcagtgaggaaacggggtaaagtggaccatgcaggctgcagagggtgggccttgggctggccggggttgctgggtggccccttccccatgggcctccacaagcactcaggccactggcacgttgggccaggcagaaggtccacatggcagggctgcctggaacaccgctgccactgtggctccaggaggcccttgggagcatgaggagagctggactcgctcatctgttcttgcaccaccatccagaatgccccctttgcaaggcctgctgcagtccccagtctgaccagcaagtcccggggtcacccttgctgaaccttgtgctccaggggtcctcctcctctaggaccagcttgccacggtttctcagagcccaggtgccctctgacctgccatgcggaggtgggatttgatactgtacattgtcttgatgcctgtttttttatgttttcattaagggtttttagtttttggttgggttgacactaacttttcttaagatgctgtgagaatcatttcatccaaatgccaaataaacttgtgttccggaa

SEQ ID NO: 341705 - DNA, 1001 bp, Homo sapiens
aggcggggcggggcggcgcggcgcgggccgagcaggacggccgccatcttgcgcgcagctggagtcggtgcctgaggttgcagccgagagtgtgcgccagcccgcggcccagccgaagctctttcccgccgcctctccgcgcctcgcccaggttcagccccgcctgaccctccgcttggcacggtcccctgaccctcagtccggcccggtccggccttccagccgccccggggacgatgaacggaggataaatgggtgccaggtggccagtgagggcccgaggaccacgcagcagagtcccccacgggcctgagcctgagagctcagaggattcctgccaggcctcagaactgtgtgtgcgggacagggtggctggcacgagatgtgtgggactgggacgcttcctttggggaccagaggaacattaggggccggtcagacacgtagggggcagtgaggaaacggggtaaagtggaccatgcaggctgcagagggtgggccttgggctggccggggttgctgggtggccccttccccatgggcctccacaagcactcaggccactggcacgttgggccaggcagaaggtccacatggcagggctgcctggaacaccgctgccactgtggctccaggaggcccttgggagcatgaggagagctggactcgctcatctgttcttgcaccaccatccagaatgccccctttgcaaggcctgctgcagtccccagtctgaccagcaagtcccggggtcacccttgctgaaccttgtgctccaggggtcctcctcctctaggaccagcttgccacggtttctcagagcccaggtgccctctgacctgccatgcggaggtgggatttgatactgtacattgtcttgatgcctgtttttttatgttttcattaagggtttttagtttttggttgggttgacactaacttttcttaagatgctgtgagaatcatttcatccaaatgccaaataaacttgtgttccggaa

SEQ ID NO: 341706 - DNA, 995 bp, Homo sapiens
aggcggggcggggcggcgcggcgcgggccgagcaggacggccgccatcttgcgcgcagctggagtcggtgcctgaggttgcagccgagagtgtgcgccagcccgcggcccagccgaagctctttcccgccgcctctccgcgcctcgcccaggttcagccccgcctgaccctccgcttggcacggtcccctgaccctcagtccggcccggtccggccttccagccgccccggggacgatgaacggaggataaatggtgcccaaggcagacagcggcgccttcctgctgctcttcctgctcgtgctcactgtcaccgagccgctgcggccagaagtgaccggggaggtgcgtcctcatcatgggaaggaggctgtggatccgcggcaggggcgggccagaggaggcgacccttcgcacttccacgcggtgaacgtggcgcagcccgttcgcttcagcagtttcctagggaagtgcccgacagggtggcaccactacgaaggcacggccagctgctaccgggtctacctgagcggggagaactactgggatgccgcgcagacctgccagcgcctgaatggctctctcgccaccttctccactgaccaggagctgcgctttgtcctggcccaggaatgggaccagcccgagcggagctttggttggaaggaccagcgcaagttgtgggttggctatcagtatgttatcactggccggaaccgctccttggaaggtcgctgggaggtggcattcaaaggctcttcagaggtgttcctgcccccagaccccatctttgcctcggccatgtctgagaacgacaacgtgttctgtgcccagcttcagtgcttccatttccccaccctgcggcaccacgacctccacagctggcacgccgagagctgctacgagaagtcttcatttctgtgtaaaagaaaggcgggatttcgctatgttgcccaagctggtctcaaactataggcctcaagtgttgaaggacat

SEQ ID NO: 341707 - DNA, 4703 bp, Homo sapiens
aggcggggcggggcggcgcggcgcgggccgagcaggacggccgccatcttgcgcgcagctggagtcggtgcctgaggttgcagccgagagtgtgcgccagcccgcggcccagccgaagctctttcccgccgcctctccgcgcctcgcccaggttcagccccgcctgaccctccgcttggcacggtcccctgaccctcagtccggcccggtccggccttccagccgccccggggacgatgaacggaggataaatggtgcccaaggcagacagcggcgccttcctgctgctcttcctgctcgtgctcactgtcaccgagccgctgcggccagagctgcggtgcaaccctgggcagtttgcgtgtcgcagcggcaccatccagtgcatccccctcccctggcagtgtgacggctgggcgacttgcgaggatgagagcgacgaagccaactgtccagaagtgaccggggaggtgcgtcctcatcatgggaaggaggctgtggatccgcggcaggggcgggccagaggaggcgacccttcgcacttccacgcggtgaacgtggcgcagcccgttcgcttcagcagtttcctagggaagtgcccgacagggtggcaccactacgaaggcacggccagctgctaccgggtctacctgagcggggagaactactgggatgccgcgcagacctgccagcgcctgaatggctctctcgccaccttctccactgaccaggagctgcgctttgtcctggcccaggaatgggaccagcccgagcggagctttggttggaaggaccagcgcaagttgtgggttggctatcagtatgttatcactggccggaaccgctccttggaaggtcgctgggaggtggcattcaaaggctcttcagaggtgttcctgcccccagaccccatctttgcctcggccatgtctgagaacgacaacgtgttctgtgcccagcttcagtgcttccatttccccaccctgcggcaccacgacctccacagctggcacgccgagagctgctacgagaagtcttcatttctgtgtaaaagaagtcaaacatgtgttgacatcaaggacaacgtggtggatgaagggttctacttcacccctaagggggacgacccatgcctgagctgcacctgccatggaggggagcctgagatgtgtgtggctgctctctgtgagaggccccagggctgccaacagtaccgcaaggaccccaaagagtgctgcaagttcatgtgtctggacccagatggcaacagtctgtttgactccatggccagcgggatgcgcctggtcgtcagctgcatctcctccttcctcatcctgtcactgctgctcttcatggtccaccggctgcgccagcggcgccgggagcgcatcgagtccctgattggagcaaacttgcaccacttcaacctcggccgcaggatccctggctttgattacggcccagacgggtttggcacgggcctcacgccgctgcatctttctgacgacggagagggtgggactttccatttccacgaccctccacctccctacacggcatacaagtacccggacatcggccagcccgacgaccctccgccgccctacgaggcctccatccacccggacagtgtgttctatgaccctgcagacgatgatgcttttgagcctgtggaggtcagcctgccagcccctggggatggtgggagtgaaggtgcattactccggcgcctggagcagcctctgcccactgcgggggcctctctggcagacctggaagactctgccgacagcagcagcgccctgctcgtgccccctgaccctgcccagagcgggagcaccccagctgcagaggcactgccagggggtggccgccacagccgcagctccctcaatactgtggtgtagacggcctggcctgtaccccaacggtctgggagcacctgtctgttgtagaaaacaccggtccctggggagacttgaaaggcccctgtcccagcctggacgccacgcactgccgcacgtcactggcgggctcgcgtgtgtacatagagaccacagcccgccttctgccaaaagaagtgatggcctgcaccgagcttccttgagggcttcagaaacatgcatagctttggatcactgtcttctcctttataaatggcagaagagtgacaaaattcattcagaccgcacatgttagaggcagggaatgaagaaggtactgtgggccatggccacacctgatgcgtttttggtgggcttacttggtgcagtgtgctgtccagagagacctgctgacccagtctgggacaggcacagtgggagctgccacagtgccccttgctggccgccctcaggagggggcctctggaccgtcagtgtggcgtaggcagtgggtctgcttcagggaggcagcctcttgactttgtcacaacggttgcactgaagatggcccccacaagcccagttgtgaatatcaaggtgaccctgcccctggctgggagctcccctggggctctggaacctgaagccctgagaaggagagcttggaaggaggttgagctcttcactgtgtctttccatctgggctctgcagcccagctctgtggcaggaggcctgaccccaccccatcagtccctctcccagcattgctgtgcatggctccctcaggaagaagctctggagtggggccgaggccccagatgctctgctggggtctggggactgagctgcctcctgtctctccactctggagccctgggctcttgcctcctgttgaattgcccctgggcctgcccccggccccatttgtgccataaagggttgcttcattgcaggaggggtggctgaaaccaccatcctgggctgcatctatctccttaaagtccactccttacatcaccgccactactgcagctcagtgcccagcggccgcatgcacacctcccggcccctcctcagcagcgcaggggctgggggcccttcctggcacccttttgcctgacggaccctgttgcctgctcctgggcagtggttttgttgcctgacacagggcctttaacatttctgaggtttggagattaagcgggttctgtgcgatttttagcacatccatatcttttctacgttgaatgtctggatctttcctttgtatgtttgtgtctctgtgtgtgtatgtggccaagcgtctgcaggtgagggtggcacatggaacttcacgggtcactgggggcccactcttccagggtcatcgatgcatcctgggctgtgctgaggcagtgctgtctcgctcagtctttccagaccagcggggcagcacctgggaggcctgtctgaagcatgcagttctgtggtgctgctcggggatggactccatgcacagtccacttcttgacacattctcacactgtggctggagacccattttttccatcccatgtggaatgagaatcttgagttgcccacagacagacttgacctttgtgccagaactgtccagagctgtgagttttgttactgaattgcctgtccctgagcttggcctgctggagcatgatgctggaggctgtgtgcgggcaggcttgtgctccccttggagaagggctgctacttaacaaggaagtcctggccacaggagtcccctactggctgcagaggacgaagcaggaagcatgccgtggatcccacatgcactggggcagggcagccaggttccagagcagcaggcatgtgcattatgggtgccaggtggccagtgagggcccgaggaccacgcagcagagtcccccacgggcctgagcctgagagctcagaggattcctgccaggcctcagaactgtgtgtgcgggacagggtggctggcacgagatgtgtgggactgggacgcttcctttggggaccagaggaacattaggggccggtcagacacgtagggggcagtgaggaaacggggtaaagtggaccatgcaggctgcagagggtgggccttgggctggccggggttgctgggtggccccttccccatgggcctccacaagcactcaggccactggcacgttgggccaggcagaaggtccacatggcagggctgcctggaacaccgctgccactgtggctccaggaggcccttgggagcatgaggagagctggactcgctcatctgttcttgcaccaccatccagaatgccccctttgcaaggcctgctgcagtccccagtctgaccagcaagtcccggggtcacccttgctgaaccttgtgctccaggggtcctcctcctctaggaccagcttgccacggtttctcagagcccaggtgccctctgacctgccatgcggaggtgggatttgatactgtacattgtcttgatgcctgtttttttatgttttcattaagggtttttagtttttggttgggttgacactaacttttcttaagatgctgtgagaatcatttcatccaaatgccaaataaacttgtgttccggaaaaaaaaaaaaaaaaacaaagagagaaaaaaaaaaaaaaaaaaaacaaaaaaaaaaaaaaagaaaacagaaagaagaaaagagaggaagacagaagaagacaaagagaaaagacacacagaaaagaagaagaacacaaagaaaagaagagcgacgaccaagggaaaacacacaagaaagagaggaaacccaagggagccgggccctctctagcagcgagcc

SEQ ID NO: 341708 - DNA, 3797 bp, Homo sapiens
gacgaccaggcgcatcccgctggccatggagtcaaacagactgttgccatctgggtccagacacatgaacttgcagcactctttggggtccttgcggtactgttggcagccctggggcctctcacagagagcagccacacacatctcaggctcccctccttggaaggtcgctgggaggtggcattcaaaggctcttcagaggtgttcctgcccccagaccccatctttgcctcggccatgtctgagaacgacaacgtgttctgtgcccagcttcagtgcttccatttccccaccctgcggcaccacgacctccacagctggcacgccgagagctgctacgagaagtcttcatttctgtgtaaaagaagtcaaacatgtgttgacatcaaggacaacgtggtggatgaagggttctacttcacccctaagggggacgacccatgcctgagctgcacctgccatggaggggagcctgagatgtgtgtggctgctctctgtgagaggccccagggctgccaacagtaccgcaaggaccccaaagagtgctgcaagttcatgtgtctggacccagatggcaacagtctgtttgactccatggccagcgggatgcgcctggtcgtcagctgcatctcctccttcctcatcctgtcactgctgctcttcatggtccaccggctgcgccagcggcgccgggagcgcatcgagtccctgattggagcaaacttgcaccacttcaacctcggccgcaggatccctggctttgattacggcccagacgggtttggcacgggcctcacgccgctgcatctttctgacgacggagagggtgggactttccatttccacgaccctccacctccctacacggcatacaagtacccggacatcggccagcccgacgaccctccgccgccctacgaggcctccatccacccggacagtgtgttctatgaccctgcagacgatgatgcttttgagcctgtggaggtcagcctgccagcccctggggatggtgggagtgaaggtgcattactccggcgcctggagcagcctctgcccactgcgggggcctctctggcagacctggaagactctgccgacagcagcagcgccctgctcgtgccccctgaccctgcccagagcgggagcaccccagctgcagaggcactgccagggggtggccgccacagccgcagctccctcaatactgtggtgtagacggcctggcctgtaccccaacggtctgggagcacctgtctgttgtagaaaacaccggtccctggggagacttgaaaggcccctgtcccagcctggacgccacgcactgccgcacgtcactggcgggctcgcgtgtgtacatagagaccacagcccgccttctgccaaaagaagtgatggcctgcaccgagcttccttgagggcttcagaaacatgcatagctttggatcactgtcttctcctttataaatggcagaagagtgacaaaattcattcagaccgcacatgttagaggcagggaatgaagaaggtactgtgggccatggccacacctgatgcgtttttggtgggcttacttggtgcagtgtgctgtccagagagacctgctgacccagtctgggacaggcacagtgggagctgccacagtgccccttgctggccgccctcaggagggggcctctggaccgtcagtgtggcgtaggcagtgggtctgcttcagggaggcagcctcttgactttgtcacaacggttgcactgaagatggcccccacaagcccagttgtgaatatcaaggtgaccctgcccctggctgggagctcccctggggctctggaacctgaagccctgagaaggagagcttggaaggaggttgagctcttcactgtgtctttccatctgggctctgcagcccagctctgtggcaggaggcctgaccccaccccatcagtccctctcccagcattgctgtgcatggctccctcaggaagaagctctggagtggggccgaggccccagatgctctgctggggtctggggactgagctgcctcctgtctctccactctggagccctgggctcttgcctcctgttgaattgcccctgggcctgcccccggccccatttgtgccataaagggttgcttcattgcaggaggggtggctgaaaccaccatcctgggctgcatctatctccttaaagtccactccttacatcaccgccactactgcagctcagtgcccagcggccgcatgcacacctcccggcccctcctcagcagcgcaggggctgggggcccttcctggcacccttttgcctgacggaccctgttgcctgctcctgggcagtggttttgttgcctgacacagggcctttaacatttctgaggtttggagattaagcgggttctgtgcgatttttagcacatccatatcttttctacgttgaatgtctggatctttcctttgtatgtttgtgtctctgtgtgtgtatgtggccaagcgtctgcaggtgagggtggcacatggaacttcacgggtcactgggggcccactcttccagggtcatcgatgcatcctgggctgtgctgaggcagtgctgtctcgctcagtctttccagaccagcggggcagcacctgggaggcctgtctgaagcatgcagttctgtggtgctgctcggggatggactccatgcacagtccacttcttgacacattctcacactgtggctggagacccattttttccatcccatgtggaatgagaatcttgagttgcccacagacagacttgacctttgtgccagaactgtccagagctgtgagttttgttactgaattgcctgtccctgagcttggcctgctggagcatgatgctggaggctgtgtgcgggcaggcttgtgctccccttggagaagggctgctacttaacaaggaagtcctggccacaggagtcccctactggctgcagaggacgaagcaggaagcatgccgtggatcccacatgcactggggcagggcagccaggttccagagcagcaggcatgtgcattatgggtgccaggtggccagtgagggcccgaggaccacgcagcagagtcccccacgggcctgagcctgagagctcagaggattcctgccaggcctcagaactgtgtgtgcgggacagggtggctggcacgagatgtgtgggactgggacgcttcctttggggaccagaggaacattaggggccggtcagacacgtagggggcagtgaggaaacggggtaaagtggaccatgcaggctgcagagggtgggccttgggctggccggggttgctgggtggccccttccccatgggcctccacaagcactcaggccactggcacgttgggccaggcagaaggtccacatggcagggctgcctggaacaccgctgccactgtggctccaggaggcccttgggagcatgaggagagctggactcgctcatctgttcttgcaccaccatccagaatgccccctttgcaaggcctgctgcagtccccagtctgaccagcaagtcccggggtcacccttgctgaaccttgtgctccaggggtcctcctcctctaggaccagcttgccacggtttctcagagcccaggtgccctctgacctgccatgcggaggtgggatttgatactgtacattgtcttgatgcctgtttttttatgttttcattaagggtttttagtttttggttgggttgacactaacttttcttaagatgctgtgagaatcatttcatccaaatgccaaataaacttgtgttccggaa

SEQ ID NO: 341709 - DNA, 3159 bp, Homo sapiens
gttctagtgactgctggtcagtgtgtctcccctacctcacaccgatggtgggacaggcccgtgtctgcctttgtgagatgggccctgcaccttgcatataccaggttcccagccacagggggcagtaggtacaacaggtgtcatgtggggcaggctcctccttcaaaatctgaggcccgggggagccacccaggtcctgctcaccacccagcttcaggggggccttcaggcaggaggagtgtctcctggttttgcctagctcccctgcatcccctgtgccaggcccgtacctgcctctgacacccctctgtctcttcctgcagacgatgatgcttttgagcctgtggaggtcagcctgccagcccctggggatggtgggagtgaaggtgcattactccggcgcctggagcagcctctgcccactgcgggggcctctctggcagacctggaagactctgccgacagcagcagcgccctgctcgtgccccctgaccctgcccagagcgggagcaccccagctgcagaggcactgccagggggtggccgccacagccgcagctccctcaatactgtggtgtagacggcctggcctgtaccccaacggtctgggagcacctgtctgttgtagaaaacaccggtccctggggagacttgaaaggcccctgtcccagcctggacgccacgcactgccgcacgtcactggcgggctcgcgtgtgtacatagagaccacagcccgccttctgccaaaagaagtgatggcctgcaccgagcttccttgagggcttcagaaacatgcatagctttggatcactgtcttctcctttataaatggcagaagagtgacaaaattcattcagaccgcacatgttagaggcagggaatgaagaaggtactgtgggccatggccacacctgatgcgtttttggtgggcttacttggtgcagtgtgctgtccagagagacctgctgacccagtctgggacaggcacagtgggagctgccacagtgccccttgctggccgccctcaggagggggcctctggaccgtcagtgtggcgtaggcagtgggtctgcttcagggaggcagcctcttgactttgtcacaacggttgcactgaagatggcccccacaagcccagttgtgaatatcaaggtgaccctgcccctggctgggagctcccctggggctctggaacctgaagccctgagaaggagagcttggaaggaggttgagctcttcactgtgtctttccatctgggctctgcagcccagctctgtggcaggaggcctgaccccaccccatcagtccctctcccagcattgctgtgcatggctccctcaggaagaagctctggagtggggccgaggccccagatgctctgctggggtctggggactgagctgcctcctgtctctccactctggagccctgggctcttgcctcctgttgaattgcccctgggcctgcccccggccccatttgtgccataaagggttgcttcattgcaggaggggtggctgaaaccaccatcctgggctgcatctatctccttaaagtccactccttacatcaccgccactactgcagctcagtgcccagcggccgcatgcacacctcccggcccctcctcagcagcgcaggggctgggggcccttcctggcacccttttgcctgacggaccctgttgcctgctcctgggcagtggttttgttgcctgacacagggcctttaacatttctgaggtttggagattaagcgggttctgtgcgatttttagcacatccatatcttttctacgttgaatgtctggatctttcctttgtatgtttgtgtctctgtgtgtgtatgtggccaagcgtctgcaggtgagggtggcacatggaacttcacgggtcactgggggcccactcttccagggtcatcgatgcatcctgggctgtgctgaggcagtgctgtctcgctcagtctttccagaccagcggggcagcacctgggaggcctgtctgaagcatgcagttctgtggtgctgctcggggatggactccatgcacagtccacttcttgacacattctcacactgtggctggagacccattttttccatcccatgtggaatgagaatcttgagttgcccacagacagacttgacctttgtgccagaactgtccagagctgtgagttttgttactgaattgcctgtccctgagcttggcctgctggagcatgatgctggaggctgtgtgcgggcaggcttgtgctccccttggagaagggctgctacttaacaaggaagtcctggccacaggagtcccctactggctgcagaggacgaagcaggaagcatgccgtggatcccacatgcactggggcagggcagccaggttccagagcagcaggcatgtgcattatgggtgccaggtggccagtgagggcccgaggaccacgcagcagagtcccccacgggcctgagcctgagagctcagaggattcctgccaggcctcagaactgtgtgtgcgggacagggtggctggcacgagatgtgtgggactgggacgcttcctttggggaccagaggaacattaggggccggtcagacacgtagggggcagtgaggaaacggggtaaagtggaccatgcaggctgcagagggtgggccttgggctggccggggttgctgggtggccccttccccatgggcctccacaagcactcaggccactggcacgttgggccaggcagaaggtccacatggcagggctgcctggaacaccgctgccactgtggctccaggaggcccttgggagcatgaggagagctggactcgctcatctgttcttgcaccaccatccagaatgccccctttgcaaggcctgctgcagtccccagtctgaccagcaagtcccggggtcacccttgctgaaccttgtgctccaggggtcctcctcctctaggaccagcttgccacggtttctcagagcccaggtgccctctgacctgccatgcggaggtgggatttgatactgtacattgtcttgatgcctgtttttttatgttttcattaagggtttttagtttttggttgggttgacactaacttttcttaagatgctgtgagaatcatttcatccaaatgccaaataaacttgtgttccggaa

SEQ ID NO: 341710 - DNA, 3562 bp, Homo sapiens
aggcggggcggggcggcgcggcgcgggccgagcaggacggccgccatcttgcgcgcagctggagtcggtgcctgaggttgcagccgagagtgtgcgccagcccgcggcccagccgaagctctttcccgccgcctctccgcgcctcgcccaggttcagccccgcctgaccctccgcttggcacggtcccctgaccctcagtccggcccggtccggccttccagccgccccggggacgatgaacggaggataaatggtgcccaaggcagacagcggcgccttcctgctgctcttcctgctcgtgctcactgtcaccgagccgctgcggccagagctgcggtgcaaccctgggcagtttgcgtgtcgcagcggcaccatccagtgcatccccctcccctggcagtgtgacggctgggcgacttgcgaggatgagagcgacgaagccaactgtccagaagtgaccggggaggtgcgtcctcatcatgggaaggaggctgtggatccgcggcaggggcgggccagaggaggcgacccttcgcacttccacgcggtgaacgtggcgcagcccgttcgcttcagcagtttcctagggaagtgcccgacagggtggcaccactacgaaggcacggccagctgctaccgggtctacctgagcggggagaactactgggatgccgcgcagacctgccagcgcctgaatggctctctcgccaccttctccactgaccaggagctgcgctttgtcctggcccaggaatgggaccagcccgagcggagctttggttggaaggaccagcgcaagttgtgggttggctatcagtatgttatcactggccggaaccgctccttggaaggtcgctgggaggtggcattcaaaggctcttcagaggtgttcctgcccccagaccccatctttgcctcggccatgtctgagaacgacaacgtgttctgtgcccagcttcagtgcttccatttccccaccctgcggcaccacgacctccacagctggcacgccgagagctgctacgagaagtcttcatttctgtgtaaaagaagtcaaacatgtgttgacatcaaggacaacgtggtggatgaagggttctacttcacccctaagggggacgacccatgcctgagctgcacctgccatggaggggagcctgagatgtgtgtggctgctctctgtgagaggccccagggctgccaacagtaccgcaaggaccccaaagagtgctgcaagttcatgtgtctggacccagatggcaacagtctgtttgactccatggccagcgggatgcgcctggtcgtcagctgcatctcctccttcctcatcctgtcactgctgctcttcatggtccaccggctgcgccagcggcgccgggagcgcatcgagtccctgattggagcaaacttgcaccacttcaacctcggccgcaggatccctggctttgattacggcccagacgggtttggcacgggcctcacgccgctgcatctttctgacgacggagagggtgggactttccatttccacgaccctccacctccctacacggcatacaagtacccggacatcggccagcccgacgaccctccgccgccctacgaggcctccatccacccggacagtgtgttctatgaccctgcagacgatgatgcttttgagcctgtggaggtcagcctgccagcccctggggatggtgggagtgaaggtgcattactccggcgcctggagcagcctctgcccactgcgggggcctctctggcagacctggaagactctgccgacagcagcagcgccctgctcgtgccccctgaccctgcccagagcgggagcaccccagctgcagaggcactgccagggggtggccgccacagccgcagctccctcaatactgtggtgtagacggcctggcctgtaccccaacggtctgggagcacctgtctgttgtagaaaacaccggtccctggggagacttgaaaggcccctgtcccagcctggacgccacgcactgccgcacgtcactggcgggctcgcgtgtgtacatagagaccacagcccgccttctgccaaaagaagtgatggcctgcaccgagcttccttgagggcttcagaaacatgcatagctttggatcactgtcttctcctttataaatggcagaagagtgacaaaattcattcagaccgcacatgttagaggcagggaatgaagaaggtactgtgggccatggccacacctgatgcgtttttggtgggcttacttggtgcagtgtgctgtccagagagacctgctgacccagtctgggacaggcacagtgggagctgccacagtgccccttgctggccgccctcaggagggggcctctggaccgtcagtgtggcgtaggcagtgggtctgcttcagggaggcagcctcttgactttgtcacaacggttgcactgaagatggcccccacaagcccagttgtgaatatcaaggtgaccctgcccctggctgggagctcccctggggctctggaacctgaagccctgagaaggagagcttggaaggaggttgagctcttcactgtgtctttccatctgggctctgcagcccagctctgtggcaggaggcctgaccccaccccatcagtccctctcccagcattgctgtgcatggctccctcaggaagaagctctggagtggggccgaggccccagatgctctgctggggtctggggactgagctgcctcctgtctctccactctggagccctgggctcttgcctcctgttgaattgcccctgggcctgcccccggccccatttgtgccataaagggttgcttcattgcaggaggggtggctgaaaccaccatcctgggctgcatctatctccttaaagtccactccttacatcaccgccactactgcagctcagtgcccagcggccgcatgcacacctcccggcccctcctcagcagcgcaggggctgggggcccttcctggcacccttttgcctgacggaccctgttgcctgctcctgggcagtggttttgttgcctgacacagggcctttaacatttctgaggtttggagattaagcgggttctgtgcgatttttagcacatccatatcttttctacgttgaatgtctggatctttcctttgtatgtttgtgtctctgtgtgtgtatgtggccaagcgtctgcaggtgagggtggcacatggaacttcacgggtcactgggggcccactcttccagggtcatcgatgcatcaatgccccctttgcaaggcctgctgcagtccccagtctgaccagcaagtcccggggtcacccttgctgaaccttgtgctccaggggtcctcctcctctaggaccagcttgccacggtttctcagagcccaggtgccctctgacctgccatgcggaggtgggatttgatactgtacattgtcttgatgcctgtttttttatgttttcattaagggtttttagtttttggttgggttgacactaacttttcttaagatgctgtgagaatcatttcatccaaatgccaaataaacttgtgttccggaa

SEQ ID NO: 341711 - DNA, 2295 bp, Homo sapiens
aggcggggcggggcggcgcggcgcgggccgagcaggacggccgccatcttgcgcgcagctggagtcggtgcctgaggttgcagccgagagtgtgcgccagcccgcggcccagccgaagctctttcccgccgcctctccgcgcctcgcccaggttcagccccgcctgaccctccgcttggcacggtcccctgaccctcagtccggcccggtccggccttccagccgccccggggacgatgaacggaggataaatggtgcccaaggcagacagcggcgccttcctgctgctcttcctgctcgtgctcactgtcaccgagccgctgcggccagagctgcggtgcaaccctgggcagtttgcgtgtcgcagcggcaccatccagtgcatccccctcccctggcagtgtgacggctgggcgacttgcgaggatgagagcgacgaagccaactgtccagaagtgaccggggaggtgcgtcctcatcatgggaaggaggctgtggatccgcggcaggggcgggccagaggaggcgacccttcgcacttccacgcggtgaacgtggcgcagcccgttcgcttcagcagtttcctagggaagtgcccgacagggtggcaccactacgaaggcacggccagctgctaccgggtctacctgagcggggagaactactgggatgccgcgcagacctgccagcgcctgaatggctctctcgccaccttctccactgaccaggagctgcgctttgtcctggcccaggaatgggaccagcccgagcggagctttggttggaaggaccagcgcaagttgtgggttggctatcagtatgttatcactggccggaaccgctccttggaaggtcgctgggaggtggcattcaaaggctcttcagaggtgttcctgcccccagaccccatctttgcctcggccatgtctgagaacgacaacgtgttctgtgcccagcttcagtgcttccatttccccaccctgcggcaccacgacctccacagctggcacgccgagagctgctacgagaagtcttcatttctgtgtaaaagaagtcaaacatgtgttgacatcaaggacaacgtggtggatgaagggttctacttcacccctaagggggacgacccatgcctgagctgcacctgccatggaggggagcctgagatgtgtgtggctgctctctgtgagaggccccagggctgccaacagtaccgcaaggaccccaaagagtgctgcaagttcatgtgtctggacccaggtgagactcttgataggacgtcccaagtcagcctccctatttggggctggaggctgggcgtccctttgcttcctcagtggtgaggactcaggagagtttatggagcatcgcgcagcagcaatggcagcgtttgtcacagagatgtctcagagactttgatgccactactctagtgggcgtgtctgacacgacccctccagctgcctccttcccattctggggtgacaggcagcattcacaaatgaacttgaactcaagtgtggctgtttgttcacaagtcaccactgacagcttcaaacttgtcttcaaacttacgcctccagggtttaagccgttctcctgcctcagcctcaccagtagctggaactacaggcgcatgccaccatgcctggctagtttttgtatttttagtagagacggggtttcgccatgttgtccagaccaggtcttcaactcctggcctcgagtgatccacccacctcagcttcccaaagtgctgggattacaggcatgagccaccgcgtccagcctagacttctaatttatgtccacattggagctcttcctgttctctagtatgatgatatggagggtagtgacagttgtcattgcttacagtcatccatttttaccttagaatcttcgagaaaaagatgaagtattattctcagtttcgagatcagactcctcaccaccaggcgggggctttaaggtagacactacagggaatctgatctcagggtgatcctctcccttccacttgcaaaaagagaggagcaggtgggccactgctctctgagatgttaacacccctcacactccacgggcatgcttgtcattctgcacaccggtgtagctgcagctctgtgtgaattcagatctcaagagaaatgtaaatcaaaagtatgagtttctttctttcttgggtgccacagtaggaatgaaatgatggggacttttggaagcccctggacttgtggcccctgtagaagagcagcttgggcagggtgtgatggccatctctgtctctaggggccc

SEQ ID NO: 341712 - DNA, 960 bp, Homo sapiens
aggcggggcggggcggcgcggcgcgggccgagcaggacggccgccatcttgcgcgcagctggagtcggtgcctgaggttgcagccgagagtgtgcgccagcccgcggcccagccgaagctctttcccgccgcctctccgcgcctcgcccaggttcagccccgcctgaccctccgcttggcacggtcccctgaccctcagtccggcccggtccggccttccagccgccccggggacgatgaacggaggataaatggtgcccaaggcagacagcggcgccttcctgctgctcttcctgctcgtgctcactgtcaccgagccgctgcggccagagctgcggtgcaaccctgggcagtttgcgtgtcgcagcggcaccatccagtgcatccccctcccctggcagtgtgacggctgggcgacttgcgaggatgagagcgacgaagccaactgtccagaagtgaccggggaggtgcgtcctcatcatgggaaggaggctgtggatccgcggcaggggcgggccagaggaggcgacccttcgcacttccacgcggtgaacgtggcgcagcccgttcgcttcagcagtttcctagggaagtgcccgacagggtggcaccactacgaaggcacggccagctgctaccgggtctacctgagcggggagaactactgggatgccgcgcagacctgccagcgcctgaatggctctctcgccaccttctccactgaccaggagctgcgctttgtcctggcccaggaatgggaccagcccgagcggagctttggttggaaggaccagcgcaagtgagtcctggattggggacctgaggggctggagtcagagtctgatgactactgagcacatggcctctgaccactcagtaaactcctggagcacagctggcagacagcaggttgggaagaccagcctcgcccactggaagcccaggagatccatgggtagg

SEQ ID NO: 341713 - DNA, 1315 bp, Homo sapiens
aggcggggcggggcggcgcggcgcgggccgagcaggacggccgccatcttgcgcgcagctggagtcggtgcctgaggttgcagccgagagtgtgcgccagcccgcggcccagccgaagctctttcccgccgcctctccgcgcctcgcccaggttcagccccgcctgaccctccgcttggcacggtcccctgaccctcagtccggcccggtccggccttccagccgccccggggacgatgaacggaggataaatggtgcccaaggcagacagcggcgccttcctgctgctcttcctgctcgtgctcactgtcaccgagccgctgcggccaggtgcgccgcgcgatgggggcggtgtgggggctgggcggcgagcggggccggggtcgccccgggacctcctttcacccgcggcgccctcctgcaggggccgcgcctggggcaggggcgggcggggcctggctcgcgggccgcctggcactctctgcggacgcctgctggagcttacctgggctcgcggcgcctcggacttcgtgcagctctgctgtccaggatgttgcctctgggcccttcccgggagcggcggcggccaggagctacgccacgggcgcaccctctcgccagtccagcgtcggagtcgggctggggacagtggctctcaggggcacctggtttcacagacgtcctcccagcagtggcctagtgccagcctctcagtcctggaaactcctcgcctggacagcggtggttgtggctgtcattcagtgagacgttgcgcctaaggaagtcctcaggtcccaccgggcctagaggaggcaccaggagtcagcctagcgttgtgtggccggcgcgagcgtcccgggagcagagacctcgccactgtgcggggcccttagccgtgctgcgtgtatgtgatgaatgagtccgtgctttggaactcccctcggagctagtgtgttcttaagtctgtggtggggaatcagaaccgtggcaaccaggagacccttttctacctatttcggtgtacctccccttgaactgcaccaaaaaatcaaactccctaaatgcagggccgatgtatccatcaggcacaggaatcctggtatcacttgcccacggtacttttagtagccttcgaatgttattttatttttttttaaagtcagcagaaaaaaaatgaacttttaggtcaaataaaatgttttcgtatgtatattaatacagtcatctttatactaatacagtgaaaaagcatgactcttaatatttcttaatggaggaaaggtcccatgaaggcagaagtgccagggccatcttc

SEQ ID NO: 341714 - DNA, 422 bp, Homo sapiens
taatattttgaaaggagtatttttcttctgagcagcaggtctcaacagtggttttaaaatattcagtaaaccatgctgttaaacagatgtgctgtcatacaggctttgttgttctatttgtggagaacaggcaaagtagatttagtataattcttaaggcccttaggatttttacaatggtcaataagcattggcttaaactcaaagtcaccagctgtattagcccctaacaagagagtcagcctatcctttgaagccaggcactgacttctcctctctcgttatgaaagtcctagatggcatcttcttccaatagatggctgtttcacctacactgaaaatctgctgtttagggtagtcaccttcaccaactatcttaactaaatctgggtaagtaacttgctgtagttctccatcagtac

SEQ ID NO: 341715 - DNA, 598 bp, Homo sapiens
caacagagttggtaggtttaccctggtctccagagaagataaacactcgtttcctgctctacactatacacaatcccaatgcctatcagcaaatcccacatctggtttgggccctatcagcagagaacactataatcagaacatcgcttgagagcccagtggttaagcacctaacttcaaaggccatgtggatttgaactctggctccaggattcattagctgcagtactttttggagatcagtgcggttaattcttcaactatccaagcctcatattttggaacagacaagatcacccgtatcaacatagctggatggaaaacagatggcaaatggcagagagacatgtgcaatgtatgacatgaataagctcctttttacactagcatgcgagctttatgtttaacatgaatgtactttgcaaggtattgatgtatattcatggaaatcttccattcagttatccacaattatccgtgttctggggcctcaaattagttatccatttcccatttatttttattataaattgcacagattacaagggaagcaaatttgtataatcactcttgaataaattcttctcttgacaggaga

SEQ ID NO: 341716 - DNA, 2798 bp, Homo sapiens
cttcctttccccctttgctttcttccccctccgctgttggcgagggcaaagtggccgtggcggcgccatgcccgggccggagtgagtgcgcgcgggcgaaaatggcgtacatccagttggaaccattaaacgagggttttctttctagaatctctggtctgctgctgtgcagatggacctgccggcactgctgtcagaagtgctacgagtccagctgttgccagtcaagtgaggatgaagttgaaattctgggacctttccctgctcagacccctccctggctgatggccagccggagcagtgacaaggatggtgactctgtccacacggccagcgaagtcccgctgaccccacggaccaattccccggatggaagacgctcgtcctcagacacatccaagtctacatacagcctgacgcggaggatttcgagtcttgagtcaagacgtcccagctctccactcatcgatattaaacccatcgagtttggcgttctcagcgccaagaaggagcccatccaaccttcggtgctcagacggacctataaccccgacgactatttcaggaagttcgaaccccacctgtactccctcgactccaacagcgacgatgtggactctctgacagacgaggagatcctgtccaagtaccagctgggcatgctgcacttcagcactcagtacgacctgctgcacaaccacctcaccgtgcgcgtgatcgaggccagggacctgccacctcccatctcccacgatggctcgcgccaggacatggcgcactccaacccctacgtcaagatctgtctcctgccagaccagaagaactcaaagcagaccggggtcaaacgcaagacccagaagcccgtgtttgaggagcgctacaccttcgagatccccttcctggaggcccagaggaggaccctgctcctgaccgtggtggattttgataagttctcccgccactgtgtcattgggaaagtttctgtgcctttgtgtgaagttgacctggtcaagggcgggcactggtggaaggcgctgattcccagttctcagaatgaagtggagctgggggagctgcttctgtcactgaattatctcccaagtgctggcagactgaatgttgatgtcattcgagccaagcaacttcttcagacagatgtgagccaaggttcagacccctttgtgaaaatccagctggtgcatggactcaaacttgtgaaaaccaagaagacgtccttcttaaggggcacaattgatcctttctacaatgaatccttcagcttcaaagttccccaagaagaactggaaaatgccagcctagtgtttacagttttcggccacaacatgaagagcagcaatgacttcatcgggaggatcgtcattggccagtactcttcaggcccctctgagaccaaccactggaggcgcatgctcaacacgcaccgcacagccgtggagcagtggcatagcctgaggtcccgagctgagtgtgaccgcgtgtctcctgcctccctggaggtgacctgagggctgcagggaaggcagctttcatttgtttaaaaaaaaaaaaaaaaaaagacggaaaaaaatgtgtcacatactattacatccacacctgcatacacactcgcaacatgtctacacacgtccacacacacagacacacagataccccaaatcctctcagaactgagaggaagctgactattgatcacaaaatggccgccctcagttgagtgaggcctaggaactttccggaagccccatccatagatcacaagctcagtgggctctgccgtgggacttattggcagtgcctgctcttgtcaatactcctgccccaaaatgcactttcaaccctcaggccagagaaaggacctcccaaagggtgccaagctccatcaagactaaatttaccaagagtttggccagtgtgtgggagacttgaacaccccccacttccgaaacacacacctactgggtaacttctgaacaggctgctgttccctggggttcttcaaacctgatacctttctccaaaggtgtaagtatctttgtcttctccgtagtaaatgtgataactagattatgggccatttggagaaaccaaatggcaaccaaaactattccagtgtcagaagcctttcctggcttaacagaattgttcttgtgttagctcatcccagggaacgccctgtgggtatgtatgtgtatgtcctcgtgcatgtgccctcacaggtgaacacgtgtgtgcctatgtgtcctcttggagagcatggcgatgggccaggacctcagccctgagcactgccttctctctgcctctcctgtccagtgagagtccaaccagtgtcctcctgtctgtcagagatcccactttggataaaagtagtgtgtgtgtgtgtgtgtgtgtgtgtgtgtgtgtgtaaagtaaataggatatgatagagcaaaagtaacattttttgaccgaatcatggtgattgtgacccacgaaagacatacaaagacttgatatatggattaaaatggctatcacaccccatccatgatgatcttcttccttaatcatactctgaggatctttctgtgtttttctgtgaacgaatgtcacgtctctcgtgctaaggaattagtgtagttagaatagatctctctctctctctctttctctctctctctttcctctctctctgttggatgcttctgtatctttttccacagcataatgtctggtgtgatggggagctatttattgaaattaaagattatttatttgtgccatgcattcgagttatc

SEQ ID NO: 341717 - DNA, 2885 bp, Homo sapiens
agcggctcctggaagtgtggctgcattggatagcatgactatctatccgcccgctctgattcataacagcatacggtgcaaatcaaatcgaaatgctaaagtttcccatttatttggtgttggttaaccaggaggctaccagcagacctgaaaatagcaacaccttgttaggatgttaggaagtcagctcccttcccaggatgttggaaccattaaacgagggttttctttctagaatctctggtctgctgctgtgcagatggacctgccggcactgctgtcagaagtgctacgagtccagctgttgccagtcaagtgaggatgaagttgaaattctgggacctttccctgctcagacccctccctggctgatggccagccggagcagtgacaaggatggtgactctgtccacacggccagcgaagtcccgctgaccccacggaccaattccccggatggaagacgctcgtcctcagacacatccaagtctacatacagcctgacgcggaggatttcgagtcttgagtcaagacgtcccagctctccactcatcgatattaaacccatcgagtttggcgttctcagcgccaagaaggagcccatccaaccttcggtgctcagacggacctataaccccgacgactatttcaggaagttcgaaccccacctgtactccctcgactccaacagcgacgatgtggactctctgacagacgaggagatcctgtccaagtaccagctgggcatgctgcacttcagcactcagtacgacctgctgcacaaccacctcaccgtgcgcgtgatcgaggccagggacctgccacctcccatctcccacgatggctcgcgccaggacatggcgcactccaacccctacgtcaagatctgtctcctgccagaccagaagaactcaaagcagaccggggtcaaacgcaagacccagaagcccgtgtttgaggagcgctacaccttcgagatccccttcctggaggcccagaggaggaccctgctcctgaccgtggtggattttgataagttctcccgccactgtgtcattgggaaagtttctgtgcctttgtgtgaagttgacctggtcaagggcgggcactggtggaaggcgctgattcccagttctcagaatgaagtggagctgggggagctgcttctgtcactgaattatctcccaagtgctggcagactgaatgttgatgtcattcgagccaagcaacttcttcagacagatgtgagccaaggttcagacccctttgtgaaaatccagctggtgcatggactcaaacttgtgaaaaccaagaagacgtccttcttaaggggcacaattgatcctttctacaatgaatccttcagcttcaaagttccccaagaagaactggaaaatgccagcctagtgtttacagttttcggccacaacatgaagagcagcaatgacttcatcgggaggatcgtcattggccagtactcttcaggcccctctgagaccaaccactggaggcgcatgctcaacacgcaccgcacagccgtggagcagtggcatagcctgaggtcccgagctgagtgtgaccgcgtgtctcctgcctccctggaggtgacctgagggctgcagggaaggcagctttcatttgtttaaaaaaaaaaaaaaaaaaagacggaaaaaaatgtgtcacatactattacatccacacctgcatacacactcgcaacatgtctacacacgtccacacacacagacacacagataccccaaatcctctcagaactgagaggaagctgactattgatcacaaaatggccgccctcagttgagtgaggcctaggaactttccggaagccccatccatagatcacaagctcagtgggctctgccgtgggacttattggcagtgcctgctcttgtcaatactcctgccccaaaatgcactttcaaccctcaggccagagaaaggacctcccaaagggtgccaagctccatcaagactaaatttaccaagagtttggccagtgtgtgggagacttgaacaccccccacttccgaaacacacacctactgggtaacttctgaacaggctgctgttccctggggttcttcaaacctgatacctttctccaaaggtgtaagtatctttgtcttctccgtagtaaatgtgataactagattatgggccatttggagaaaccaaatggcaaccaaaactattccagtgtcagaagcctttcctggcttaacagaattgttcttgtgttagctcatcccagggaacgccctgtgggtatgtatgtgtatgtcctcgtgcatgtgccctcacaggtgaacacgtgtgtgcctatgtgtcctcttggagagcatggcgatgggccaggacctcagccctgagcactgccttctctctgcctctcctgtccagtgagagtccaaccagtgtcctcctgtctgtcagagatcccactttggataaaagtagtgtgtgtgtgtgtgtgtgtgtgtgtgtgtgtgtgtaaagtaaataggatatgatagagcaaaagtaacattttttgaccgaatcatggtgattgtgacccacgaaagacatacaaagacttgatatatggattaaaatggctatcacaccccatccatgatgatcttcttccttaatcatactctgaggatctttctgtgtttttctgtgaacgaatgtcacgtctctcgtgctaaggaattagtgtagttagaatagatctctctctctctctctttctctctctctctttcctctctctctgttggatgcttctgtatctttttccacagcataatgtctggtgtgatggggagctatttattgaaattaaagattatttatttgtgccatgcattcgagttatc

SEQ ID NO: 341718 - DNA, 2044 bp, Homo sapiens
gcatcgggctcttacaagaaaggaaatgaggcctgtttatttgtgacatcgcttccacaagggacgaggtagaagtgggcctgtcacccagttccttctcctgtcttggcttcgattctgtgggggttggataggacagggggtggaacatcgtgctgacaacccctctcggcccgtggtgtggcagcagctcagcctctgtgttgggggctgcactgcttgatcttggatttgtttctggtgctgtgaatatagtagtggacacatgggcactttctttgcctttatggagaaaaagaatgaagtggagctgggggagctgcttctgtcactgaattatctcccaagtgctggcagactgaatgttgatgtcattcgagccaagcaacttcttcagacagatgtgagccaaggttcagacccctttgtgaaaatccagctggtgcatggactcaaacttgtgaaaaccaagaagacgtccttcttaaggggcacaattgatcctttctacaatgaatccttcagcttcaaagttccccaagaagaactggaaaatgccagcctagtgtttacagttttcggccacaacatgaagagcagcaatgacttcatcgggaggatcgtcattggccagtactcttcaggcccctctgagaccaaccactggaggcgcatgctcaacacgcaccgcacagccgtggagcagtggcatagcctgaggtcccgagctgagtgtgaccgcgtgtctcctgcctccctggaggtgacctgagggctgcagggaaggcagctttcatttgtttaaaaaaaaaaaaaaaaaaagacggaaaaaaatgtgtcacatactattacatccacacctgcatacacactcgcaacatgtctacacacgtccacacacacagacacacagataccccaaatcctctcagaactgagaggaagctgactattgatcacaaaatggccgccctcagttgagtgaggcctaggaactttccggaagccccatccatagatcacaagctcagtgggctctgccgtgggacttattggcagtgcctgctcttgtcaatactcctgccccaaaatgcactttcaaccctcaggccagagaaaggacctcccaaagggtgccaagctccatcaagactaaatttaccaagagtttggccagtgtgtgggagacttgaacaccccccacttccgaaacacacacctactgggtaacttctgaacaggctgctgttccctggggttcttcaaacctgatacctttctccaaaggtgtaagtatctttgtcttctccgtagtaaatgtgataactagattatgggccatttggagaaaccaaatggcaaccaaaactattccagtgtcagaagcctttcctggcttaacagaattgttcttgtgttagctcatcccagggaacgccctgtgggtatgtatgtgtatgtcctcgtgcatgtgccctcacaggtgaacacgtgtgtgcctatgtgtcctcttggagagcatggcgatgggccaggacctcagccctgagcactgccttctctctgcctctcctgtccagtgagagtccaaccagtgtcctcctgtctgtcagagatcccactttggataaaagtagtgtgtgtgtgtgtgtgtgtgtgtgtgtgtgtgtgtaaagtaaataggatatgatagagcaaaagtaacattttttgaccgaatcatggtgattgtgacccacgaaagacatacaaagacttgatatatggattaaaatggctatcacaccccatccatgatgatcttcttccttaatcatactctgaggatctttctgtgtttttctgtgaacgaatgtcacgtctctcgtgctaaggaattagtgtagttagaatagatctctctctctctctctttctctctctctctttcctctctctctgttggatgcttctgtatctttttccacagcataatgtctggtgtgatggggagctatttattgaaattaaagattatttatttgtgccatgcattcgagttatc

SEQ ID NO: 341719 - DNA, 1631 bp, Homo sapiens
tcaccaagaaaaggaaaaagacagcgtgccctaaacgatgacccccatgtttgcagttgacaaatgtgtagactaatggcctcttgtcttctccctgccttcctgttctgttcccctccttcctcttgcctccctcctgccctcaaccctctggctccctagttttcggccacaacatgaagagcagcaatgacttcatcgggaggatcgtcattggccagtactcttcaggcccctctgagaccaaccactggaggcgcatgctcaacacgcaccgcacagccgtggagcagtggcatagcctgaggtcccgagctgagtgtgaccgcgtgtctcctgcctccctggaggtgacctgagggctgcagggaaggcagctttcatttgtttaaaaaaaaaaaaaaaaaaagacggaaaaaaatgtgtcacatactattacatccacacctgcatacacactcgcaacatgtctacacacgtccacacacacagacacacagataccccaaatcctctcagaactgagaggaagctgactattgatcacaaaatggccgccctcagttgagtgaggcctaggaactttccggaagccccatccatagatcacaagctcagtgggctctgccgtgggacttattggcagtgcctgctcttgtcaatactcctgccccaaaatgcactttcaaccctcaggccagagaaaggacctcccaaagggtgccaagctccatcaagactaaatttaccaagagtttggccagtgtgtgggagacttgaacaccccccacttccgaaacacacacctactgggtaacttctgaacaggctgctgttccctggggttcttcaaacctgatacctttctccaaaggtgtaagtatctttgtcttctccgtagtaaatgtgataactagattatgggccatttggagaaaccaaatggcaaccaaaactattccagtgtcagaagcctttcctggcttaacagaattgttcttgtgttagctcatcccagggaacgccctgtgggtatgtatgtgtatgtcctcgtgcatgtgccctcacaggtgaacacgtgtgtgcctatgtgtcctcttggagagcatggcgatgggccaggacctcagccctgagcactgccttctctctgcctctcctgtccagtgagagtccaaccagtgtcctcctgtctgtcagagatcccactttggataaaagtagtgtgtgtgtgtgtgtgtgtgtgtgtgtgtgtgtgtaaagtaaataggatatgatagagcaaaagtaacattttttgaccgaatcatggtgattgtgacccacgaaagacatacaaagacttgatatatggattaaaatggctatcacaccccatccatgatgatcttcttccttaatcatactctgaggatctttctgtgtttttctgtgaacgaatgtcacgtctctcgtgctaaggaattagtgtagttagaatagatctctctctctctctctttctctctctctctttcctctctctctgttggatgcttctgtatctttttccacagcataatgtctggtgtgatggggagctatttattgaaattaaagattatttatttgtgccatgcattcgagttatc

SEQ ID NO: 341720 - DNA, 1480 bp, Homo sapiens
agcggctcctggaagtgtggctgcattggatagcatgactatctatccgcccgctctgattcataacagcatacggtgcaaatcaaatcgaaatgctaaagtttcccatttatttggtgttggttaaccaggaggctaccagcagacctgaaaatagcaacaccttgttaggatgttaggaagtcagctcccttcccaggatgttggaaccattaaacgagggttttctttctagaatctctggtctgctgctgtgcagatggacctgccggcactgctgtcagaagtgctacgagtccagctgttgccagtcaagtgaggatgaagttgaaattctgggacctttccctgctcagacccctccctggctgatggccagccggagcagtgacaaggatggtgactctgtccacacggccagcgaagtcccgctgaccccacggaccaattccccggatggaagacgctcgtcctcagacacatccaagtctacatacagcctgacgcggaggatttcgagtcttgagtcaagacgtcccagctctccactcatcgatattaaacccatcgagtttggcgttctcagcgccaagaaggagcccatccaaccttcggtgctcagacggacctataaccccgacgactatttcaggaagttcgaaccccacctgtactccctcgactccaacagcgacgatgtggactctctgacagacgaggagatcctgtccaagtaccagctgggcatgctgcacttcagcactcagtacgacctgctgcacaaccacctcaccgtgcgcgtgatcgaggccagggacctgccacctcccatctcccacgatggctcgcgccaggacatggcgcactccaacccctacgtcaagatctgtctcctgccagaccagaagaactcaaagcagaccggggtcaaacgcaagacccagaagcccgtgtttgaggagcgctacaccttcgagatccccttcctggaggcccagaggaggaccctgctcctgaccgtggtggattttgataagttctcccgccactgtgtcattgggaaagtttctgtgcctttgtgtgaagttgacctggtcaagggcgggcactggtggaaggcgctgattcccagttctcagaatgaagtggagctgggggagctgcttctgtcactgaattatctcccaagtgctggcagactgaatgttgatgtcattcgagccaagcaacttcttcagacagatgtgagccaaggttcagctggtgcatggactcaaacttgtgaaaaccaagaagacgtccttcttaaggggcacaattgatcctttctacaatgaatccttcagcttcaaagttccccaagaagaactggaaaatgccagcctagtgtttacaggatccaacagccccataccagcctgcgaactgagtagtcacccagctcatggtatcagtccttggataccctcacctggaaatg

SEQ ID NO: 341721 - DNA, 374 bp, Homo sapiens
gctcattggtacaaaggaccgttgaacctttgtttggtgttttgggtagacaaaatatgaaggtttcagactctttggttcaggccctggttggtgtttctggccatgcatggtctgttattggagtcattgggataacctggagtcactgggggctccatactttcatccaggtcgtcttgtcttgctcactcccttgtccccagcagattcaccaagtcctctttttgctctaggatccaacagccccataccagcctgcgaactgagtagtcacccagctcatggtatcagtccttggataccctcacctggaaatgaacatttccatggcataaagaagcaagtaaaggcaataaaagtagaatgattga

SEQ ID NO: 341722 - DNA, 2527 bp, Homo sapiens
cttcctttccccctttgctttcttccccctccgctgttggcgagggcaaagtggccgtggcggcgccatgcccgggccggagtgagtgcgcgcgggcgaaaatggcgtacatccagttggaaccattaaacgagggttttctttctagaatctctggtctgctgctgtgcagatggacctgccggcactgctgtcagaagtgctacgagtccagctgttgccagtcaagtgaggatgaagttgaaattctgggacctttccctgctcagacccctccctggctgatggccagccggagcagtgacaaggatggtgactctgtccacacggccagcgaagtcccgctgaccccacggaccaattccccggatggaagacgctcgtcctcagacacatccaagtctacatacagcctgacgcggaggatttcgagtcttgagtcaagacgtcccagctctccactcatcgatattaaacccatcgagtttggcgttctcagcgccaagaaggagcccatccaaccttcggtgctcagacggacctataaccccgacgactatttcaggaagttcgaaccccacctgtactccctcgactccaacagcgacgatgtggactctctgacagacgaggagatcctgtccaagtaccagctgggcatgctgcacttcagcactcagtacgacctgctgcacaaccacctcaccgtgcgcgtgatcgaggccagggacctgccacctcccatctcccacgatggctcgcgccaggacatggcgcactccaacccctacgtcaagatctgtctcctgccagaccagaagaactcaaagcagaccggggtcaaacgcaagacccagaagcccgtgtttgaggagcgctacaccttcgagatccccttcctggaggcccagaggaggaccctgctcctgaccgtggtggattttgataagttctcccgccactgtgtcattgggaaagtttctgtgcctttgtgtgaagttgacctggtcaagggcgggcactggtggaaggcgctgattcccagttctcagaatgaagtggagctgggggagctgcttctgtcactgaattatctcccaagtgctggcagactgaatgttgatgtcattcgagccaagcaacttcttcagacagatgtgagccaaggttcagacccctttgtgaaaatccagctggtgcatggactcaaacttgtgaaaaccaagaagacgtccttcttaaggggcacaattgatcctttctacaatgaatccttcagcttcaaagttccccaagaagaactggaaaatgccagcctagtgtttacagttttcggccacaacatgaagagcagcaatgacttcatcgggaggatcgtcattggccagtactcttcaggcccctctgagaccaaccactggaggcgcatgctcaacacgcaccgcacagccgtggagcagtggcatagcctgaggtcccgagctgagtgtgaccgcgtgtctcctgcctccctggaggtgacctgagggctgcagggaaggcagctttcatttgtttaaaaaaaaaaaaaaaaaaagacggaaaaaaatgtgtcacatactattacatccacacctgcatacacactcgcaacatgtctacacacgtccacacacacagacacacagataccccaaatcctctcagaactgagaggaagctgactattgatcacaaaatggccgccctcagttgagtgaggcctaggaactttccggaagccccatccatagatcacaagctcagtgggctctgccgtgggacttattggcagtgcctgctcttgtcaatactcctgccccaaaatgcactttcaaccctcaggccagagaaaggacctcccaaagggtgccaagctccatcaagactaaatttaccaagagtttggccagtgtgtgggagacttgaacaccccccacttccgaaacacacacctactgggtaacttctgaacaggctgctgttccctggggttcttcaaacctgatacctttctccaaaggtgtaagtatctttgtcttctccgtagtaaatgtgataactagattatgggccatttggagaaaccaaatggcaaccaaaactattccagtgtcagaagcctttcctggcttaacagaattgttcttgtgttagctcatcccagggaacgccctgtgggtatgtatgtgtatgtcctcgtgcatgtgccctcacaggtgaacacgtgtgtgcctatgtgtcctcttggagagcatggcgatgggccaggacctcagccctgagcactgccttctctctgcctctcctgtccagtgagagtccaaccagtgtcctcctgtctgtcagagatcccactttggataaaagtagtgtgtgtgtgtgtgtgtgtgtgtgtgtgtttttactaggaataaagaggcttaattttttgaccgatcaggtgatgtgaccagaagaattcaagactgatttggttacagggattaaccacagagtatccttcagg

SEQ ID NO: 341723 - DNA, 2741 bp, Homo sapiens
ctaggcgaggcctggcgtgttatatcggacgagggcgggcgaaaatggcgtacatccagttggaaccattaaacgagggttttctttctagaatctctggtctgctgctgtgcagatggacctgccggcactgctgtcagaagtgctacgagtccagctgttgccagtcaagtgaggatgaagttgaaattctgggacctttccctgctcagacccctccctggctgatggccagccggagcagtgacaaggatggtgactctgtccacacggccagcgaagtcccgctgaccccacggaccaattccccggatggaagacgctcgtcctcagacacatccaagtctacatacagcctgacgcggaggatttcgagtcttgagtcaagacgtcccagctctccactcatcgatattaaacccatcgagtttggcgttctcagcgccaagaaggagcccatccaaccttcggtgctcagacggacctataaccccgacgactatttcaggaagttcgaaccccacctgtactccctcgactccaacagcgacgatgtggactctctgacagacgaggagatcctgtccaagtaccagctgggcatgctgcacttcagcactcagtacgacctgctgcacaaccacctcaccgtgcgcgtgatcgaggccagggacctgccacctcccatctcccacgatggctcgcgccaggacatggcgcactccaacccctacgtcaagatctgtctcctgccagaccagaagaactcaaagcagaccggggtcaaacgcaagacccagaagcccgtgtttgaggagcgctacaccttcgagatccccttcctggaggcccagaggaggaccctgctcctgaccgtggtggattttgataagttctcccgccactgtgtcattgggaaagtttctgtgcctttgtgtgaagttgacctggtcaagggcgggcactggtggaaggcgctgattcccagttctcagaatgaagtggagctgggggagctgcttctgtcactgaattatctcccaagtgctggcagactgaatgttgatgtcattcgagccaagcaacttcttcagacagatgtgagccaaggttcagacccctttgtgaaaatccagctggtgcatggactcaaacttgtgaaaaccaagaagacgtccttcttaaggggcacaattgatcctttctacaatgaatccttcagcttcaaagttccccaagaagaactggaaaatgccagcctagtgtttacagttttcggccacaacatgaagagcagcaatgacttcatcgggaggatcgtcattggccagtactcttcaggcccctctgagaccaaccactggaggcgcatgctcaacacgcaccgcacagccgtggagcagtggcatagcctgaggtcccgagctgagtgtgaccgcgtgtctcctgcctccctggaggtgacctgagggctgcagggaaggcagctttcatttgtttaaaaaaaaaaaaaaaaaaagacggaaaaaaatgtgtcacatactattacatccacacctgcatacacactcgcaacatgtctacacacgtccacacacacagacacacagataccccaaatcctctcagaactgagaggaagctgactattgatcacaaaatggccgccctcagttgagtgaggcctaggaactttccggaagccccatccatagatcacaagctcagtgggctctgccgtgggacttattggcagtgcctgctcttgtcaatactcctgccccaaaatgcactttcaaccctcaggccagagaaaggacctcccaaagggtgccaagctccatcaagactaaatttaccaagagtttggccagtgtgtgggagacttgaacaccccccacttccgaaacacacacctactgggtaacttctgaacaggctgctgttccctggggttcttcaaacctgatacctttctccaaaggtgtaagtatctttgtcttctccgtagtaaatgtgataactagattatgggccatttggagaaaccaaatggcaaccaaaactattccagtgtcagaagcctttcctggcttaacagaattgttcttgtgttagctcatcccagggaacgccctgtgggtatgtatgtgtatgtcctcgtgcatgtgccctcacaggtgaacacgtgtgtgcctatgtgtcctcttggagagcatggcgatgggccaggacctcagccctgagcactgccttctctctgcctctcctgtccagtgagagtccaaccagtgtcctcctgtctgtcagagatcccactttggataaaagtagtgtgtgtgtgtgtgtgtgtgtgtgtgtgtgtgtgtaaagtaaataggatatgatagagcaaaagtaacattttttgaccgaatcatggtgattgtgacccacgaaagacatacaaagacttgatatatggattaaaatggctatcacaccccatccatgatgatcttcttccttaatcatactctgaggatctttctgtgtttttctgtgaacgaatgtcacgtctctcgtgctaaggaattagtgtagttagaatagatctctctctctctctctttctctctctctctttcctctctctctgttggatgcttctgtatctttttccacagcataatgtctggtgtgatggggagctatttattgaaattaaagattatttatttgtgccatgcattcgagttatc

SEQ ID NO: 341724 - DNA, 2734 bp, Homo sapiens
ctaaattggggaatatttcttcatatcatttcacattttgtgcaaaaagcaagacgttgttgagagtttaaggacaccacactgtcaaatttgcattattccatgttgcataaaatgagtctgagagcggtttcatcgtgggtcttaacccccaagggacagagatgccagtccccggggattcctggacagctactgagacctcttcccttcctataggatggccagccggagcagtgacaaggatggtgactctgtccacacggccagcgaagtcccgctgaccccacggaccaattccccggatggaagacgctcgtcctcagacacatccaagtctacatacagcctgacgcggaggatttcgagtcttgagtcaagacgtcccagctctccactcatcgatattaaacccatcgagtttggcgttctcagcgccaagaaggagcccatccaaccttcggtgctcagacggacctataaccccgacgactatttcaggaagttcgaaccccacctgtactccctcgactccaacagcgacgatgtggactctctgacagacgaggagatcctgtccaagtaccagctgggcatgctgcacttcagcactcagtacgacctgctgcacaaccacctcaccgtgcgcgtgatcgaggccagggacctgccacctcccatctcccacgatggctcgcgccaggacatggcgcactccaacccctacgtcaagatctgtctcctgccagaccagaagaactcaaagcagaccggggtcaaacgcaagacccagaagcccgtgtttgaggagcgctacaccttcgagatccccttcctggaggcccagaggaggaccctgctcctgaccgtggtggattttgataagttctcccgccactgtgtcattgggaaagtttctgtgcctttgtgtgaagttgacctggtcaagggcgggcactggtggaaggcgctgattcccagttctcagaatgaagtggagctgggggagctgcttctgtcactgaattatctcccaagtgctggcagactgaatgttgatgtcattcgagccaagcaacttcttcagacagatgtgagccaaggttcagacccctttgtgaaaatccagctggtgcatggactcaaacttgtgaaaaccaagaagacgtccttcttaaggggcacaattgatcctttctacaatgaatccttcagcttcaaagttccccaagaagaactggaaaatgccagcctagtgtttacagttttcggccacaacatgaagagcagcaatgacttcatcgggaggatcgtcattggccagtactcttcaggcccctctgagaccaaccactggaggcgcatgctcaacacgcaccgcacagccgtggagcagtggcatagcctgaggtcccgagctgagtgtgaccgcgtgtctcctgcctccctggaggtgacctgagggctgcagggaaggcagctttcatttgtttaaaaaaaaaaaaaaaaaaagacggaaaaaaatgtgtcacatactattacatccacacctgcatacacactcgcaacatgtctacacacgtccacacacacagacacacagataccccaaatcctctcagaactgagaggaagctgactattgatcacaaaatggccgccctcagttgagtgaggcctaggaactttccggaagccccatccatagatcacaagctcagtgggctctgccgtgggacttattggcagtgcctgctcttgtcaatactcctgccccaaaatgcactttcaaccctcaggccagagaaaggacctcccaaagggtgccaagctccatcaagactaaatttaccaagagtttggccagtgtgtgggagacttgaacaccccccacttccgaaacacacacctactgggtaacttctgaacaggctgctgttccctggggttcttcaaacctgatacctttctccaaaggtgtaagtatctttgtcttctccgtagtaaatgtgataactagattatgggccatttggagaaaccaaatggcaaccaaaactattccagtgtcagaagcctttcctggcttaacagaattgttcttgtgttagctcatcccagggaacgccctgtgggtatgtatgtgtatgtcctcgtgcatgtgccctcacaggtgaacacgtgtgtgcctatgtgtcctcttggagagcatggcgatgggccaggacctcagccctgagcactgccttctctctgcctctcctgtccagtgagagtccaaccagtgtcctcctgtctgtcagagatcccactttggataaaagtagtgtgtgtgtgtgtgtgtgtgtgtgtgtgtgtgtgtaaagtaaataggatatgatagagcaaaagtaacattttttgaccgaatcatggtgattgtgacccacgaaagacatacaaagacttgatatatggattaaaatggctatcacaccccatccatgatgatcttcttccttaatcatactctgaggatctttctgtgtttttctgtgaacgaatgtcacgtctctcgtgctaaggaattagtgtagttagaatagatctctctctctctctctttctctctctctctttcctctctctctgttggatgcttctgtatctttttccacagcataatgtctggtgtgatggggagctatttattgaaattaaagattatttatttgtgccatgcattcgagttatc

SEQ ID NO: 341725 - DNA, 1500 bp, Homo sapiens
agcggctcctggaagtgtggctgcattggatagcatgactatctatccgcccgctctgattcataacagcatacggtgcaaatcaaatcgaaatgctaaagtttcccatttatttggtgttggttaaccaggaggctaccagcagacctgaaaatagcaacaccttgttaggatgttaggaagtcagctcccttcccaggatgttggaaccattaaacgagggttttctttctagaatctctggtctgctgctgtgcagatggacctgccggcactgctgtcagaagtgctacgagtccagctgttgccagtcaagtgaggatgaagttgaaattctgggacctttccctgctcagacccctccctggctgatggccagccggagcagtgacaaggatggtgactctgtccacacggccagcgaagtcccgctgaccccacggaccaattccccggatggaagacgctcgtcctcagacacatccaagtctacatacagcctgacgcggaggatttcgagtcttgagtcaagacgtcccagctctccactcatcgatattaaacccatcgagtttggcgttctcagcgccaagaaggagcccatccaaccttcggtgctcagacggacctataaccccgacgactatttcaggaagttcgaaccccacctgtactccctcgactccaacagcgacgatgtggactctctgacagacgaggagatcctgtccaagtaccagctgggcatgctgcacttcagcactcagtacgacctgctgcacaaccacctcaccgtgcgcgtgatcgaggccagggacctgccacctcccatctcccacgatggctcgcgccaggacatggcgcactccaacccctacgtcaagatctgtctcctgccagaccagaagaactcaaagcagaccggggtcaaacgcaagacccagaagcccgtgtttgaggagcgctacaccttcgagatccccttcctggaggcccagaggaggaccctgctcctgaccgtggtggattttgataagttctcccgccactgtgtcattgggaaagtttctgtgcctttgtgtgaagttgacctggtcaagggcgggcactggtggaaggcgctgattcccagttctcagaatgaagtggagctgggggagctgcttctgtcactgaattatctcccaagtgctggcagactgaatgttgatgtcattcgagccaagcaacttcttcagacagatgtgagccaaggttcagacccctttgtgaaaatccagctggtgcatggactcaaacttgtgaaaaccaagaagacgtccttcttaaggggcacaattgatcctttctacaatgaatccttcagcttcaaagttccccaagaagaactggaaaatgccagcctagtgtttacaggatccaacagccccataccagcctgcgaactgagtagtcacccagctcatggtatcagtccttggataccctcacctggaaatg

SEQ ID NO: 341726 - DNA, 742 bp, Homo sapiens
ctgttagaagagggagacgtgtctgggactgctggggaaataggaaacttgtctctgaactactgaatcccagaaaagaggacatgtccccagggaggtttgctgggggaaggacgggcatgtctaggcccttgggacattaggcctgctcttaccaggggctgataaaaggatgtggatgtggtaattgaataagggcttttgggagaaaagatttgccccaaggttgggagactgagaacgagggtgttggactgacaggcgggtgccttgtcgtgggatcttgggggaagtaaggatctgtgtggagcttctctgttgagttctaggtccgctagtaggaagacattctgggaattggtgaagagaggagatttaatagtcttttcttgggacacagtgattccagaagttgtagttgaggaaagttggttggaagtgttgaactgtatacagtcagtggagaaaggaggagctctactgtgaaggttgctaggctacaaagagcttgtaggcaacgcctagggctgttgagagaagttggtaatgctttcaagtccaaatacaggctgagctggggcttgtcccttgttcatgtcatgctgctgtggagctcttacgtttccagtagtctatcttgagcaaagagtatgaataggtgctgaggactaaggaaaacattcactctttgggtcctgagatgcattagacccagatctctagggtggtagctttcaaactt

SEQ ID NO: 341727 - DNA, 689 bp, Homo sapiens
ctgttagaagagggagacgtgtctgggactgctggggaaataggaaacttgtctctgaactactgaatcccagaaaagaggacatgtccccagggaggtttgctgggggaaggacgggcatgtctaggcccttgggacattaggcctgctcttaccaggggctgataaaaggatgtggatgtggtaattgaataagggcttttgggaggcgggtgccttgtcgtgggatcttgggggaagtaaggatctgtgtggagcttctctgttgagttctaggtccgctagtaggaagacattctgggaattggtgaagagaggagatttaatagtcttttcttgggacacagtgattccagaagttgtagttgaggaaagttggttggaagtgttgaactgtatacagtcagtggagaaaggaggagctctactgtgaaggttgctaggctacaaagagcttgtaggcaacgcctagggctgttgagagaagttggtaatgctttcaagtccaaatacaggctgagctggggcttgtcccttgttcatgtcatgctgctgtggagctcttacgtttccagtagtctatcttgagcaaagagtatgaataggtgctgaggactaaggaaaacattcactctttgggtcctgagatgcattagacccagatctctagggtggtagctttcaaactt

SEQ ID NO: 341728 - DNA, 249 bp, Homo sapiens
ctgtgtagaggggaattgtataaatctacccactttgaagacctaagtgtgtaatcaaggggtgtttattggaaaatttatattaagtaactgataacctgggattttgattaatttgtgtcttagaaacattatgactaagaaactagagacaagtccttgttcatttgtaagattcctaagtgtatctcatatctttccaaatgttcttgactcttgattttaaagtcccatttatctcaaccattt

SEQ ID NO: 341729 - DNA, 450 bp, Homo sapiens
caagaaacagctgccacctaaaatttataatcaacaatagaaagaaaaatagagattttttaaaaacgggaattccgtagaagcaggtatactgtaatatagggaacagatggaaaaaaagtaagttacactctcagggaggtgagatgaaattaagagcaatctgtgaataagaaggagctttagaaaattaaaaaatatgatagcccaagtaaaaatttcagtacatactagggaagacagtaaaaggacactgccagagattgacctagagagagggagatggaacatgggagagaaaaaataagattagaggattatcaggcagttgaacattcaacttacagaagttcagaaaggagagcagagcaaagtgagggcagaaaattatcaagtagcttaagaacatgtagatatagaagagtgcacttttgcaaaagtgcacttttg

SEQ ID NO: 341730 - DNA, 254 bp, Homo sapiens
cattttcacccactgaactggcaaaatgttgtaactgtattaccttatgaagcaagaatgtagttgaaaagattcaacacagctgttagtagaattggtacctcttttctgatgcctgtctggtggacaatcaggcagtataaatcaaaagcttgaaactagttcttgccattggagtcataattccacttttcagaattttatattgagggaataatcagagatgtaaataaagatttttgtacaaggatgtt

SEQ ID NO: 341731 - DNA, 530 bp, Homo sapiens
agtcacaattttatgctcaggatgaacaaggcacccacggcagggtttgaagctgctgccgggagcaaaaccgcccaccatctggtgtaccctgagagcttccgggagctgggggacaatgtcagcatggtcctggtgcccttaaagaccatgaacttggagtgggtggtgagcaccaccaccacgggtgccatttcccacacctacaccccggtcctcgtgaagatcagagtgaaacaggataagatcctgatctaccacccagccttcatcaagtatgtcttcgacaactggctgcagagccacaggcggtacccactcaccagcatcctctcggtcatcttctcaatgcatgtctgcgattaggtagacttgtatagcttctgagcagatagcaaagggaactgacaccactactgggagaacaacctgtctgcggggtcttttcacaagacgggggtgcacgatgcaggctttgagtctaacgtgacggccaccttggcttcatgaataaaatccggatcttcaag

SEQ ID NO: 341732 - DNA, 186 bp, Homo sapiens
tcaaatacttagaaacagagaaatcaaataagtagaaatagaatagagcagtcattaccagggatgggggttgagtgaggagaaggggaagggatgaggagaggtaggtcaaaagatagcaagttgcaattacaaaggatgactaagtctaaagatcaaatatacagcatgaggactatagttgaa

SEQ ID NO: 341733 - DNA, 519 bp, Homo sapiens
agtttaaaagactgaaaatattaagtgtgtgggaatgtagagcaactggaaatggcctacatctttcatagaaatgtaaaacaatacaaatactttgcaaaactctgtccaacattttctacccattcaccaagcaactccatccctagctatagatacccaggaaaataagtatgtatcttcacagaaataattgtatgagaatattcatagttacttatgcacagtagttatcaagtaaacctgtctcccatcagaaaaatggatatcaaattgtgtgataatcatacaatcaataggatattacttggccaaaacaaaatgaaacaagggaaaaacacaatcaaacaaattagtggcatatatacccacctgagtaaagagaagtcggccgggcgcggtggctcacgcctgtaatcccagcactttgggaggctgaggcggcagatcacgaggtcaggagatcgagaccatcgtggctaacacagtgaaaccccgtctctactaaaaatacaaaaa

SEQ ID NO: 341734 - DNA, 426 bp, Homo sapiens
atttgagggagaaatgggaaagaaaaagagtagatgcactgggaatatgaaccatctgttcatacaatctacctgcttattcacaacctgcttgaggcttatctcttatagactgcttcttttgataatggagtatgattgcacttgttcaactttattatttggtacattagataacacccactttaggtctgatgatcacttgatgttctttggtcaaaatttaagtctctaaaagtaaaaggtaggtaaaaataaaccaaggtaaactgaggtaaaagtaaaccaagagcattttttccaaaggagattagctaatgtgtgaagaagacatagccctactccaaagcactggaggcctgtattggagtgtaccagaggtactctacagcatttgaatctgctgtacacactttaagtaccttt

SEQ ID NO: 341735 - DNA, 290 bp, Homo sapiens
aaacccaggcaaaacaaccttacatggtcaatagaatttttaattgcaaagatttcctctgacgtgagtgttaatgaatgtcaaagcaataacataaaaagacattacttgtttaatgattgatagaataagaaaaacacaaggtcttttgtcagataaatgactactgtttggtgttcctttacctcaggagtatcaaaagtgatctcagataggcaataatagcccaggagctaaggcagcaagtatgatgtagcctgttagattataaccaaaggaggaaggctaat

SEQ ID NO: 341736 - DNA, 381 bp, Homo sapiens
tcagcagaaatgcagtataaacttggatataaaaactctcaaattacagagtcaagctctggaatagaaaaaaagagtaatgctagaaattataaaaacaccatgaccatgtgacatgaaaaagaagcagtagaacatgggactgaaatggtaggaaccagatgatcacaatgagtttagatttttaaaggtaagaaaagagctgatgtaagaaacaactgtcctctgacctggggacaattagatccagcaatttaagtaaggagattataaaaaataggtataatttaggagatgtcagcaaatctaaatactggcagtgatcttacaaatagtgatcagaaaatacatactgcacatttttgttaggcttaaagtgac

SEQ ID NO: 341737 - DNA, 192 bp, Homo sapiens
acaaccaagcctcaggacacaacacatggaggcctggcaggggtctgagggcgagggaacagcagtcgaattctggcaggaagagggcatcctactctcagatcccaagcgtagtccaattcttgggcatctttccaaggaagagctcatcccacccacttcctagatacagctagcttgagagtggaacac

SEQ ID NO: 341738 - DNA, 384 bp, Homo sapiens
tagagacagggtttcaccatgttggccaggccggtctcaaactcctgagctccaccttactggctaacgctgctctccctgagcctcgatgttgaagtgtccaggtcagcggttcacattcattgttcatccgtcaccaccgtccatctccagaaccttttcatcttccccaacggctgctctgtgcccatgaaacactccctcctcatcctcctgcccctggcacccccattctactttctgtccccataagtttgactgccctggggacctcatacaagtggaatcagacagtgtttgtccccttgtgcctggcatgtcgtatgttgcagatttttttatggtgaaaagatatacatatatttagaattagccagccggact

SEQ ID NO: 341739 - DNA, 371 bp, Homo sapiens
acgggaacctcagtcttacagcttgaagcaactgtagtctgccaacaatcacgtgatcttggaagcgaactcaagctctaggaaggaatgcagcctgaccaatgccttgattgcagctttgcagggaacccagattagccacatctggactcctggcatgtggacactgtgagttaataaatatttgctgttgtaaatcacctagtttgtggcaatttgttacccagcaatacaaaactaatacactatttgttttatctgtatatctaaatttttattctctatttcttgtcctggcatcaaaacatacatagcttataaactcgagataaacaggattgtttttgtttttgttcttgtttgtttggcct

SEQ ID NO: 341740 - DNA, 92 bp, Homo sapiens
acccacagaaacagtaagataataaatgtttgttgttttagggtaactttgtgcaattttaagctaactttgtgcataacaacataaaatag

SEQ ID NO: 341741 - DNA, 515 bp, Homo sapiens
gaatttggagtcatgggaatgggcaggtgttcaggtgatttaaaaggagaagtaaaggcatgttcctggataaatgtcgatatgcattattaaatgaaacagtggtaaaatatagactgtcagaagcatttttcttccagagacatgaggagaattgaaatgcagtttcaaaggaggagtctctttcggtgtttcttcaatcatttttttgtttgaagctttaattacagtgctccttgctacctaatgctttcagtttaaaatgacatcacaaaagagaggggaagatgtaattgctcagatgaagggcagccatcacagcagcattgaggtatttactcaccagggagttcctgctacatgattcttttctagatcaacattttgtttttggaatgcttttgtatcatgcatatttgacatggtttgtctttagagtgattgctctgatactgctattgccagagcagataataaccttcgggaaataatgtattctgaaataaaggaactag

SEQ ID NO: 341742 - DNA, 294 bp, Homo sapiens
gtcattatcagcacaaggacagacaaacagtccagtggaactaaaaagagaatccaaacatgtatggacacctgatttatgacaaagttggcacagtaaagcagtagggagaagatgaccttttcaatagatgtggatgggttattagatatctatatggagaaaatgaaatttaacccctctagccacacataaaaatcagctacaggtaaatcgtaaatctaatgtgagaggtaaccaattaagtgtctataaaataatacaggaaaatgttttcataagctttggagtagg

SEQ ID NO: 341743 - DNA, 553 bp, Homo sapiens
ttcacttccaactatgtggtcaattttggaataaatgcgatgtggtgctgagaagaatgtatattttgttgatctggggtggagagttctgtagatgtctattaggtccacttggtgcagagctgagttcaattcctggatatccttgttaactttctgtctcgttgatctgtctaatgttgacagtgggatgttaacgtctcccattattattgtgtgggaatctaagtctctttgtagggaatccttttttttttttctgagactgggtcttaaaaaaggaaacaaaaaccagaacaaaacaaaacaaaacaaaaagtaaaaaaacaaaactccattaattttcaaataaaggaagaggcaaagttattcaaagcgaacaaaaagacaacgggaatgggggttaaaaaaaaatcattaaataagacccagaacaccagtggtaaaggtgtaattcttaatgaagagaacataggtttgaatgtgtacaccacagatagcatatcatgaacatttaaaaaggcaaaactatgcaggggggtgaggaactaga

SEQ ID NO: 341744 - DNA, 345 bp, Homo sapiens
gcaaggattgaatcttattcccttatcctctgtgtctaggccagtgtctcatttgattattcagaaaacaactgataaactgatgggaactctcacaattattatgaatatcaaacaaacagatttgaatgtgccttgcaaattatgaagtataaaaattaagaggtcttaaagtgtttaatttcttagttatgagcataaagaccattctaaagatttccataatttatcaaatattcaaaggctcttaagtgttccatgcatattttaaacatataggctccagtggaatgaaattctgctcaactgcctattataaagtgtcttggccttgccatttatata

SEQ ID NO: 341745 - DNA, 173 bp, Homo sapiens
taaagccaaactccagagtgttcagggagactcaactagtcgtcttattgagttaaagtaaaagaaagaaaagaaaaaataaacagaatagggtaaaatgaaaactttggaaagatgtgaaaagatagattttaactaatgtgattgtaattgtgccatcactgagtacacag

SEQ ID NO: 341746 - DNA, 514 bp, Homo sapiens
tgtgtgtgtgtgtgtgtgtgtatctgagtatgttttgaggggtatttggttgtgcttaggaatgtgtttgtgattatagtttgggttttagatgcttgtgttttgggttgcatgcatatttatgtgttcatatgtgtgcatgttgagttgtatacacttgtgtgttttggcgcttgtgtgaatttatgtgtttttagccaatgatctccagggtctcccttagttgtgtcattccagaagtctgccctggggcccctgctgcagggagcacctagaagggatgctgggcaatggcagtggggatggaatggactcaagagcaggtgggagcagcgtcctgtctggtctagggccacctgggagagggcaggggcatctcaagtgtccccatcacacctgccctgtcagtgcaatgatctcagcctcaggagtgggggtccagtaggagccatgtcctgggggcccagccccagggccttcttggaagccttcagcagagaagaaaccgcccccg

SEQ ID NO: 341747 - DNA, 791 bp, Homo sapiens
ctcgtgatctgcccgcctgggcctcccaaagtgcttggattagaggcgtgagccaccgtgccgggccgcagcttagggtaatgtttttaaaggaacttagtgatcatttttctgtcttgaagactcatatagtcaagttggagttataccaactatggcatgatgtaacgttaccttttagagacaatttggttgtttcctgaggtatgaaaactgcagtctgctcttcagtgtgcacgctccttgcccaacaaaaccatcggcattcttgaaagttctgcctgagtatagcacctttattcctgtggaggtatagtgcattctaactaccatgaatagtgtccactgtgatcatttccctctgcacgattatctgcccacaactgagagagtcttaacttgctagaataatggggacgcttcactatctgtcagtttcccaatatggcaattcagttcattgtatgacagcatcatcagaatgttgccaagatcataaaaatagcagtgcatgttgcctgatgattttacagtgcatattgtcatggccagggcttagaggtaggggaaaaacatgtggacagctttgtgacaagagtctctcttatagtgtttctttctaaagtaactttttctgagtatgaatgtgaaaggtagccttctttgaattaaaaaatattctgaaaaatgtttaatgtctgagctgacttgagcatttttctttagtgattactgtaataatcagaaatttcttcacctttcaagaggacaaaagggaacaactataatta

SEQ ID NO: 341748 - DNA, 327 bp, Homo sapiens
ctctcttaaaagagttcggttttacgttttgtgctgttaccttttggaatttaattatttagtattttaatgtactttattggagataaagatggattatttatttatttatttatttattttctttttgagacggagtcttgctctgtagcccaggctggagtgcagtggcatgatttcggctcattgcaacctccacctcccgggtcctggttcaagcaattctcctgcctcctgagtagctgggattataggcacgtgccaccatgcccagctaatttttgtattttgggtagagatggggtttcaccatgttggccaggcagg

SEQ ID NO: 341749 - DNA, 461 bp, Homo sapiens
ccaaaggtcggccaccatgaagcccatgggcccagagggagtacccggtagtttcaggccgctcgcttatcttccttttaaagagaccttgaggcaccagtcctgcctccaaacgaaatcctattcggcgctaccctctctggaggagcccattcttaccctgcactaacaactgcacgggacttaacgactccaccacccaccaactcctccaaaagggagagacacagccaaagcatcccactggggcgttctctttcgcacacggacgctcccgcactccccctactttctggatctgtgcttgtgaaaggctccatggtcttgcctccttgcaggtagagaatgccaaagataatgaagatagtattctacaaagagaaattcctgccagacaatcccgaagaagatttcggaaaatttaacgtaaggctctgttgccgtgcaagtggaccggaatt

SEQ ID NO: 341750 - DNA, 6082 bp, Homo sapiens
ccccgcgcagacttgtctccggccagtcgcgcgtgggtagaggccttaggcgggcgttgcgaagggttgtttgctagagttcggaccttgttacggcgcgaagttccctccttggggcgggggaaaggtaccgcacccgctacctagtgtgaatgaactgtggcgtgggctgctaagggcaggctgcggagtacccgggccgtggccatgaactcacccgtggaccctggcgctaggcaggcgttgaggaagaagccacccgagcggactcccgaggacttaaatactatttattcttatcttcatggaatggaaatattatcaaatctcagggaacatcagcttagattaatgtctgcaagagcacgctatgagagatacagtggcaatcaggttctcttttgttcagaaacgattgccagatgttggtatatcctactttctggatctgtgcttgtgaaaggctccatggtcttgcctccttgcagttttggtaagcagtttggaggaaaaagaggatgtgattgtcttgtattagagccttcagaaatgattgtggtagagaatgccaaagataatgaagatagtattctacaaagagaaattcctgccagacaatcccgaagaagatttcggaaaattaactataaaggagagcgccaaaccattactgatgatgtggaggttaacagctatctttctcttccagctgatcttaccaagatgcatctcacagaaaaccctcatccacaggtgactcatgtgtcttctagtcagtctggttgtagcattgccagtgactctggaagcagcagtttatctgatatctatcaggctacggagagtgaggtaggagatgtagatttgacacgtcttccagaaggacctgttgattctgaggatgacgaagaggaagatgaagagattgatcgaacagatccattgcaggggcgagatcttgttcgagaatgtcttgaaaaagaacctgcagacaaaactgatgatgacattgaacaattgctggagtttatgcaccagctccctgcatttgcaaacatgaccatgtctgtaaggagagaactctgctcagtgatgatttttgaagtggtagagcaggctggagctattattcttgaagatgggcaagagcttgactcatggtatgttattttaaacggcactgtggaaatcagtcatccagatggaaaagttgaaaatttgtttatgggaaatagttttggaattactcccactctggataagcagtacatgcatggaattgtcaggactaaagtagatgattgtcagtttgtctgcatagcccagcaagattattggagaattttaaaccatgtggaaaaaaatacccataaagttgaggaagagggagaaattgttatggtacatgagcatcgggaactagaccggagtggaaccaggaaaggacacattgtgatcaaggcaacacctgagcgtctcataatgcatttaatagaagaacattccatcgtggatccaacttatatagaagattttctattaacttacaggacatttcttgaaagtcctttggatgttgggatcaaactattggaatggtttaagatcgacagcttaagagataaggtgacacggattgtattattatgggtaaataatcattttaatgattttgaaggtgaccctgctatgactcgatttctagaggaatttgaaaaaaatctggaagatacaaagatgaatggtcatctccggttattgaatattgcctgtgctgcaaaggctaagtggagacaggttgtgctgcaaaaggcttcccgcgagtcccctctacaattcagccttaatggagggagtgagaagggatttggtatttttgttgaaggagtagaacctggtagcaaagctgctgattcaggactgaaacgtggtgatcagattatggaagtaaatggacaaaactttgagaatattacatttatgaaagccgttgaaattttgaggaataatactcatcttgcacttactgtgaagaccaacatttttgtgttcaaagagttactttttaggactgaacaagagaaatctggtgttcctcatattcccaaaattgctgaaaaaaaaagtaatcgccattctatccagcatgtgccaggagatattgaacagacatcacaggagaaaggaagtaagaaagttaaagcaaatactgtttcaggtggaagaaacaaaatcaggaagattttggataaaacacgatttagtatcttgcctccaaagctatttagtgatggaggcctaagccaatcacaagatgacagcattgtgggaacaaggcactgtaggcatagtctggctataatgcccatccctggaacactctcatccagcagccctgatctcctgcagcctaccaccagtatgttggatttttccaatccttcagatatccctgatcaagttataagagttttcaaagtggatcagcaaagttgctacattatcatcagtaaagacaccacagctaaagaagtagtttttcatgctgttcatgaatttggtttgaccggtgcatccgacacatattctctctgtgaagtttctgttactcctgagggtgtcataaaacagagaagacttccagatcagttctccaaattagctgatagaattcaactcaatggaaggtattacttaaaaaataacatggaaacagaaaccttatgttcagatgaagatgctcaagaactagttaaggaaagccagctatccatgctgcagctcagtaccattgaggtggccacccagctgtcaatgagggactttgatttgtttcgtaatattgaaccgactgagtacatcgatgacctttttaagttaaattccaaaacaggaaatactcatttgaagaggtttgaggacattgtaaaccaagagacattctgggttgcctcagaaattttaactgaagcaaatcagctcaaacgaatgaagattattaagcattttattaaaattgcacttcattgtcgagaatgtaagaacttcaattccatgtttgcaataataagtggcttgaacctggcatctgtagcaagactcagaggaacttgggaaaagttaccaagcaaatacgagaaacatcttcaagatctacaagacatttttgatccatctagaaacatggcaaagtatagaaatattcttagtagtcaaagtatgcagcctccaattattccactcttccctgttgtcaagaaagatatgacatttctacatgaaggaaatgactccaaagtagatggtttagtaaactttgagaagttaagaatgatttccaaggaaatccgccaagttgttcgaatgacttctgctaacatggacccagctatgatgtttcgacagaggaagaagaggtggcggagtctggggtcactgagtcaaggaagcacaaattcaaacatgctggatgttcagggaggtgctcacaaaaaaagggcacgccgcagctctctgcttaatgccaagaagctatatgaggatgcccaaatggcaaggaaggtgaagcagtatctttccagtctcgatgtagagacagatgaggagaagttccagatgatgtcattacagtgggagcctgcatatggtaccttgaccaagaatttaagtgagaaaagatcagccaaatcatctgaaatgtctccagtgcctatgaggtcagctggccaaacaactaaagcccacttgcatcaaccccacagagtaagccaggtgcttcaggtgccagctgttaatttgcaccccatcaggaagaagggacaaacaaaagaccctgcactgaatacaagtttacctcagaaagttttaggaacaactgaagaaataagtggtaagaagcatacagaagacactatttctgtggcgtcatctttacattctagtcctcctgcatctcctcaaggctcccctcacaaaggttacacacttattccatcagctaaatctgacaacttgtctgactccagccatagtgagatttcttcacggtccagcatcgtgagcaattgttctgttgactccatgtctgcagctctacaggatgaacggtgttcctctcaggccctggcagtccctgaatccactggggcattggaaaagacagagcacgcttcagggataggagatcatagtcaacatggccctgggtggacactcttgaagccatctctaatcaagtgtttagctgtctcatcgtctgtgagcaatgaagagatttctcaagagcatatcattatagaagcagctgacagtggtcgtggaagttggacttcgtgttcaagcagctcccatgacaacttccaaagccttccaaacccaaaaagctgggattttttgaactcttacagacatacccatttggatgaccccattgctgaagttgaacccactgactctgagccctattcctgttctaaaagctgctctagaacttgtgggcagtgtaaaggaagcctagagagaaagagttggacctcctccagttctctgtctgacacgtatgaaccaaactatgggacagttaaacggagagtattggagagcaccccagctgagtcatctgaaggcttggaccccaaggatgccactgacccagtttataaaactgtcacttcaagtacagaaaagggcttgattgaaaatgaacaagtttcagcagtctagcctttggatgacctatttgaaaaccactgaaagtcgtggaggaatgggcaagaaccacctcatgattctgcaggccattgctaacgaacagctcattgctacaaccagtccagaggttttattccctctactccgagcaatgaaatagacctgagttatgcttcctttcatttaatttctgcagataaatagtttcctgagcaatggatgctatgcctggataccagtctccactttgcacgccggaactgccttgggaccacagttacagaaaaaatgtaaactcagagtgatccttgtgtatattgctatagatttttctttaacaagctattttaaagataatggcattattatttccaagccatagcttgggctgaaggacaaattgaaattgtctgccaataccaaggatattcttgtatatttgaaaaataacttattatttgaattgttgtggttttgtttgtatttgagagctcttgttagctgatattcatgtttgaggtcataaaattgtctctggtctgaccaaacagaagtcatctttacagaggtgatatgcttgatctacacagagatgtgacttgatctgtagcaccaatgcaatgtagggtctcagtttgagagaaataggaagccctttgcagttgaggtgttaggaacctgctggtcatggtgtggaaggccaaatgaagctgccacagggtttcttgtcagtcctttgggaaatgggagggagtagtttggggaggagggtgggaaccctaatttccacagaatgaaattttgatgttaaatgacatgtatacaaattcttccttaagtgaaagttatgctgcatcgaattgtaactgaaagtatagatccaacaaatagagactgggttctagagagttctggtctatagaaacccaaaactaaaatctctcataactcaagtatggaatactttttttaaagaaattcttatcatgggtgttgtaataatgaagacgaatttgactttatgcagtgttctgcagcatgcctcccccacatctcatagcaccaggttgtgtctgacctgacataccctgcagctctcagctggctgcagtaacattttgtgggagaaagaggagctggagttacagaaatgattgtctcttggttctcagtttttagcccttgagaggacatacttttccagcctcatgggtatggcactcttaattaaaatttcagtgactgtttactggatgaggcagatttttcacatttttgcaaattaaatatattttatatatattaagtttaattttttcagtttttttaatgtaaaagcaagtgaaattttaataaacttctgtaattacca

SEQ ID NO: 341751 - DNA, 6260 bp, Homo sapiens
ccccgcgcagacttgtctccggccagtcgcgcgtgggtagaggccttaggcgggcgttgcgaagggttgtttgctagagttcggaccttgttacggcgcgaagttccctccttggggcgggggaaaggtaccgcacccgctacctagtgtgaatgaactgtggcgtgggctgctaagggcaggctgcggagtacccgggccgtggccatgaactcacccgtggaccctggcgctaggcaggcgttgaggaagaagccacccgagcggactcccgaggacttaaatactatttattcttatcttcatggaatggaaatattatcaaatctcagggaacatcagcttagattaatgtctgcaagagcacgctatgagagatacagtggcaatcaggttctcttttgttcagaaacgattgccagatgttggtatatcctactttctggatctgtgcttgtgaaaggctccatggtcttgcctccttgcagttttggtaagcagtttggaggaaaaagaggatgtgattgtcttgtattagagccttcagaaatgattgtggtagagaatgccaaagataatgaagatagtattctacaaagagaaattcctgccagacaatcccgaagaagatttcggaaaattaactataaaggagagcgccaaaccattactgatgatgtggaggttaacagctatctttctcttccagctgatcttaccaagatgcatctcacagaaaaccctcatccacaggtgactcatgtgtcttctagtcagtctggttgtagcattgccagtgactctggaagcagcagtttatctgatatctatcaggctacggagagtgaggtaggagatgtagatttgacacgtcttccagaaggacctgttgattctgaggatgacgaagaggaagatgaagagattgatcgaacagatccattgcaggggcgagatcttgttcgagaatgtcttgaaaaagaacctgcagacaaaactgatgatgacattgaacaattgctggagtttatgcaccagctccctgcatttgcaaacatgaccatgtctgtaaggagagaactctgctcagtgatgatttttgaagtggtagagcaggctggagctattattcttgaagatgggcaagagcttgactcatggtatgttattttaaacggcactgtggaaatcagtcatccagatggaaaagttgaaaatttgtttatgggaaatagttttggaattactcccactctggataagcagtacatgcatggaattgtcaggactaaagtagatgattgtcagtttgtctgcatagcccagcaagattattggagaattttaaaccatgtggaaaaaaatacccataaagttgaggaagagggagaaattgttatggtacatgagcatcgggaactagaccggagtggaaccaggaaaggacacattgtgatcaaggcaacacctgagcgtctcataatgcatttaatagaagaacattccatcgtggatccaacttatatagaagattttctattaacttacaggacatttcttgaaagtcctttggatgttgggatcaaactattggaatggtttaagatcgacagcttaagagataaggtgacacggattgtattattatgggtaaataatcattttaatgattttgaaggtgaccctgctatgactcgatttctagaggaatttgaaaaaaatctggaagatacaaagatgaatggtcatctccggttattgaatattgcctgtgctgcaaaggctaagtggagacaggttgtgctgcaaaaggcttcccgcgagtcccctctacaattcagccttaatggagggagtgagaagggatttggtatttttgttgaaggagtagaacctggtagcaaagctgctgattcaggactgaaacgtggtgatcagattatggaagtaaatggacaaaactttgagaatattacatttatgaaagccgttgaaattttgaggaataatactcatcttgcacttactgtgaagaccaacatttttgtgttcaaagagttactttttaggactgaacaagagaaatctggtgttcctcatattcccaaaattgctgaaaaaaaaagtaatcgccattctatccagcatgtgccaggagatattgaacagacatcacaggagaaaggaagtaagaaagttaaagcaaatactgtttcaggtggaagaaacaaaatcaggaagattttggataaaacacgatttagtatcttgcctccaaagctatttagtgatggaggcctaagccaatcacaagatgacagcattgtgggaacaaggcactgtaggcatagtctggctataatgcccatccctggaacactctcatccagcagccctgatctcctgcagcctaccaccagtatgttggatttttccaatccttcagatatccctgatcaagttataagagttttcaaagtggatcagcaaagttgctacattatcatcagtaaagacaccacagctaaagaagtagtttttcatgctgttcatgaatttggtttgaccggtgcatccgacacatattctctctgtgaagtttctgttactcctgagggtgtcataaaacagagaagacttccagatcagttctccaaattagctgatagaattcaactcaatggaaggtattacttaaaaaataacatggaaacagaaaccttatgttcagatgaagatgctcaagaactagttaaggaaagccagctatccatgctgcagctcagtaccattgaggtggccacccagctgtcaatgagggactttgatttgtttcgtaatattgaaccgactgagtacatcgatgacctttttaagttaaattccaaaacaggaaatactcatttgaagaggtttgaggacattgtaaaccaagagacattctgggttgcctcagaaattttaactgaagcaaatcagctcaaacgaatgaagattattaagcattttattaaaattgcacttcattgtcgagaatgtaagaacttcaattccatgtttgcaataataagtggcttgaacctggcatctgtagcaagactcagaggaacttgggaaaagttaccaagcaaatacgagaaacatcttcaagatctacaagacatttttgatccatctagaaacatggcaaagtatagaaatattcttagtagtcaaagtatgcagcctccaattattccactcttccctgttgtcaagaaagatatgacatttctacatgaaggaaatgactccaaagtagatggtttagtaaactttgagaagttaagaatgatttccaaggaaatccgccaagttgttcgaatgacttctgctaacatggacccagctatgatgtttcgacagaggaagaagaggtggcggagtctggggtcactgagtcaaggaagcacaaattcaaacatgctggatgttcagggaggtgctcacaaaaaaagggcacgccgcagctctctgcttaatgccaagaagctatatgaggatgcccaaatggcaaggaaggtgaagcagtatctttccagtctcgatgtagagacagatgaggagaagttccagatgatgtcattacagtgggagcctgcatatggtaccttgaccaagaatttaagtgagaaaagatcagccaaatcatctgaaatgtctccagtgcctatgaggtcagctggccaaacaactaaagcccacttgcatcaaccccacagagtaagccaggtgcttcaggtgccagctgttaatttgcaccccatcaggaagaagggacaaacaaaagaccctgcactgaatacaagtttacctcagaaagttttaggaacaactgaagaaataagtggtaagaagcatacagaagacactatttctgtggcgtcatctttacattctagtcctcctgcatctcctcaaggctcccctcacaaaggttacacacttattccatcagctaaatctgacaacttgtctgactccagccatagtgagatttcttcacggtccagcatcgtgagcaattgttctgttgactccatgtctgcagctctacaggatgaacggtgttcctctcaggccctggcagtccctgaatccactggggcattggaaaagacagagcacgcttcagggataggagatcatagtcaacatggccctgggtggacactcttgaagccatctctaatcaagtgtttagctgtctcatcgtctgtgagcaatgaagagatttctcaagagcatatcattatagaagcagctgacagtggtcgtggaagttggacttcgtgttcaagcagctcccatgacaacttccaaagccttccaaacccaaaaagctgggattttttgaactcttacagacatacccatttggatgaccccattgctgaagttgaacccactgactctgagccctattcctgttctaaaagctgctctagaacttgtgggcagtgtaaaggaagcctagagagaaagagttggacctcctccagttctctgtctgacacgtatgaaccaaactatgggacagttaaacggagagtattggagagcaccccagctgagtcatctgaaggcttggaccccaaggatgccactgacccagtttataaaactgtcacttcaagtacagaaaagggcttgattgaaaatgaacaagtttcagcagtctagcctttggatgacctatttgaaaaccactgaaagtcgtggaggaatgggcaagaaccacctcatgattctgcaggccattgctaacgaacagctcattgctacaaccagtccagaggttttattccctctactccgagcaatgaaatagacctgagttatgcttcctttcatttaatttctgcagataaatagtttcctgagcaatggatgctatgcctggataccagtctccactttgcacgccggaactgccttgggaccacagttacagaaaaaatgtaaactcagagtgatccttgtgtatattgctatagatttttctttaacaagctattttaaagataatggcattattatttccaagccatagcttgggctgaaggacaaattgaaattgtctgccaataccaaggatattcttgtatatttgaaaaataacttattatttgaattgttgtggttttgtttgtatttgagagctcttgttagctgatattcatgtttgaggtcataaaattgtctctggtctgaccaaacagaagtcatctttacagaggtgatatgcttgatctacacagagatgtgacttgatctgtagcaccaatgcaatgtagggtctcagtttgagagaaataggaagccctttgcagttgaggtgttaggaacctgctggtcatggtgtggaaggccaaatgaagctgccacagggtttcttgtcagtcctttgggaaatgggagggagtagtttggggaggagggtgggaaccctaatttccacagaatgaaattttgatgttaaatgacatgtatacaaattcttccttaagtgaaagttatgctgcatcgaattgtaactgaaagtatagatccaacaaatagagactgggttctagagagttctggtctatagaaacccaaaactaaaatctctcataactcaagtatggaatactttttttaaagaaattcttatcatgggtgttgtaataatgaagacgaatttgactttatgcagtgttctgcagcatgcctcccccacatctcatagcaccaggttgtgtctgacctgacataccctgcagctctcagctggctgcagtaacattttgtgggagaaagaggagctggagttacagaaatgattgtctcttggttctcagtttttagcccttgagaggacatacttttccagcctcatgggtatggcactcttaattaaaatttcagtgactgtttactggatgaggcagatttttcacatttttgcaaattaaatatattttatatatattaagtttaattttttcagtttttttaatgtaaaagcaagtgaaattttaataaacttctgtaattaccaaaaaaaaaaaaaaaaagccaaagccattaacgtgcactacccagatcaacttggagccaaaaggggtttacttctgaatggctgtccgtatgtgtccacataggatttagttggtttgtggcctcctttatagaaatgtgttgtctttccctagctgtctctgctgtctgtcttcctg

SEQ ID NO: 341752 - DNA, 4576 bp, Homo sapiens
ccccgcgcagacttgtctccggccagtcgcgcgtgggtagaggccttaggcgggcgttgcgaagggttgtttgctagagttcggaccttgttacggcgcgaagttccctccttggggcgggggaaaggtaccgcacccgctacctagtgtgaatgaactgtggcgtgggctgctaagggcaggctgcggagtacccgggccgtggccatgaactcacccgtggaccctggcgctaggcaggcgttgaggaagaagccacccgagcggactcccgaggacttaaatactatttattcttatcttcatggaatggaaatattatcaaatctcagggaacatcagcttagattaatgtctgcaagagcacgctatgagagatacagtggcaatcaggttctcttttgttcagaaacgattgccagatgttggtatatcctactttctggatctgtgcttgtgaaaggctccatggtcttgcctccttgcagttttggtaagcagtttggaggaaaaagaggatgtgattgtcttgtattagagccttcagaaatgattgtggtagagaatgccaaagataatgaagatagtattctacaaagagaaattcctgccagacaatcccgaagaagatttcggaaaattaactataaaggagagcgccaaaccattactgatgatgtggaggttaacagctatctttctcttccagctgatcttaccaagatgcatctcacagaaaaccctcatccacaggtgactcatgtgtcttctagtcagtctggttgtagcattgccagtgactctggaagcagcagtttatctgatatctatcaggctacggagagtgaggtaggagatgtagatttgacacgtcttccagaaggacctgttgattctgaggatgacgaagaggaagatgaagagattgatcgaacagatccattgcaggggcgagatcttgttcgagaatgtcttgaaaaagaacctgcagacaaaactgatgatgacattgaacaattgctggagtttatgcaccagctccctgcatttgcaaacatgaccatgtctgtaaggagagaactctgctcagtgatgatttttgaagtggtagagcaggctggagctattattcttgaagatgggcaagagcttgactcatggtatgttattttaaacggcactgtggaaatcagtcatccagatggaaaagttgaaaatttgtttatgggaaatagttttggaattactcccactctggataagcagtacatgcatggaattgtcaggactaaagtagatgattgtcagtttgtctgcatagcccagcaagattattggagaattttaaaccatgtggaaaaaaatacccataaagttgaggaagagggagaaattgttatggtacatgagcatcgggaactagaccggagtggaaccaggaaaggacacattgtgatcaaggcaacacctgagcgtctcataatgcatttaatagaagaacattccatcgtggatccaacttatatagaagattttctattaacttacaggacatttcttgaaagtcctttggatgttgggatcaaactattggaatggtttaagatcgacagcttaagagataaggtgacacggattgtattattatgggtaaataatcattttaatgattttgaaggtgaccctgctatgactcgatttctagaggaatttgaaaaaaatctggaagatacaaagatgaatggtcatctccggttattgaatattgcctgtgctgcaaaggctaagtggagacaggttgtgctgcaaaaggcttcccgcgagtcccctctacaattcagccttaatggagggagtgagaagggatttggtatttttgttgaaggagtagaacctggtagcaaagctgctgattcaggactgaaacgtggtgatcagattatggaagtaaatggacaaaactttgagaatattacatttatgaaagccgttgaaattttgaggaataatactcatcttgcacttactgtgaagaccaacatttttgtgttcaaagagttactttttaggactgaacaagagaaatctggtgttcctcatattcccaaaattgctgaaaaaaaaagtaatcgccattctatccagcatgtgccaggagatattgaacagacatcacaggagaaaggaagtaagaaagttaaagcaaatactgtttcaggtggaagaaacaaaatcaggaagattttggataaaacacgatttagtatcttgcctccaaagctatttagtgatggaggcctaagccaatcacaagatgacagcattgtgggaacaaggcactgtaggcatagtctggctataatgcccatccctggaacactctcatccagcagccctgatctcctgcagcctaccaccagtatgttggatttttccaatccttcagatatccctgatcaagttataagagttttcaaagtggatcagcaaagttgctacattatcatcagtaaagacaccacagctaaagaagtagtttttcatgctgttcatgaatttggtttgaccggtgcatccgacacatattctctctgtgaagtttctgttactcctgagggtgtcataaaacagagaagacttccagatcagttctccaaattagctgatagaattcaactcaatggaaggtattacttaaaaaataacatggaaacagaaaccttatgttcagatgaagatgctcaagaactagttaaggaaagccagctatccatgctgcagctcagtaccattgaggtggccacccagctgtcaatgagggactttgatttgtttcgtaatattgaaccgactgagtacatcgatgacctttttaagttaaattccaaaacaggaaatactcatttgaagaggtttgaggacattgtaaaccaagagacattctgggttgcctcagaaattttaactgaagcaaatcagctcaaacgaatgaagattattaagcattttattaaaattgcacttcattgtcgagaatgtaagaacttcaattccatgtttgcaataataagtggcttgaacctggcatctgtagcaagactcagaggaacttgggaaaagttaccaagcaaatacgagaaacatcttcaagatctacaagacatttttgatccatctagaaacatggcaaagtatagaaatattcttagtagtcaaagtatgcagcctccaattattccactcttccctgttgtcaagaaagatatgacatttctacatgaaggaaatgactccaaagtagatggtttagtaaactttgagaagttaagaatgatttccaaggaaatccgccaagttgttcgaatgacttctgctaacatggacccagctatgatgtttcgacagaggtcactgagtcaaggaagcacaaattcaaacatgctggatgttcagggaggtgctcacaaaaaaagggcacgccgcagctctctgcttaatgccaagaagctatatgaggatgcccaaatggcaaggaaggtgaagcagtatctttccagtctcgatgtagagacagatgaggagaagttccagatgatgtcattacagtgggagcctgcatatggtaccttgaccaagaatttaagtgagaaaagatcagccaaatcatctgaaatgtctccagtgcctatgaggtcagctggccaaacaactaaagcccacttgcatcaaccccacagagtaagccaggtgcttcaggtgccagctgttaatttgcaccccatcaggaagaagggacaaacaaaagaccctgcactgaatacaagtttacctcagaaagttttaggaacaactgaagaaataagtggtaagaagcatacagaagacactatttctgtggcgtcatctttacattctagtcctcctgcatctcctcaaggctcccctcacaaagttggcagtatcatatctgatcacagcagcaagatcagtggccagagctgccccggaataggtggggcttacttgcaaaagaaaatccttcagattaccaggagcacagccaaaagaacagacagtactgagaaggccactgaggagaatagagacaggacaagttgtgagaacacaaccagaaaaagaatgacatccccgtttagaagacttagggaaagaatgctttcaagggagagactagtcaacagccaaaaagaggacacagatcacaatcaagctacagaaagctgtgagaaagtgaaggatgttggaagcaacatcaaagatgagaaagggagtgccatcttcaattcaaatagccaaggcaacagtaacactttaaactgcttctatacgcgattcaagtctaaaaggaggaagacactctgatgaagttccttatttaattttagtgttaagtttgttttcagttattaatgtatacatggcttaaattaaaccatttgtcaaagcttaggcagacaacttagtaaaatactatttataaacacttgaaaatgcctcatttgtacataagttattttactgatgtattgagttagtaaattttatactcttgttt

SEQ ID NO: 341753 - DNA, 2606 bp, Homo sapiens
ccccgcgcagacttgtctccggccagtcgcgcgtgggtagaggccttaggcgggcgttgcgaagggttgtttgctagagttcggaccttgttacggcgcgaagttccctccttggggcgggggaaaggtaccgcacccgctacctagtgtgaatgaactgtggcgtgggctgctaagggcaggctgcggagtacccgggccgtggccatgaactcacccgtggaccctggcgctaggcaggcgttgaggaagaagccacccgagcggactcccgaggacttaaatactatttattcttatcttcatggaatggaaatattatcaaatctcagggaacatcagcttagattaatgtctgcaagagcacgctatgagagatacagtggcaatcaggttctcttttgttcagaaacgattgccagatgttggtatatcctactttctggatctgtgcttgtgaaaggctccatggtcttgcctccttgcagttttggtaagcagtttggaggaaaaagaggatgtgattgtcttgtattagagccttcagaaatgattgtggtagagaatgccaaagataatgaagatagtattctacaaagagaaattcctgccagacaatcccgaagaagatttcggaaaattaactataaaggagagcgccaaaccattactgatgatgtggaggttaacagctatctttctcttccagctgatcttaccaagatgcatctcacagaaaaccctcatccacaggtgactcatgtgtcttctagtcagtctggttgtagcattgccagtgactctggaagcagcagtttatctgatatctatcaggctacggagagtgaggtaggagatgtagatttgacacgtcttccagaaggacctgttgattctgaggatgacgaagaggaagatgaagagattgatcgaacagatccattgcaggggcgagatcttgttcgagaatgtcttgaaaaagaacctgcagacaaaactgatgatgacattgaacaattgctggagtttatgcaccagctccctgcatttgcaaacatgaccatgtctgtaaggagagaactctgctcagtgatgatttttgaagtggtagagcaggctggagctattattcttgaagatgggcaagagcttgactcatggtatgttattttaaacggcactgtggaaatcagtcatccagatggaaaagttgaaaatttgtttatgggaaatagttttggaattactcccactctggataagcagtacatgcatggaattgtcaggactaaagtagatgattgtcagtttgtctgcatagcccagcaagattattggagaattttaaaccatgtggaaaaaaatacccataaagttgaggaagagggagaaattgttatggtacatgagcatcgggaactagaccggagtggaaccaggaaaggacacattgtgatcaaggcaacacctgagcgtctcataatgcatttaatagaagaacattccatcgtggatccaacttatatagaagattttctattaacttacaggacatttcttgaaagtcctttggatgttgggatcaaactattggaatggtttaagatcgacagcttaagagataaggttggttttataaggggcatgaaagtgattttaacccaaaattttattcatgaaacttttatagttgatagattacctgtttattatgataataagattcagtacacctaaaaaaattaatgaacctgaaccatcagtataaacattctctgcttacttttatgacagaatagcatgctaaaagtggacgagagccttaaaaggcaaaaactgaaataaagctctggtatagctataggttcaggaaacataatagttacatgagagtattttagaattttactgaaatacttgattgtttctggagatcaataaaacattttaaaacggatttaatattttagaaagaatattcatcaaatacatttttttaagagggcagattgcttttaagcttcaaaatgggaatatttttattttcttgagttacagacttcacaatcatttgaaaacaatttatcaaaccttaatatgtctctcctgtgacttatttaaatctaccttttgagtatttttttgtattaaatgttgttcactattttaaataaattagcttatttcatgggatatgtttgcacatttaatggaaagactagtaatacttccacaaattggtaagaaataagttgtttcaagaaaataaaagtaggatcataattgtctggtgtgtctttttgagttatattttaaaggaaataaactagttgcaggtaaactgcagaattcttttatttaggagactaacatctaaaactacaggcttgcacacctctcaccctttttcttagaattaaatatatttaccttggttgccaagaaaataaaggcatgctttggaaatgaacaagaatatgatttagtgataattatccatatgcaaaagaatgaaaatggattaccaccttatactataaacaaaaatgtacccaaaatgggtcagagacagaagagctaaaactataatgccttaaagatagggg

SEQ ID NO: 341754 - DNA, 1570 bp, Homo sapiens
ccccgcgcagacttgtctccggccagtcgcgcgtgggtagaggccttaggcgggcgttgcgaagggttgtttgctagagttcggaccttgttacggcgcgaagttccctccttggggcgggggaaaggtaccgcacccgctacctagtgtgaatgaactgtggcgtgggctgctaagggcaggctgcggagtacccgggccgtggccatgaactcacccgtggaccctggcgctaggcaggcgttgaggaagaagccacccgagcggactcccgaggacttaaatactatttattcttatcttcatggaatggaaatattatcaaatctcagggaacatcagcttagattaatgtctgcaagagcacgctatgagagatacagtggcaatcaggttctcttttgttcagaaacgattgccagatgttggtatatcctactttctggatctgtgcttgtgaaaggctccatggtcttgcctccttgcagttttggtaagcagtttggaggaaaaagaggatgtgattgtcttgtattagagccttcagaaatgattgtggtagagaatgccaaagataatgaagatagtattctacaaagagaaattcctgccagacaatcccgaagaagatttcggaaaattaactataaaggagagcgccaaaccattactgatgatgtggaggttaacagctatctttctcttccagctgatcttaccaagatgcatctcacagaaaaccctcatccacaggtgactcatgtgtcttctagtcagtctggttgtagcattgccagtgactctggaagcagcagtttatctgatatctatcaggctacggagagtgaggtaggagatgtagatttgacacgtcttccagaaggacctgttgattctgaggatgacgaagaggaagatgaagagattgatcgaacagatccattgcaggggcgagatcttgttcgagaatgtcttgaaaaagaacctgcagacaaaactgatgatgacattgaacaattgctggagtttatgcaccagctccctgcatttgcaaacatgaccatgtctgtaaggagagaactctgctcagtgatgatttttgaagtggtagagcaggctggagctattattcttgaagatgggcaagagcttgactcatggtatgttattttaaacggcactgtggaaatcagtcatccagatggaaaagttgaaaatttgtttatgggaaatagttttggaattactcccactctggataagcagtacatgcatggaattgtcaggactaaagtagatgattgtcaggtaagattatctctttggtcaagtcttcttgtctgttggtttaaagtagctgagcctgttttgtcttcctcaaaagaaaatagctttatttgagaattaggagtttcaatagctcacagttaataaaggaaagtagattttgtatctgcctcaaatatttgtggcatttaacaagctataagttttcaaaagagattataccaaataaatgctggtttgttacatttctatttgatattagccagctcagagtcctttattt

SEQ ID NO: 341755 - DNA, 204 bp, Homo sapiens
ttgacagtgtttagttgaatgagactgagaaagttcaaataatggaaagtcactgtgtttatccttaaaatttgttgttggtataaaaattttctgaagagaagaaataaaatgacgcatttgttttatttccacagtgttcaaagagttactttttaggactgaacaagagaaatctggtgttcctcatattcccaaaattgc

SEQ ID NO: 341756 - DNA, 515 bp, Homo sapiens
tatatatattgatagattctttttcaaagttaacatgtaactaccttttttaaaaagattcataaaacctttgtttttctctatagcttgactcatggtatgttattttaaacggcactgtggaaatcagtcatccagatggaaaagttgaaaatttgtttatgggaaatagttttggaattactcccactctggataagcagtacatgcatggaattgtcaggactaaagtagatgattgtcaggtaagattatctctttggtcaagtcttcttgtctgttggtttaaagtagctgagcctgttttgtcttcctcaaaagaaaatagctttatttgagaattaggagtttcaatagctcacagttaataaaggaaagtagattttgtatctgcctcaaatatttgtggcatttaacaagctataagttttcaaaagagattataccaaataaatgctggtttgttacatttctatttgatattagccagctcagagtcctttatttaaaaaaaa

SEQ ID NO: 341757 - DNA, 6385 bp, Homo sapiens
ggcacgagctgtaggagcaggggcctagcaagcgcccagcggagcgacccctgcctggccgtggctagcatggcccctacgctgttccagaagctcttcagcaagaggaccgggctgggcgcgcccggccgcgacgcccgggacccagattgcgggttcagttggcctttaccagagtttgatccaagccagattcgactgattgtatatcaagactgtgaaagacgagggagaaatgttttgtttgactccagtgttaagagaagaaatgaggacatatcagtatcggacttaaatactatttattcttatcttcatggaatggaaatattatcaaatctcagggaacatcagcttagattaatgtctgcaagagcacgctatgagagatacagtggcaatcaggttctcttttgttcagaaacgattgccagatgttggtatatcctactttctggatctgtgcttgtgaaaggctccatggtcttgcctccttgcagttttggtaagcagtttggaggaaaaagaggatgtgattgtcttgtattagagccttcagaaatgattgtggtagagaatgccaaagataatgaagatagtattctacaaagagaaattcctgccagacaatcccgaagaagatttcggaaaattaactataaaggagagcgccaaaccattactgatgatgtggaggttaacagctatctttctcttccagctgatcttaccaagatgcatctcacagaaaaccctcatccacaggtgactcatgtgtcttctagtcagtctggttgtagcattgccagtgactctggaagcagcagtttatctgatatctatcaggctacggagagtgaggtaggagatgtagatttgacacgtcttccagaaggacctgttgattctgaggatgacgaagaggaagatgaagagattgatcgaacagatccattgcaggggcgagatcttgttcgagaatgtcttgaaaaagaacctgcagacaaaactgatgatgacattgaacaattgctggagtttatgcaccagctccctgcatttgcaaacatgaccatgtctgtaaggagagaactctgctcagtgatgatttttgaagtggtagagcaggctggagctattattcttgaagatgggcaagagcttgactcatggtatgttattttaaacggcactgtggaaatcagtcatccagatggaaaagttgaaaatttgtttatgggaaatagttttggaattactcccactctggataagcagtacatgcatggaattgtcaggactaaagtagatgattgtcagtttgtctgcatagcccagcaagattattggagaattttaaaccatgtggaaaaaaatacccataaagttgaggaagagggagaaattgttatggtacatgagcatcgggaactagaccggagtggaaccaggaaaggacacattgtgatcaaggcaacacctgagcgtctcataatgcatttaatagaagaacattccatcgtggatccaacttatatagaagattttctattaacttacaggacatttcttgaaagtcctttggatgttgggatcaaactattggaatggtttaagatcgacagcttaagagataaggtgacacggattgtattattatgggtaaataatcattttaatgattttgaaggtgaccctgctatgactcgatttctagaggaatttgaaaaaaatctggaagatacaaagatgaatggtcatctccggttattgaatattgcctgtgctgcaaaggctaagtggagacaggttgtgctgcaaaaggcttcccgcgagtcccctctacaattcagccttaatggagggagtgagaagggatttggtatttttgttgaaggagtagaacctggtagcaaagctgctgattcaggactgaaacgtggtgatcagattatggaagtaaatggacaaaactttgagaatattacatttatgaaagccgttgaaattttgaggaataatactcatcttgcacttactgtgaagaccaacatttttgtgttcaaagagttactttttaggactgaacaagagaaatctggtgttcctcatattcccaaaattgctgaaaaaaaaagtaatcgccattctatccagcatgtgccaggagatattgaacagacatcacaggagaaaggaagtaagaaagttaaagcaaatactgtttcaggtggaagaaacaaaatcaggaagattttggataaaacacgatttagtatcttgcctccaaagctatttagtgatggaggcctaagccaatcacaagatgacagcattgtgggaacaaggcactgtaggcatagtctggctataatgcccatccctggaacactctcatccagcagccctgatctcctgcagcctaccaccagtatgttggatttttccaatccttcagatatccctgatcaagttataagagttttcaaagtggatcagcaaagttgctacattatcatcagtaaagacaccacagctaaagaagtagtttttcatgctgttcatgaatttggtttgaccggtgcatccgacacatattctctctgtgaagtttctgttactcctgagggtgtcataaaacagagaagacttccagatcagttctccaaattagctgatagaattcaactcaatggaaggtattacttaaaaaataacatggaaacagaaaccttatgttcagatgaagatgctcaagaactagttaaggaaagccagctatccatgctgcagctcagtaccattgaggtggccacccagctgtcaatgagggactttgatttgtttcgtaatattgaaccgactgagtacatcgatgacctttttaagttaaattccaaaacaggaaatactcatttgaagaggtttgaggacattgtaaaccaagagacattctgggttgcctcagaaattttaactgaagcaaatcagctcaaacgaatgaagattattaagcattttattaaaattgcacttcattgtcgagaatgtaagaacttcaattccatgtttgcaataataagtggcttgaacctggcatctgtagcaagactcagaggaacttgggaaaagttaccaagcaaatacgagaaacatcttcaagatctacaagacatttttgatccatctagaaacatggcaaagtatagaaatattcttagtagtcaaagtatgcagcctccaattattccactcttccctgttgtcaagaaagatatgacatttctacatgaaggaaatgactccaaagtagatggtttagtaaactttgagaagttaagaatgatttccaaggaaatccgccaagttgttcgaatgacttctgctaacatggacccagctatgatgtttcgacagaggtcactgagtcaaggaagcacaaattcaaacatgctggatgttcagggaggtgctcacaaaaaaagggcacgccgcagctctctgcttaatgccaagaagctatatgaggatgcccaaatggcaaggaaggtgaagcagtatctttccagtctcgatgtagagacagatgaggagaagttccagatgatgtcattacagtgggagcctgcatatggtaccttgaccaagaatttaagtgagaaaagatcagccaaatcatctgaaatgtctccagtgcctatgaggtcagctggccaaacaactaaagcccacttgcatcaaccccacagagtaagccaggtgcttcaggtgccagctgttaatttgcaccccatcaggaagaagggacaaacaaaagaccctgcactgaatacaagtttacctcagaaagttttaggaacaactgaagaaataagtggtaagaagcatacagaagacactatttctgtggcgtcatctttacattctagtcctcctgcatctcctcaaggctcccctcacaaaggttacacacttattccatcagctaaatctgacaacttgtctgactccagccatagtgagatttcttcacggtccagcatcgtgagcaattgttctgttgactccatgtctgcagctctacaggatgaacggtgttcctctcaggccctggcagtccctgaatccactggggcattggaaaagacagagcacgcttcagggataggagatcatagtcaacatggccctgggtggacactcttgaagccatctctaatcaagtgtttagctgtctcatcgtctgtgagcaatgaagagatttctcaagagcatatcattatagaagcagctgacagtggtcgtggaagttggacttcgtgttcaagcagctcccatgacaacttccaaagccttccaaacccaaaaagctgggattttttgaactcttacagacatacccatttggatgaccccattgctgaagttgaacccactgactctgagccctattcctgttctaaaagctgctctagaacttgtgggcagtgtaaaggaagcctagagagaaagagttggacctcctccagttctctgtctgacacgtatgaaccaaactatgggacagttaaacggagagtattggagagcaccccagctgagtcatctgaaggcttggaccccaaggatgccactgacccagtttataaaactgtcacttcaagtacagaaaagggcttgattgtgtactgtgtcacctcacccaagaaggacgataggtatagggagccacctcccactcctccaggatatttggggatttctttagcggacctaaaggaaggaccccacacacacctaaaacctccagattatagtgtggcagtgcagaggtcaaagatgatgcataacagcctctctagactgccaccagcttctctcagtagcaacctcgtggcctgtgttccatcgaagattgtaactcagcctcagaggcataatttgcagccattccatcctaaactaggagatgtgactgatgcagatagcgaagcagatgaaaatgaacaagtttcagcagtctagcctttggatgacctatttgaaaaccactgaaagtcgtggaggaatgggcaagaaccacctcatgattctgcaggccattgctaacgaacagctcattgctacaaccagtccagaggttttattccctctactccgagcaatgaaatagacctgagttatgcttcctttcatttaatttctgcagataaatagtttcctgagcaatggatgctatgcctggataccagtctccactttgcacgccggaactgccttgggaccacagttacagaaaaaatgtaaactcagagtgatccttgtgtatattgctatagatttttctttaacaagctattttaaagataatggcattattatttccaagccatagcttgggctgaaggacaaattgaaattgtctgccaataccaaggatattcttgtatatttgaaaaataacttattatttgaattgttgtggttttgtttgtatttgagagctcttgttagctgatattcatgtttgaggtcataaaattgtctctggtctgaccaaacagaagtcatctttacagaggtgatatgcttgatctacacagagatgtgacttgatctgtagcaccaatgcaatgtagggtctcagtttgagagaaataggaagccctttgcagttgaggtgttaggaacctgctggtcatggtgtggaaggccaaatgaagctgccacagggtttcttgtcagtcctttgggaaatgggagggagtagtttggggaggagggtgggaaccctaatttccacagaatgaaattttgatgttaaatgacatgtatacaaattcttccttaagtgaaagttatgctgcatcgaattgtaactgaaagtatagatccaacaaatagagactgggttctagagagttctggtctatagaaacccaaaactaaaatctctcataactcaagtatggaatactttttttaaagaaattcttatcatgggtgttgtaataatgaagacgaatttgactttatgcagtgttctgcagcatgcctcccccacatctcatagcaccaggttgtgtctgacctgacataccctgcagctctcagctggctgcagtaacattttgtgggagaaagaggagctggagttacagaaatgattgtctcttggttctcagtttttagcccttgagaggacatacttttccagcctcatgggtatggcactcttaattaaaatttcagtgactgtttactggatgaggcagatttttcacatttttgcaaattaaatatattttatatatattaagtttaattttttcagtttttttaatgtaaaagcaagtgaaattttaataaacttctgtaattacca

SEQ ID NO: 341758 - DNA, 6334 bp, Homo sapiens
ccccgcgcagacttgtctccggccagtcgcgcgtgggtagaggccttaggcgggcgttgcgaagggttgtttgctagagttcggaccttgttacggcgcgaagttccctccttggggcgggggaaaggtaccgcacccgctacctagtgtgaatgaactgtggcgtgggctgctaagggcaggctgcggagtacccgggccgtggccatgaactcacccgtggaccctggcgctaggcaggcgttgaggaagaagccacccgagcggactcccgaggacttaaatactatttattcttatcttcatggaatggaaatattatcaaatctcagggaacatcagcttagattaatgtctgcaagagcacgctatgagagatacagtggcaatcaggttctcttttgttcagaaacgattgccagatgttggtatatcctactttctggatctgtgcttgtgaaaggctccatggtcttgcctccttgcagttttggtaagcagtttggaggaaaaagaggatgtgattgtcttgtattagagccttcagaaatgattgtggtagagaatgccaaagataatgaagatagtattctacaaagagaaattcctgccagacaatcccgaagaagatttcggaaaattaactataaaggagagcgccaaaccattactgatgatgtggaggttaacagctatctttctcttccagctgatcttaccaagatgcatctcacagaaaaccctcatccacaggtgactcatgtgtcttctagtcagtctggttgtagcattgccagtgactctggaagcagcagtttatctgatatctatcaggctacggagagtgaggtaggagatgtagatttgacacgtcttccagaaggacctgttgattctgaggatgacgaagaggaagatgaagagattgatcgaacagatccattgcaggggcgagatcttgttcgagaatgtcttgaaaaagaacctgcagacaaaactgatgatgacattgaacaattgctggagtttatgcaccagctccctgcatttgcaaacatgaccatgtctgtaaggagagaactctgctcagtgatgatttttgaagtggtagagcaggctggagctattattcttgaagatgggcaagagcttgactcatggtatgttattttaaacggcactgtggaaatcagtcatccagatggaaaagttgaaaatttgtttatgggaaatagttttggaattactcccactctggataagcagtacatgcatggaattgtcaggactaaagtagatgattgtcagtttgtctgcatagcccagcaagattattggagaattttaaaccatgtggaaaaaaatacccataaagttgaggaagagggagaaattgttatggtacatgagcatcgggaactagaccggagtggaaccaggaaaggacacattgtgatcaaggcaacacctgagcgtctcataatgcatttaatagaagaacattccatcgtggatccaacttatatagaagattttctattaacttacaggacatttcttgaaagtcctttggatgttgggatcaaactattggaatggtttaagatcgacagcttaagagataaggtgacacggattgtattattatgggtaaataatcattttaatgattttgaaggtgaccctgctatgactcgatttctagaggaatttgaaaaaaatctggaagatacaaagatgaatggtcatctccggttattgaatattgcctgtgctgcaaaggctaagtggagacaggttgtgctgcaaaaggcttcccgcgagtcccctctacaattcagccttaatggagggagtgagaagggatttggtatttttgttgaaggagtagaacctggtagcaaagctgctgattcaggactgaaacgtggtgatcagattatggaagtaaatggacaaaactttgagaatattacatttatgaaagccgttgaaattttgaggaataatactcatcttgcacttactgtgaagaccaacatttttgtgttcaaagagttactttttaggactgaacaagagaaatctggtgttcctcatattcccaaaattgctgaaaaaaaaagtaatcgccattctatccagcatgtgccaggagatattgaacagacatcacaggagaaaggaagtaagaaagttaaagcaaatactgtttcaggtggaagaaacaaaatcaggaagattttggataaaacacgatttagtatcttgcctccaaagctatttagtgatggaggcctaagccaatcacaagatgacagcattgtgggaacaaggcactgtaggcatagtctggctataatgcccatccctggaacactctcatccagcagccctgatctcctgcagcctaccaccagtatgttggatttttccaatccttcagatatccctgatcaagttataagagttttcaaagtggatcagcaaagttgctacattatcatcagtaaagacaccacagctaaagaagtagtttttcatgctgttcatgaatttggtttgaccggtgcatccgacacatattctctctgtgaagtttctgttactcctgagggtgtcataaaacagagaagacttccagatcagttctccaaattagctgatagaattcaactcaatggaaggtattacttaaaaaataacatggaaacagaaaccttatgttcagatgaagatgctcaagaactagttaaggaaagccagctatccatgctgcagctcagtaccattgaggtggccacccagctgtcaatgagggactttgatttgtttcgtaatattgaaccgactgagtacatcgatgacctttttaagttaaattccaaaacaggaaatactcatttgaagaggtttgaggacattgtaaaccaagagacattctgggttgcctcagaaattttaactgaagcaaatcagctcaaacgaatgaagattattaagcattttattaaaattgcacttcattgtcgagaatgtaagaacttcaattccatgtttgcaataataagtggcttgaacctggcatctgtagcaagactcagaggaacttgggaaaagttaccaagcaaatacgagaaacatcttcaagatctacaagacatttttgatccatctagaaacatggcaaagtatagaaatattcttagtagtcaaagtatgcagcctccaattattccactcttccctgttgtcaagaaagatatgacatttctacatgaaggaaatgactccaaagtagatggtttagtaaactttgagaagttaagaatgatttccaaggaaatccgccaagttgttcgaatgacttctgctaacatggacccagctatgatgtttcgacagaggtcactgagtcaaggaagcacaaattcaaacatgctggatgttcagggaggtgctcacaaaaaaagggcacgccgcagctctctgcttaatgccaagaagctatatgaggatgcccaaatggcaaggaaggtgaagcagtatctttccagtctcgatgtagagacagatgaggagaagttccagatgatgtcattacagtgggagcctgcatatggtaccttgaccaagaatttaagtgagaaaagatcagccaaatcatctgaaatgtctccagtgcctatgaggtcagctggccaaacaactaaagcccacttgcatcaaccccacagagtaagccaggtgcttcaggtgccagctgttaatttgcaccccatcaggaagaagggacaaacaaaagaccctgcactgaaaataagtggtaagaagcatacagaagacactatttctgtggcgtcatctttacattctagtcctcctgcatctcctcaaggctcccctcacaaaggttacacacttattccatcagctaaatctgacaacttgtctgactccagccatagtgagatttcttcacggtccagcatcgtgagcaattgttctgttgactccatgtctgcagctctacaggatgaacggtgttcctctcaggccctggcagtccctgaatccactggggcattggaaaagacagagcacgcttcagggataggagatcatagtcaacatggccctgggtggacactcttgaagccatctctaatcaagtgtttagctgtctcatcgtctgtgagcaatgaagagatttctcaagagcatatcattatagaagcagctgacagtggtcgtggaagttggacttcgtgttcaagcagctcccatgacaacttccaaagccttccaaacccaaaaagctgggattttttgaactcttacagacatacccatttggatgaccccattgctgaagttgaacccactgactctgagccctattcctgttctaaaagctgctctagaacttgtgggcagtgtaaaggaagcctagagagaaagagttggacctcctccagttctctgtctgacacgtatgaaccaaactatgggacagttaaacggagagtattggagagcaccccagctgagtcatctgaaggcttggaccccaaggatgccactgacccagtttataaaactgtcacttcaagtacagaaaagggcttgattgtgtactgtgtcacctcacccaagaaggacgataggtatagggagccacctcccactcctccaggatatttggggatttctttagcggacctaaaggaaggaccccacacacacctaaaacctccagattatagtgtggcagtgcagaggtcaaagatgatgcataacagcctctctagactgccaccagcttctctcagtagcaacctcgtggcctgtgttccatcgaagattgtaactcagcctcagaggcataatttgcagccattccatcctaaactaggagatgtgactgatgcagatagcgaagcagatgaaaatgaacaagtttcagcagtctagcctttggatgacctatttgaaaaccactgaaagtcgtggaggaatgggcaagaaccacctcatgattctgcaggccattgctaacgaacagctcattgctacaaccagtccagaggttttattccctctactccgagcaatgaaatagacctgagttatgcttcctttcatttaatttctgcagataaatagtttcctgagcaatggatgctatgcctggataccagtctccactttgcacgccggaactgccttgggaccacagttacagaaaaaatgtaaactcagagtgatccttgtgtatattgctatagatttttctttaacaagctattttaaagataatggcattattatttccaagccatagcttgggctgaaggacaaattgaaattgtctgccaataccaaggatattcttgtatatttgaaaaataacttattatttgaattgttgtggttttgtttgtatttgagagctcttgttagctgatattcatgtttgaggtcataaaattgtctctggtctgaccaaacagaagtcatctttacagaggtgatatgcttgatctacacagagatgtgacttgatctgtagcaccaatgcaatgtagggtctcagtttgagagaaataggaagccctttgcagttgaggtgttaggaacctgctggtcatggtgtggaaggccaaatgaagctgccacagggtttcttgtcagtcctttgggaaatgggagggagtagtttggggaggagggtgggaaccctaatttccacagaatgaaattttgatgttaaatgacatgtatacaaattcttccttaagtgaaagttatgctgcatcgaattgtaactgaaagtatagatccaacaaatagagactgggttctagagagttctggtctatagaaacccaaaactaaaatctctcataactcaagtatggaatactttttttaaagaaattcttatcatgggtgttgtaataatgaagacgaatttgactttatgcagtgttctgcagcatgcctcccccacatctcatagcaccaggttgtgtctgacctgacataccctgcagctctcagctggctgcagtaacattttgtgggagaaagaggagctggagttacagaaatgattgtctcttggttctcagtttttagcccttgagaggacatacttttccagcctcatgggtatggcactcttaattaaaatttcagtgactgtttactggatgaggcagatttttcacatttttgcaaattaaatatattttatatatattaagtttaattttttcagtttttttaatgtaaaagcaagtgaaattttaataaacttctgtaattacca

SEQ ID NO: 341759 - DNA, 4053 bp, Homo sapiens
ccccgcgcagacttgtctccggccagtcgcgcgtgggtagaggccttaggcgggcgttgcgaagggttgtttgctagagttcggaccttgttacggcgcgaagttccctccttggggcgggggaaaggtaccgcacccgctacctagtgtgaatgaactgtggcgtgggctgctaagggcaggctgcggagtacccgggccgtggccatgaactcacccgtggaccctggcgctaggcaggcgttgaggaagaagccacccgagcggactcccgaggacttaaatactatttattcttatcttcatggaatggaaatattatcaaatctcagggaacatcagcttagattaatgtctgcaagagcacgctatgagagatacagtggcaatcaggttctcttttgttcagaaacgattgccagatgttggtatatcctactttctggatctgtgcttgtgaaaggctccatggtcttgcctccttgcagttttggtaagcagtttggaggaaaaagaggatgtgattgtcttgtattagagccttcagaaatgattgtggtagagaatgccaaagataatgaagatagtattctacaaagagaaattcctgccagacaatcccgaagaagatttcggaaaattaactataaaggagagcgccaaaccattactgatgatgtggaggttaacagctatctttctcttccagctgatcttaccaagatgcatctcacagaaaaccctcatccacaggtgactcatgtgtcttctagtcagtctggttgtagcattgccagtgactctggaagcagcagtttatctgatatctatcaggctacggagagtgaggtaggagatgtagatttgacacgtcttccagaaggacctgttgattctgaggatgacgaagaggaagatgaagagattgatcgaacagatccattgcaggggcgagatcttgttcgagaatgtcttgaaaaagaacctgcagacaaaactgatgatgacattgaacaattgctggagtttatgcaccagctccctgcatttgcaaacatgaccatgtctgtaaggagagaactctgctcagtgatgatttttgaagtggtagagcaggctggagctattattcttgaagatgggcaagagcttgactcatggtatgttattttaaacggcactgtggaaatcagtcatccagatggaaaagttgaaaatttgtttatgggaaatagttttggaattactcccactctggataagcagtacatgcatggaattgtcaggactaaagtagatgattgtcagtttgtctgcatagcccagcaagattattggagaattttaaaccatgtggaaaaaaatacccataaagttgaggaagagggagaaattgttatggtacatgagcatcgggaactagaccggagtggaaccaggaaaggacacattgtgatcaaggcaacacctgagcgtctcataatgcatttaatagaagaacattccatcgtggatccaacttatatagaagattttctattaacttacaggacatttcttgaaagtcctttggatgttgggatcaaactattggaatggtttaagatcgacagcttaagagataaggtgacacggattgtattattatgggtaaataatcattttaatgattttgaaggtgaccctgctatgactcgatttctagaggaatttgaaaaaaatctggaagatacaaagatgaatggtcatctccggttattgaatattgcctgtgctgcaaaggctaagtggagacaggttgtgctgcaaaaggcttcccgcgagtcccctctacaattcagccttaatggagggagtgagaagggatttggtatttttgttgaaggagtagaacctggtagcaaagctgctgattcaggactgaaacgtggtgatcagattatggaagtaaatggacaaaactttgagaatattacatttatgaaagccgttgaaattttgaggaataatactcatcttgcacttactgtgaagaccaacatttttgtgttcaaagagttactttttaggactgaacaagagaaatctggtgttcctcatattcccaaaattgctgaaaaaaaaagtaatcgccattctatccagcatgtgccaggagatattgaacagacatcacaggagaaaggaagtaagaaagttaaagcaaatactgtttcaggtggaagaaacaaaatcaggaagattttggataaaacacgatttagtatcttgcctccaaagctatttagtgatggaggcctaagccaatcacaagatgacagcattgtgggaacaaggcactgtaggcatagtctggctataatgcccatccctggaacactctcatccagcagccctgatctcctgcagcctaccaccagtatgttggatttttccaatccttcagatatccctgatcaagttataagagttttcaaagtggatcagcaaagttgctacattatcatcagtaaagacaccacagctaaagaagtagtttttcatgctgttcatgaatttggtttgaccggtgcatccgacacatattctctctgtgaagtttctgttactcctgagggtgtcataaaacagagaagacttccagatcagttctccaaattagctgatagaattcaactcaatggaaggtattacttaaaaaataacatggaaacagaaaccttatgttcagatgaagatgctcaagaactagttaaggaaagccagctatccatgctgcagctcagtaccattgaggtggccacccagctgtcaatgagggactttgatttgtttcgtaatattgaaccgactgagtacatcgatgacctttttaagttaaattccaaaacaggaaatactcatttgaagaggtttgaggacattgtaaaccaagagacattctgggttgcctcagaaattttaactgaagcaaatcagctcaaacgaatgaagattattaagcattttattaaaattgcacttcattgtcgagaatgtaagaacttcaattccatgtttgcaataataagtggcttgaacctggcatctgtagcaagactcagaggaacttgggaaaagttaccaagcaaatacgagaaacatcttcaagatctacaagacatttttgatccatctagaaacatggcaaagtatagaaatattcttagtagtcaaagtatgcagcctccaattattccactcttccctgttgtcaagaaagatatgacatttctacatgaaggaaatgactccaaagtagatggtttagtaaactttgagaagttaagaatgatttccaaggaaatccgccaagttgttcgaatgacttctgctaacatggacccagctatgatgtttcgacagaggtcactgagtcaaggaagcacaaattcaaacatgctggatgttcagggaggtgctcacaaaaaaagggcacgccgcagctctctgcttaatgccaagaagctatatgaggatgcccaaatggcaaggaaggtgaagcagtatctttccagtctcgatgtagagacagatgaggagaagttccagatgatgtcattacagtgggagcctgcatatggtacctgtgagtacaagttttcatttatgtgacgctaaagagcacaacaaaataaaaacttatttctctagaattatacctaagtcccaagaaaattaactttcactcacaaaagattgctggcataccttaagcatcatgtgatccaattaatcacagactgaatcccatccattcctgatggctacactatccaaaaaatagagggataagtagatctttaaaaagctttttaattcttttaaaaactggatcattatagaggaggctttctgtttgagaacatttttatattcatccctaaagagtaaacataagtggaatttttacctctttttatttcatggataatatttaccaactagaaaatataagaaatttgattaaaacaccagtgataataggtagcttacaggtgccagtagtaaggt

SEQ ID NO: 341760 - DNA, 3802 bp, Homo sapiens
ccccgcgcagacttgtctccggccagtcgcgcgtgggtagaggccttaggcgggcgttgcgaagggttgtttgctagagttcggaccttgttacggcgcgaagttccctccttggggcgggggaaaggtaccgcacccgctacctagtgtgaatgaactgtggcgtgggctgctaagggcaggctgcggagtacccgggccgtggccatgaactcacccgtggaccctggcgctaggcaggcgttgaggaagaagccacccgagcggactcccgaggacttaaatactatttattcttatcttcatggaatggaaatattatcaaatctcagggaacatcagcttagattaatgtctgcaagagcacgctatgagagatacagtggcaatcaggttctcttttgttcagaaacgattgccagatgttggtatatcctactttctggatctgtgcttgtgaaaggctccatggtcttgcctccttgcagttttggtaagcagtttggaggaaaaagaggatgtgattgtcttgtattagagccttcagaaatgattgtggtagagaatgccaaagataatgaagatagtattctacaaagagaaattcctgccagacaatcccgaagaagatttcggaaaattaactataaaggagagcgccaaaccattactgatgatgtggaggttaacagctatctttctcttccagctgatcttaccaagatgcatctcacagaaaaccctcatccacaggtgactcatgtgtcttctagtcagtctggttgtagcattgccagtgactctggaagcagcagtttatctgatatctatcaggctacggagagtgaggtaggagatgtagatttgacacgtcttccagaaggacctgttgattctgaggatgacgaagaggaagatgaagagattgatcgaacagatccattgcaggggcgagatcttgttcgagaatgtcttgaaaaagaacctgcagacaaaactgatgatgacattgaacaattgctggagtttatgcaccagctccctgcatttgcaaacatgaccatgtctgtaaggagagaactctgctcagtgatgatttttgaagtggtagagcaggctggagctattattcttgaagatgggcaagagcttgactcatggtatgttattttaaacggcactgtggaaatcagtcatccagatggaaaagttgaaaatttgtttatgggaaatagttttggaattactcccactctggataagcagtacatgcatggaattgtcaggactaaagtagatgattgtcagtttgtctgcatagcccagcaagattattggagaattttaaaccatgtggaaaaaaatacccataaagttgaggaagagggagaaattgttatggtacatgagcatcgggaactagaccggagtggaaccaggaaaggacacattgtgatcaaggcaacacctgagcgtctcataatgcatttaatagaagaacattccatcgtggatccaacttatatagaagattttctattaacttacaggacatttcttgaaagtcctttggatgttgggatcaaactattggaatggtttaagatcgacagcttaagagataaggtgacacggattgtattattatgggtaaataatcattttaatgattttgaaggtgaccctgctatgactcgatttctagaggaatttgaaaaaaatctggaagatacaaagatgaatggtcatctccggttattgaatattgcctgtgctgcaaaggctaagtggagacaggttgtgctgcaaaaggcttcccgcgagtcccctctacaattcagccttaatggagggagtgagaagggatttggtatttttgttgaaggagtagaacctggtagcaaagctgctgattcaggactgaaacgtggtgatcagattatggaagtaaatggacaaaactttgagaatattacatttatgaaagccgttgaaattttgaggaataatactcatcttgcacttactgtgaagaccaacatttttgtgttcaaagagttactttttaggactgaacaagagaaatctggtgttcctcatattcccaaaattgctgaaaaaaaaagtaatcgccattctatccagcatgtgccaggagatattgaacagacatcacaggagaaaggaagtaagaaagttaaagcaaatactgtttcaggtggaagaaacaaaatcaggaagattttggataaaacacgatttagtatcttgcctccaaagctatttagtgatggaggcctaagccaatcacaagatgacagcattgtgggaacaaggcactgtaggcatagtctggctataatgcccatccctggaacactctcatccagcagccctgatctcctgcagcctaccaccagtatgttggatttttccaatccttcagatatccctgatcaagttataagagttttcaaagtggatcagcaaagttgctacattatcatcagtaaagacaccacagctaaagaagtagtttttcatgctgttcatgaatttggtttgaccggtgcatccgacacatattctctctgtgaagtttctgttactcctgagggtgtcataaaacagagaagacttccagatcagttctccaaattagctgatagaattcaactcaatggaaggtattacttaaaaaataacatggaaacagaaaccttatgttcagatgaagatgctcaagaactagttaaggaaagccagctatccatgctgcagctcagtaccattgaggtggccacccagctgtcaatgagggactttgatttgtttcgtaatattgaaccgactgagtacatcgatgacctttttaagttaaattccaaaacaggaaatactcatttgaagaggtttgaggacattgtaaaccaagagacattctgggttgcctcagaaattttaactgaagcaaatcagctcaaacgaatgaagattattaagcattttattaaaattgcacttcattgtcgagaatgtaagaacttcaattccatgtttgcaataataagtggcttgaacctggcatctgtagcaagactcagaggaacttgggaaaagttaccaagcaaatacgagaaacatcttcaagatctacaagacatttttgatccatctagaaacatggcaaagtatagaaatattcttagtagtcaaagtatgcagcctccaattattccactcttccctgttgtcaagaaagatatgacatttctacatgaaggaaatgactccaaagtagatggtttagtaaactttgagaagttaagaatgatttccaaggaaatccgccaagttgttcgaatgacttctgctaacatggacccagctatgatgtttcgacagaggtaggacattgaaatatgtaaaagtgttagagtggtatcaagggtgatgtaataattaaaatatttatcatttattgatcatatttattctaccatgtgtgctgtacaaagtgctttatatgtgtccgtttcatgtaatcatttatcattaataaccataacaggtaggtgatattagccttcgttatacatattaagaaactgaatgaagctcagagcagtttttacataatttgcaaatatttgtatgtggatagttctgtattattgttctttaaaacatcagcaggccgggcgcagtggctcacgcctgtaatcccagcactttgggaggccgaggcaggcggatcacaaggtcagagatcgagaccatcctagctaacaaggtgaaaccc

SEQ ID NO: 341761 - DNA, 400 bp, Homo sapiens
gatgctcagtcgttttaccagggacgctggtcaggaagaggatgccgtgattgtgaaaattcctggagcaggagacaaagtttcattaatatctcttctcgctcttgtggagcggtcctcatgcgttgggcctgtgacttcacgaagctgctttcttccacctggaccctgatacagtacccagagaatgccatgattatagcccggtgggctcttcttgccgactgccctgagaaaaccaaggcactgagaacaacaggtgttacagcgaagagagagtttaatcacagggccagccacgtgtgagaatgggcgaggtttctcaaatctgcctccctgagaactcggcggcttgagtttttaagggtagtttggtgggtgggggcctggggagctgaaa

SEQ ID NO: 341762 - DNA, 566 bp, Homo sapiens
atgtgacactaatgactcttctctcttcagattcccgatacattcttctgcctgtcgtgttacatcacctccacattcacttgcaagaacagaaggacctgatcatgtgtgcacgtatccttagcaacgtattttgtcttatcaagaaaaatagctcagtaagtaaatacaggtcatagtatatagctcccttcaaatggcttctggaaataaacttgtaatagtctacaaagaaaccgcactaaagaggaagcctctgagacccacttttatttccagctgggctggactttttgcttctctttggaaggaatttttttaaccttgtgggattctgtaaccccaaataacctgggttccccaaacttgtatttcaaggaagaactgcatactgagtgagaaaaatgagaaatctcaaagcctcccacgtgtgtctttaatcttgatatgatgactgctctgtggcaagaataaattactgcttgcaacatgaagtcgtttttgatccattctgtgaaaggctacttcatgatactcagaacttggctgtggtccttgggccgggt

SEQ ID NO: 341763 - DNA, 405 bp, Homo sapiens
ccaacttggtccaggacaccctgggcagtctgccgaccatcctgcatgtggatgattccctgcaggccatcaaactgcagtgcattggcaaaaccgtggaaagccagctttataccaacccagattcccgatacattcttctgcctgtcgtgttacatcacctccacattcacttgcaagaacagaaggacctgatcatgtgtgcacgtatccttagcaacgtattttgtcttatcaagaaaaatagctcagaaaaatctgtgctggaggaaatagatgtgatagtggccagcttgctggatattctgctgaggaccatattggagatcaccagccgacctcagccatccagctcagcaatgcggttccagttccaggatgtcactgtaagatcatagagcagat

SEQ ID NO: 341764 - DNA, 7174 bp, Homo sapiens
  misc_feature (2870)..(2870): n is a, c, g, or t
gcggatggacagcaggccccgcgccgggtgctgcgagtggctgagatgctgcggtggaggggaggccaggccccgcactgtctggctggggcaccccgagaagagagaccagaggtatcctcggaatgtcatcaacaatcagaagtacaatttcttcacctttcttcctggggtgctgttcaaccagttcaaatactttttcaacctctatttcttacttcttgcctgctctcagtttgttcccgaaatgagacttggtgcactctatacctactgggttcccctgggcttcgtgctggccgtcactgtcatccgtgaggcggtggaggagatccgatgctacgtgcgggacaaggaagtcaactcccaggtctacagccggctcacagcacgaggtactgttgtgggtgttgttctttacactggcagagaactccggagtgtcatgaatacctcaaatccccgaagtaagatcggcctgttcgacttggaagtgaactgcctcaccaagatcctctttggtgccctggtggtggtctcgctggtcatggttgcccttcagcactttgcaggccgttggtacctgcagatcatccgcttcctcctcttgttttccaacatcatccccattagtttgcgcgtgaacctggacatgggcaagatcgtgtacagctgggtgattcgaagggactcaaaaatccccgggaccgtggttcgctccagcacgattcctgagcagctgggcaggatttcgtacttactcacagacaagacaggcactcttacccagaacgagatgattttcaaacggctccatctcggaacagtagcctacggcctcgactcaatggacgaagtacaaagccacattttcagcatttacacccagcaatcccaggacccaccggctcagaagggcccaacgctcaccactaaggtccggcggaccatgagcagccgcgtgcacgaagccgtgaaggccatcgcgctctgccacaacgtgactcccgtgtatgagtccaacggtgtgactgatcaggctgaggccgagaagcagtacgaagactcctgccgcgtataccaggcatccagccccgatgaggtggccctggtacagtggacggaaagtgtgggcttaaccctggtgggccgagaccagtcttccatgcagctgaggacccctggcgaccagatcctgaacttcaccatcctacagatcttccctttcacctatgaaagcaaacgtatgggcatcatcgtgcgggatgaatcaactggagaaattacgttttacatgaagggagcagatgtggtcatggctggcattgtgcagtacaatgactggttggaggaagagtgtggcaacatggcccgagaagggctgcgggtgctcgtggtggcaaagaagtctcttgcagaggagcagtatcaggactttgaagcccgctacgtccaggccaagctgagtgtgcacgaccgctccctcaaagtggccacggtgatcgagagcctggagatggagatggaactgctgtgcctgacgggcgtggaggaccagctgcaggcagatgtgcggcccacgctggagaccctgaggaatgctggcatcaaggtttggatgctgacaggggacaagctggagacagctacgtgcacagcgaagaatgcacatctggtgaccagaaaccaagacatccacgtttttcggctggtgaccaaccgcggggaggctcacctcgagctgaacgccttccgcaggaagcatgattgtgccctggtcatctcgggagactccctggaggtttgcctcaagtactatgagtacgagttcatggagctggcctgccagtgcccggccgtagtctgctgccgatgtgcccccacccagaaggcccagatcgtgcgcctgcttcaggagcgcacgggcaagctcacctgtgcagtaggggacggaggcaatgacgtcagcatgattcaggaatctgactgcggcgtgggagtggaaggaaaggaaggaaaacaggcttcgttggctgcagacttctccatcactcaatttaagcatcttggccggttgcttatggtgcatggccggaacagctacaagcggtcagccgccctcagccagttcgtgattcacaggagcctctgtatcagcaccatgcaggctgtcttttcctccgtgttttactttgcctccgtccctctctatcaaggattcctcatcattgggtactccacaatttacaccatgtttcctgtgttttctctggtcctggacaaagatgtcaaatcggaagttgccatgctgtatcctgagctctacaaggatcttctcaagggacggccgttgtcctacaagacattcttaatatgggttttgattagcatctatcaagggagcaccatcatgtacggggcgctgctgctgtttgagtcggagttcgtgcacatcgtggccatctccttcacctcgctgatcctcaccgagctgctcatggtggcgctgaccatccagacctggcactggctcatgacagtggcggagctgctcagcctggcctgctacatcgcctccctggtgttcttacacgagttcatcgatgtgtacttcatcgccaccttgtcattcttgtggaaagtctccgtcatcactctggtcagctgcctccccctctatgtcctcaagtacctgcgaagacggttctctccccccagctactcaaagctcacatcataggccgtgcgttcgctggagggggccctggtcttggcgcttccctgatggacagagctcaagttccatttatattaaccgccacctgtggattttgcagtaattgctaacacatgcagttttaatgggaagnggctctgcgcctaaacggagtcctaacgctgcatcaacgggagggagggtcctgaaagagacccatctgggcctgtctgaacccctcgttcttcatgtttaggtgaatatgaatatgttaaagctggtggctcagctgggagatttatatgggtcactgtgcgagcttccttatgacttgaattttgttgtcacatgataaaagtttctgtgtagctgaaggttgtagaaggcttgtgtgtgtgtgtgtgtgtgtgtgtgtgtgtgtgtgtgtttttaaagagtcctaatgtgtatgtactctttatgtctttcttgctcttacaaagaggtgtcagaaaaatagaaagctcttggtgtcggtttgggaggaaaagacagtgacatttggtaaaaagttatccacacaataatctccattcggaaatgctcagtatcgtctccagccagccctgcttatccaggttacactggattcctgggatcgtaaccagtaaatgagaggagagggagagagagtgtcctaagtccaatctgttatccttgatctgattcagcatccatagtgtgtgagttaacttcacctgccacctcgtaaaagaatttcagaggtgtgatcccgctttattgggacctggtaacaatcacaaagccagtggctgtttgagaaggacctcagacattttcagcagagttgttttagcaggaaacgtgccactgaatggcccctaaatgtgtcgacagtgtgataagagactcaactaattctttaggcaacatggcagatgtgactcagatcctccaagaccaaagcggaaaggtcagggggctgggactcttctcttccatagaagcctgtttcctgttaggaggcataatggaagatgaccccacaaaggcagaggcatctttcggaacaacactggtggcagctttcagaacaaggaacccctggtgggaggacgcccaagctacagcgttgggatctgggatctgttccactgccggcagatttcaaggggaacttgctgaaaggcagccagtggtgaagatttctcccctcccaggatggactacatgccggcatgtttcttataaagctgtggctgcttgtttcagaggaagggagtttgcagtcgcgggacgtggtagagcaaggcattcttgggttttcaagttgcttcttgcagaagccacatatgcatgccataagggttaagttggtggatctttaagagccaagtgtggttgagatcttggatttgcgtttacttcttgatgaatacatatccttcaaaccctctgcctggcgctacttctgtgtgcttcagagatgtacatcacagcctggtttctgatgcctactaactcctgctcttggagagctggagacacgaggatcagatagtcccttgcctttggagcactcttgataagcttttgtattttgtgttgtccttttaaaatgttctagaatgactttacgttgcaggtactggttaattggctgttgacaccacatctattttgtcttatgattctgcagttttgcagtacttttctctatctgattcagccatttctgccagagggaaaaggtcggcagaaaagatgtattgagtgaatagttaaggataggatctttgtccaaaaatttcagaaagattgagcaaatctgacgtattcattgagtgagtttctgtgttttcaaaggtggaggagaaatttgtgctggaagtttttaagcctccgttttcttggaaatcagtctgtaacactggcaagtcttaagatagtcccgtttagactttgcagatgctgaacctggctctgtaacgctgggaagtcttaagatagtcctgtttagactttgcaaaccctgtacctggctttgctcggagattcgggatgctggctcctgcaggcagggcgtgtgggagcctcgtcagaaagttttagaggtttccagcagaagcagaatgaagatggtctccctggccttttccttaattctcaattttgattgaggtgcacaagttgacttttaaagccaacgcttaagatactgattgacatcttcaagggagaatgctcccaggaggggctgaagaagccatagttggaagtggaaggtactcgtcagtgttctccacaaacctttttactctgttgtctcagccgcactggggcggaggcggtcaagggtgagaagtaccgacactcaagtgcaaactgccacgtcgttggcccatcccatcagtgggcagctggctgacgccattcactggacggtccctgaacacctaggaatgcacacaccgtgcttctcagacactggagacgcaaaggcaggaggatgcagtccggtgagaggacacgatctttacctgcacaatcagactgtaagcccagcagagaaccccaggggcgcctgggtacttctcggaggtcatcttagttgtggtggggaagacaaagaaataagcaaacaagaaactagagttactatacaagaaactctcctgagtttgtaaaccttaagcataaggattcagttgacctttttcttggttcatcaatctggaaagaacttacataaagcgccattgacactgtcacctgggagctccatgggccgtaagtctttgacagccaatttaatttgaggtcagagggccttgaggtacacagtcagcactgtttgaacacttttcctgaaagcaaaactcacagctccctgcgccctctgacaacactagctatttctgccagagtaagaacttctattactattttattattgttcatatgtcttttgatgatggttgtgtgacagggggaagcaggatctatttggtttcttccccctccccccaccccttcctttttgtctctctttttttttctctaagaaaatcaccagactagtttttccatcttgagtaatttcttatgtgggacagttttgatcctcattttgaaagcatgcgtgtgcacatgtgtgttgcctgtggtgccaggtgagacaggtggcactaactccagctgcttggaaggcatcccaagggcgcatcttaaagttggagcagacctcccttttccagcccctggggccattagaccacgtgctggaactagcattgtaaaattcccatcccagttccactcccctgaagtgaaacccttttttttttgtgacagtaaatcttaaaaatcattgtctctttatgaacatttcctcagtttcttctctgctgaaaatgtaagccatgctactttttaatgtattttgaattttgtgctcattggaaattgatatgctaatgcctcccccaccccccgccagacttttctttttatactttgtcttgtttttactggggtaggctgggcatgcgtgcgtgcctttagggcagcattttaaacctttgccaaaattgcaaatgggacatgtacattcttctgctccatcctacttaaacacctatcagctatttttatctttaaccttttctgtatgtttgaagtgtgtggggggtgtgtgtgtgtgtgaaagagcgagagaatgatgtcatctaaagttttttgaagaattatttggttttcattgcattaaaattctatcactcccagctttgttttcatttaaaaaaatatacaaagagctttgtaaatacaacacattttatttctcccccttcttttaatgtacagcttttttgccacttatatatacttaaaatattcccatgaattatgtccagttcttcttggaaaaaaatttggttttgaatgaacctgcaaagcatcctgcagcgtgagcagctcctccacctggagctccgaagcatcttctcaggccaaagcggcattacccgtgaatctgtcttctccgccacagcatggtttgaggcgcagtctgttaatatagctgggccatgtcagtgactgttgtgtttgtggggtcaggtggggggcatggtatttgcaaaaaaaacaaattatggctaatttattattttgttgcagtggggttaactgtaaactcatgtaagagtctgtgatttcctcattggttgatctctctctctgtaatcctcattgcaaattttcaccaggacagcgttttttgattagaggggagctctggcacagtatgctttaatttagcaggaacttccagatgatttaaattctcgatgctgtgatgacacacatatgatctttcgtgtttctgagcgactctactttcattgtttgccagcgtggctcgttgctgttgcccaataaagcttgtgtacgttc

SEQ ID NO: 341765 - DNA, 2427 bp, Homo sapiens
  misc_feature (1)..(2): n is a, c, g, or t
  misc_feature (5)..(8): n is a, c, g, or t
  misc_feature (313)..(313): n is a, c, g, or t
  misc_feature (597)..(597): n is a, c, g, or t
  misc_feature (2137)..(2137): n is a, c, g, or t
nngcnnnnacttccaggagtgatccgtaattgtgccaattgctccttttttcggagtgggggtggtgtggggtggggacggggacagagtctcgctatgtcacccaggctggagtgcaatggcgtgatctcagctcactgcatctctgcctcctgggttcaagcgattctcctgcctcagcctcctgggtagctgggattacaggtgtccgccaccatgcctgggtaatttttgtatttttagtaaagacggggtttcaccatattggccaggctggtctcgaactcctgacctcaggtgatccacccacctnggcctcccaaagtgctgggattacaggcctgagccactgcacccagtcacaatcactcttaattctgtgccatctctttccgccatgcctctggtgtgcagcctgttttgagcctagaaaagatgaattgtgccttatagaggggcagctttcagtgtgggagccctcatagacccagaggaacagacactgtcatgggccagcacagagcacttggcgtccctaagggcagtgactactgtgattcccctgtctctgagcccccttctgcctttgtgttcatngcacagcctgtgaacccagattctcggctgggcatctgaccttcgaccctgtgttatgtttaggtggccctggtacagtggacggaaagtgtgggcttaaccctggtgggccgagaccagtcttccatgcagctgaggacccctggcgaccagatcctgaacttcaccatcctacagatcttccctttcacctatgaaagcaaacgtatgggcatcatcgtgcgggtgagtcgtttttattcatggcttaaagtgcttaagtaccccaggtgtgctgcgtgtgtccctgtgggttgacattctttctaaccctctttactgtggtatctgtcacccagactaacgagggaatataattccctaagcagaaaggaaattagttcattcattggacacaccccgtaactctgatccgcttatggtgtccctggttctggagtgaaagttaaagagaacgtccattggggatttcttggtaatacatctctcattctcttttgtttaatattgaacatggtatttttttattgaggtgaaattcacataatacaatcattttaaagtgaaaacttcagtggcatttagtccattcacagtgttgctcagccaccacttccctcatgtttcaaaacattttcatcaaaatgatgaaaaaagaaaccttgtggccgggcacgttaaaaaattttgccagtctgaagagtctgattggatttgatatgttgtttttctactggctcttttaaaaatttttaatttttaaattcttattaaaagaatgtatttataagagtcctcccacctcagcctcccgagtagctaggactacaggcttgcaaaaccagggctgactcattttttaattttttatagatacagggtttcactgtgctgcccaggctggtctcaaactcctggcctcaaccgattctcctgcctgggactcccaaagtgctggaattacgggtgtgagccactgtgcccatccctctgttttctctttttacccacggagatcacactttccgtcgtggggaggctggaaaatctggtgttcatatgccacttggtctggttgttctgcagtctgcatgattgtctgatttttcccagggagctttgaaaataccgattccttggttcagtcccacacctatgttggagtggggtggttcctcacatcatttagcttcgttgcagaaaactctccttcagatcttaaggatctttggaataaggctctttcatcttttctggacttttttttttttttttccttgacaaatgagaatcctctccaccctgatctacccaagtgtttcatgcctcatggaggaaagagatacttgcacatgcatttttatagcagcacaatttgcaattgcaaagatatggaaccagcccaaatactcatcagtcaacaagtggataaaggaactatgagatatatatatatatatatatatatatataatgatgaaatgctacttagccatggaaaggaatgaattaatggcattcgctgcaaactggatgggantggggactattatctaagtgaaataactcaggaatggaaagccaaatgtcgtatgttctcactcataagagggagctaagctatgaggaagcaaaggcttaagaataatacaatggactttggcgagtcagggggctgaaagggtgggaggacggtgagggataaaagactacaagttgggttcagtgtatactgctcaggtgatgggtgcacgaaaatctcataaatcactgttaaaaaacttactcatataaccaaacaccatgtgttccccaaaaacctttggaaat

SEQ ID NO: 341766 - DNA, 7024 bp, Homo sapiens
  misc_feature (2720)..(2720): n is a, c, g, or t
tgagtccaacggtgtgactgatcaggctgaggccgagaagcagtacgaagactcctgccgcgtataccaggcatccagccccgatgaggaccttcttcagattcgatcgtatgtgtacgcagaagagccaaatattgacattcacaacttcgtgggaacttttacccgagaagacagcgaccccccgatcagcgagagcctgagcatagagaacacgctgtgggctggcactgtggtcgcatcaggtactgttgtgggtgttgttctttacactggcagagaactccggagtgtcatgaatacctcaaatccccgaagtaagatcggcctgttcgacttggaagtgaactgcctcaccaagatcctctttggtgccctggtggtggtctcgctggtcatggttgcccttcagcactttgcaggccgttggtacctgcagatcatccgcttcctcctcttgttttccaacatcatccccattagtttgcgcgtgaacctggacatgggcaagatcgtgtacagctgggtgattcgaagggactcaaaaatccccgggaccgtggttcgctccagcacgattcctgagcagctgggcaggatttcgtacttactcacagacaagacaggcactcttacccagaacgagatgattttcaaacggctccatctcggaacagtagcctacggcctcgactcaatggacgaagtacaaagccacattttcagcatttacacccagcaatcccaggacccaccggctcagaagggcccaacgctcaccactaaggtccggcggaccatgagcagccgcgtgcacgaagccgtgaaggccatcgcgctctgccacaacgtgactcccgtgtatgagtccaacggtgtgactgatcaggctgaggccgagaagcagtacgaagactcctgccgcgtataccaggcatccagccccgatgaggtggccctggtacagtggacggaaagtgtgggcttaaccctggtgggccgagaccagtcttccatgcagctgaggacccctggcgaccagatcctgaacttcaccatcctacagatcttccctttcacctatgaaagcaaacgtatgggcatcatcgtgcgggatgaatcaactggagaaattacgttttacatgaagggagcagatgtggtcatggctggcattgtgcagtacaatgactggttggaggaagagtgtggcaacatggcccgagaagggctgcgggtgctcgtggtggcaaagaagtctcttgcagaggagcagtatcaggactttgaagcccgctacgtccaggccaagctgagtgtgcacgaccgctccctcaaagtggccacggtgatcgagagcctggagatggagatggaactgctgtgcctgacgggcgtggaggaccagctgcaggcagatgtgcggcccacgctggagaccctgaggaatgctggcatcaaggtttggatgctgacaggggacaagctggagacagctacgtgcacagcgaagaatgcacatctggtgaccagaaaccaagacatccacgtttttcggctggtgaccaaccgcggggaggctcacctcgagctgaacgccttccgcaggaagcatgattgtgccctggtcatctcgggagactccctggaggtttgcctcaagtactatgagtacgagttcatggagctggcctgccagtgcccggccgtagtctgctgccgatgtgcccccacccagaaggcccagatcgtgcgcctgcttcaggagcgcacgggcaagctcacctgtgcagtaggggacggaggcaatgacgtcagcatgattcaggaatctgactgcggcgtgggagtggaaggaaaggaaggaaaacaggcttcgttggctgcagacttctccatcactcaatttaagcatcttggccggttgcttatggtgcatggccggaacagctacaagcggtcagccgccctcagccagttcgtgattcacaggagcctctgtatcagcaccatgcaggctgtcttttcctccgtgttttactttgcctccgtccctctctatcaaggattcctcatcattgggtactccacaatttacaccatgtttcctgtgttttctctggtcctggacaaagatgtcaaatcggaagttgccatgctgtatcctgagctctacaaggatcttctcaagggacggccgttgtcctacaagacattcttaatatgggttttgattagcatctatcaagggagcaccatcatgtacggggcgctgctgctgtttgagtcggagttcgtgcacatcgtggccatctccttcacctcgctgatcctcaccgagctgctcatggtggcgctgaccatccagacctggcactggctcatgacagtggcggagctgctcagcctggcctgctacatcgcctccctggtgttcttacacgagttcatcgatgtgtacttcatcgccaccttgtcattcttgtggaaagtctccgtcatcactctggtcagctgcctccccctctatgtcctcaagtacctgcgaagacggttctctccccccagctactcaaagctcacatcataggccgtgcgttcgctggagggggccctggtcttggcgcttccctgatggacagagctcaagttccatttatattaaccgccacctgtggattttgcagtaattgctaacacatgcagttttaatgggaagnggctctgcgcctaaacggagtcctaacgctgcatcaacgggagggagggtcctgaaagagacccatctgggcctgtctgaacccctcgttcttcatgtttaggtgaatatgaatatgttaaagctggtggctcagctgggagatttatatgggtcactgtgcgagcttccttatgacttgaattttgttgtcacatgataaaagtttctgtgtagctgaaggttgtagaaggcttgtgtgtgtgtgtgtgtgtgtgtgtgtgtgtgtgtgtgtttttaaagagtcctaatgtgtatgtactctttatgtctttcttgctcttacaaagaggtgtcagaaaaatagaaagctcttggtgtcggtttgggaggaaaagacagtgacatttggtaaaaagttatccacacaataatctccattcggaaatgctcagtatcgtctccagccagccctgcttatccaggttacactggattcctgggatcgtaaccagtaaatgagaggagagggagagagagtgtcctaagtccaatctgttatccttgatctgattcagcatccatagtgtgtgagttaacttcacctgccacctcgtaaaagaatttcagaggtgtgatcccgctttattgggacctggtaacaatcacaaagccagtggctgtttgagaaggacctcagacattttcagcagagttgttttagcaggaaacgtgccactgaatggcccctaaatgtgtcgacagtgtgataagagactcaactaattctttaggcaacatggcagatgtgactcagatcctccaagaccaaagcggaaaggtcagggggctgggactcttctcttccatagaagcctgtttcctgttaggaggcataatggaagatgaccccacaaaggcagaggcatctttcggaacaacactggtggcagctttcagaacaaggaacccctggtgggaggacgcccaagctacagcgttgggatctgggatctgttccactgccggcagatttcaaggggaacttgctgaaaggcagccagtggtgaagatttctcccctcccaggatggactacatgccggcatgtttcttataaagctgtggctgcttgtttcagaggaagggagtttgcagtcgcgggacgtggtagagcaaggcattcttgggttttcaagttgcttcttgcagaagccacatatgcatgccataagggttaagttggtggatctttaagagccaagtgtggttgagatcttggatttgcgtttacttcttgatgaatacatatccttcaaaccctctgcctggcgctacttctgtgtgcttcagagatgtacatcacagcctggtttctgatgcctactaactcctgctcttggagagctggagacacgaggatcagatagtcccttgcctttggagcactcttgataagcttttgtattttgtgttgtccttttaaaatgttctagaatgactttacgttgcaggtactggttaattggctgttgacaccacatctattttgtcttatgattctgcagttttgcagtacttttctctatctgattcagccatttctgccagagggaaaaggtcggcagaaaagatgtattgagtgaatagttaaggataggatctttgtccaaaaatttcagaaagattgagcaaatctgacgtattcattgagtgagtttctgtgttttcaaaggtggaggagaaatttgtgctggaagtttttaagcctccgttttcttggaaatcagtctgtaacactggcaagtcttaagatagtcccgtttagactttgcagatgctgaacctggctctgtaacgctgggaagtcttaagatagtcctgtttagactttgcaaaccctgtacctggctttgctcggagattcgggatgctggctcctgcaggcagggcgtgtgggagcctcgtcagaaagttttagaggtttccagcagaagcagaatgaagatggtctccctggccttttccttaattctcaattttgattgaggtgcacaagttgacttttaaagccaacgcttaagatactgattgacatcttcaagggagaatgctcccaggaggggctgaagaagccatagttggaagtggaaggtactcgtcagtgttctccacaaacctttttactctgttgtctcagccgcactggggcggaggcggtcaagggtgagaagtaccgacactcaagtgcaaactgccacgtcgttggcccatcccatcagtgggcagctggctgacgccattcactggacggtccctgaacacctaggaatgcacacaccgtgcttctcagacactggagacgcaaaggcaggaggatgcagtccggtgagaggacacgatctttacctgcacaatcagactgtaagcccagcagagaaccccaggggcgcctgggtacttctcggaggtcatcttagttgtggtggggaagacaaagaaataagcaaacaagaaactagagttactatacaagaaactctcctgagtttgtaaaccttaagcataaggattcagttgacctttttcttggttcatcaatctggaaagaacttacataaagcgccattgacactgtcacctgggagctccatgggccgtaagtctttgacagccaatttaatttgaggtcagagggccttgaggtacacagtcagcactgtttgaacacttttcctgaaagcaaaactcacagctccctgcgccctctgacaacactagctatttctgccagagtaagaacttctattactattttattattgttcatatgtcttttgatgatggttgtgtgacagggggaagcaggatctatttggtttcttccccctccccccaccccttcctttttgtctctctttttttttctctaagaaaatcaccagactagtttttccatcttgagtaatttcttatgtgggacagttttgatcctcattttgaaagcatgcgtgtgcacatgtgtgttgcctgtggtgccaggtgagacaggtggcactaactccagctgcttggaaggcatcccaagggcgcatcttaaagttggagcagacctcccttttccagcccctggggccattagaccacgtgctggaactagcattgtaaaattcccatcccagttccactcccctgaagtgaaacccttttttttttgtgacagtaaatcttaaaaatcattgtctctttatgaacatttcctcagtttcttctctgctgaaaatgtaagccatgctactttttaatgtattttgaattttgtgctcattggaaattgatatgctaatgcctcccccaccccccgccagacttttctttttatactttgtcttgtttttactggggtaggctgggcatgcgtgcgtgcctttagggcagcattttaaacctttgccaaaattgcaaatgggacatgtacattcttctgctccatcctacttaaacacctatcagctatttttatctttaaccttttctgtatgtttgaagtgtgtggggggtgtgtgtgtgtgtgaaagagcgagagaatgatgtcatctaaagttttttgaagaattatttggttttcattgcattaaaattctatcactcccagctttgttttcatttaaaaaaatatacaaagagctttgtaaatacaacacattttatttctcccccttcttttaatgtacagcttttttgccacttatatatacttaaaatattcccatgaattatgtccagttcttcttggaaaaaaatttggttttgaatgaacctgcaaagcatcctgcagcgtgagcagctcctccacctggagctccgaagcatcttctcaggccaaagcggcattacccgtgaatctgtcttctccgccacagcatggtttgaggcgcagtctgttaatatagctgggccatgtcagtgactgttgtgtttgtggggtcaggtggggggcatggtatttgcaaaaaaaacaaattatggctaatttattattttgttgcagtggggttaactgtaaactcatgtaagagtctgtgatttcctcattggttgatctctctctctgtaatcctcattgcaaattttcaccaggacagcgttttttgattagaggggagctctggcacagtatgctttaatttagcaggaacttccagatgatttaaattctcgatgctgtgatgacacacatatgatctttcgtgtttctgagcgactctactttcattgtttgccagcgtggctcgttgctgttgcccaataaagcttgtgtacgttc

SEQ ID NO: 341767 - DNA, 6277 bp, Homo sapiens
  misc_feature (1973)..(1973): n is a, c, g, or t
aggttatcggctctcctgatttagttcatgatgcatgactcgactctttggatccaccaacccatgtgccgctcccgtgaaggccatcgcgctctgccacaacgtgactcccgtgtatgagtccaacggtgtgactgatcaggctgaggccgagaagcagtacgaagactcctgccgcgtataccaggcatccagccccgatgaggtggccctggtacagtggacggaaagtgtgggcttaaccctggtgggccgagaccagtcttccatgcagctgaggacccctggcgaccagatcctgaacttcaccatcctacagatcttccctttcacctatgaaagcaaacgtatgggcatcatcgtgcgggatgaatcaactggagaaattacgttttacatgaagggagcagatgtggtcatggctggcattgtgcagtacaatgactggttggaggaagagtgtggcaacatggcccgagaagggctgcgggtgctcgtggtggcaaagaagtctcttgcagaggagcagtatcaggactttgaagcccgctacgtccaggccaagctgagtgtgcacgaccgctccctcaaagtggccacggtgatcgagagcctggagatggagatggaactgctgtgcctgacgggcgtggaggaccagctgcaggcagatgtgcggcccacgctggagaccctgaggaatgctggcatcaaggtttggatgctgacaggggacaagctggagacagctacgtgcacagcgaagaatgcacatctggtgaccagaaaccaagacatccacgtttttcggctggtgaccaaccgcggggaggctcacctcgagctgaacgccttccgcaggaagcatgattgtgccctggtcatctcgggagactccctggaggtttgcctcaagtactatgagtacgagttcatggagctggcctgccagtgcccggccgtagtctgctgccgatgtgcccccacccagaaggcccagatcgtgcgcctgcttcaggagcgcacgggcaagctcacctgtgcagtaggggacggaggcaatgacgtcagcatgattcaggaatctgactgcggcgtgggagtggaaggaaaggaaggaaaacaggcttcgttggctgcagacttctccatcactcaatttaagcatcttggccggttgcttatggtgcatggccggaacagctacaagcggtcagccgccctcagccagttcgtgattcacaggagcctctgtatcagcaccatgcaggctgtcttttcctccgtgttttactttgcctccgtccctctctatcaaggattcctcatcattgggtactccacaatttacaccatgtttcctgtgttttctctggtcctggacaaagatgtcaaatcggaagttgccatgctgtatcctgagctctacaaggatcttctcaagggacggccgttgtcctacaagacattcttaatatgggttttgattagcatctatcaagggagcaccatcatgtacggggcgctgctgctgtttgagtcggagttcgtgcacatcgtggccatctccttcacctcgctgatcctcaccgagctgctcatggtggcgctgaccatccagacctggcactggctcatgacagtggcggagctgctcagcctggcctgctacatcgcctccctggtgttcttacacgagttcatcgatgtgtacttcatcgccaccttgtcattcttgtggaaagtctccgtcatcactctggtcagctgcctccccctctatgtcctcaagtacctgcgaagacggttctctccccccagctactcaaagctcacatcataggccgtgcgttcgctggagggggccctggtcttggcgcttccctgatggacagagctcaagttccatttatattaaccgccacctgtggattttgcagtaattgctaacacatgcagttttaatgggaagnggctctgcgcctaaacggagtcctaacgctgcatcaacgggagggagggtcctgaaagagacccatctgggcctgtctgaacccctcgttcttcatgtttaggtgaatatgaatatgttaaagctggtggctcagctgggagatttatatgggtcactgtgcgagcttccttatgacttgaattttgttgtcacatgataaaagtttctgtgtagctgaaggttgtagaaggcttgtgtgtgtgtgtgtgtgtgtgtgtgtgtgtgtgtgtgtttttaaagagtcctaatgtgtatgtactctttatgtctttcttgctcttacaaagaggtgtcagaaaaatagaaagctcttggtgtcggtttgggaggaaaagacagtgacatttggtaaaaagttatccacacaataatctccattcggaaatgctcagtatcgtctccagccagccctgcttatccaggttacactggattcctgggatcgtaaccagtaaatgagaggagagggagagagagtgtcctaagtccaatctgttatccttgatctgattcagcatccatagtgtgtgagttaacttcacctgccacctcgtaaaagaatttcagaggtgtgatcccgctttattgggacctggtaacaatcacaaagccagtggctgtttgagaaggacctcagacattttcagcagagttgttttagcaggaaacgtgccactgaatggcccctaaatgtgtcgacagtgtgataagagactcaactaattctttaggcaacatggcagatgtgactcagatcctccaagaccaaagcggaaaggtcagggggctgggactcttctcttccatagaagcctgtttcctgttaggaggcataatggaagatgaccccacaaaggcagaggcatctttcggaacaacactggtggcagctttcagaacaaggaacccctggtgggaggacgcccaagctacagcgttgggatctgggatctgttccactgccggcagatttcaaggggaacttgctgaaaggcagccagtggtgaagatttctcccctcccaggatggactacatgccggcatgtttcttataaagctgtggctgcttgtttcagaggaagggagtttgcagtcgcgggacgtggtagagcaaggcattcttgggttttcaagttgcttcttgcagaagccacatatgcatgccataagggttaagttggtggatctttaagagccaagtgtggttgagatcttggatttgcgtttacttcttgatgaatacatatccttcaaaccctctgcctggcgctacttctgtgtgcttcagagatgtacatcacagcctggtttctgatgcctactaactcctgctcttggagagctggagacacgaggatcagatagtcccttgcctttggagcactcttgataagcttttgtattttgtgttgtccttttaaaatgttctagaatgactttacgttgcaggtactggttaattggctgttgacaccacatctattttgtcttatgattctgcagttttgcagtacttttctctatctgattcagccatttctgccagagggaaaaggtcggcagaaaagatgtattgagtgaatagttaaggataggatctttgtccaaaaatttcagaaagattgagcaaatctgacgtattcattgagtgagtttctgtgttttcaaaggtggaggagaaatttgtgctggaagtttttaagcctccgttttcttggaaatcagtctgtaacactggcaagtcttaagatagtcccgtttagactttgcagatgctgaacctggctctgtaacgctgggaagtcttaagatagtcctgtttagactttgcaaaccctgtacctggctttgctcggagattcgggatgctggctcctgcaggcagggcgtgtgggagcctcgtcagaaagttttagaggtttccagcagaagcagaatgaagatggtctccctggccttttccttaattctcaattttgattgaggtgcacaagttgacttttaaagccaacgcttaagatactgattgacatcttcaagggagaatgctcccaggaggggctgaagaagccatagttggaagtggaaggtactcgtcagtgttctccacaaacctttttactctgttgtctcagccgcactggggcggaggcggtcaagggtgagaagtaccgacactcaagtgcaaactgccacgtcgttggcccatcccatcagtgggcagctggctgacgccattcactggacggtccctgaacacctaggaatgcacacaccgtgcttctcagacactggagacgcaaaggcaggaggatgcagtccggtgagaggacacgatctttacctgcacaatcagactgtaagcccagcagagaaccccaggggcgcctgggtacttctcggaggtcatcttagttgtggtggggaagacaaagaaataagcaaacaagaaactagagttactatacaagaaactctcctgagtttgtaaaccttaagcataaggattcagttgacctttttcttggttcatcaatctggaaagaacttacataaagcgccattgacactgtcacctgggagctccatgggccgtaagtctttgacagccaatttaatttgaggtcagagggccttgaggtacacagtcagcactgtttgaacacttttcctgaaagcaaaactcacagctccctgcgccctctgacaacactagctatttctgccagagtaagaacttctattactattttattattgttcatatgtcttttgatgatggttgtgtgacagggggaagcaggatctatttggtttcttccccctccccccaccccttcctttttgtctctctttttttttctctaagaaaatcaccagactagtttttccatcttgagtaatttcttatgtgggacagttttgatcctcattttgaaagcatgcgtgtgcacatgtgtgttgcctgtggtgccaggtgagacaggtggcactaactccagctgcttggaaggcatcccaagggcgcatcttaaagttggagcagacctcccttttccagcccctggggccattagaccacgtgctggaactagcattgtaaaattcccatcccagttccactcccctgaagtgaaacccttttttttttgtgacagtaaatcttaaaaatcattgtctctttatgaacatttcctcagtttcttctctgctgaaaatgtaagccatgctactttttaatgtattttgaattttgtgctcattggaaattgatatgctaatgcctcccccaccccccgccagacttttctttttatactttgtcttgtttttactggggtaggctgggcatgcgtgcgtgcctttagggcagcattttaaacctttgccaaaattgcaaatgggacatgtacattcttctgctccatcctacttaaacacctatcagctatttttatctttaaccttttctgtatgtttgaagtgtgtggggggtgtgtgtgtgtgtgaaagagcgagagaatgatgtcatctaaagttttttgaagaattatttggttttcattgcattaaaattctatcactcccagctttgttttcatttaaaaaaatatacaaagagctttgtaaatacaacacattttatttctcccccttcttttaatgtacagcttttttgccacttatatatacttaaaatattcccatgaattatgtccagttcttcttggaaaaaaatttggttttgaatgaacctgcaaagcatcctgcagcgtgagcagctcctccacctggagctccgaagcatcttctcaggccaaagcggcattacccgtgaatctgtcttctccgccacagcatggtttgaggcgcagtctgttaatatagctgggccatgtcagtgactgttgtgtttgtggggtcaggtggggggcatggtatttgcaaaaaaaacaaattatggctaatttattattttgttgcagtggggttaactgtaaactcatgtaagagtctgtgatttcctcattggttgatctctctctctgtaatcctcattgcaaattttcaccaggacagcgttttttgattagaggggagctctggcacagtatgctttaatttagcaggaacttccagatgatttaaattctcgatgctgtgatgacacacatatgatctttcgtgtttctgagcgactctactttcattgtttgccagcgtggctcgttgctgttgcccaataaagcttgtgtacgttc

SEQ ID NO: 341768 - DNA, 5956 bp, Homo sapiens
  misc_feature (1652)..(1652): n is a, c, g, or t
tgcattctgcaggtaactctaaggatcccgttgggctgtcgtgcgggatgaatcaactggagaaattacgttttacatgaagggagcagatgtggtcatggctggcattgtgcagtacaatgactggttggaggaagagtgtggcaacatggcccgagaagggctgcgggtgctcgtggtggcaaagaagtctcttgcagaggagcagtatcaggactttgaagcccgctacgtccaggccaagctgagtgtgcacgaccgctccctcaaagtggccacggtgatcgagagcctggagatggagatggaactgctgtgcctgacgggcgtggaggaccagctgcaggcagatgtgcggcccacgctggagaccctgaggaatgctggcatcaaggtttggatgctgacaggggacaagctggagacagctacgtgcacagcgaagaatgcacatctggtgaccagaaaccaagacatccacgtttttcggctggtgaccaaccgcggggaggctcacctcgagctgaacgccttccgcaggaagcatgattgtgccctggtcatctcgggagactccctggaggtttgcctcaagtactatgagtacgagttcatggagctggcctgccagtgcccggccgtagtctgctgccgatgtgcccccacccagaaggcccagatcgtgcgcctgcttcaggagcgcacgggcaagctcacctgtgcagtaggggacggaggcaatgacgtcagcatgattcaggaatctgactgcggcgtgggagtggaaggaaaggaaggaaaacaggcttcgttggctgcagacttctccatcactcaatttaagcatcttggccggttgcttatggtgcatggccggaacagctacaagcggtcagccgccctcagccagttcgtgattcacaggagcctctgtatcagcaccatgcaggctgtcttttcctccgtgttttactttgcctccgtccctctctatcaaggattcctcatcattgggtactccacaatttacaccatgtttcctgtgttttctctggtcctggacaaagatgtcaaatcggaagttgccatgctgtatcctgagctctacaaggatcttctcaagggacggccgttgtcctacaagacattcttaatatgggttttgattagcatctatcaagggagcaccatcatgtacggggcgctgctgctgtttgagtcggagttcgtgcacatcgtggccatctccttcacctcgctgatcctcaccgagctgctcatggtggcgctgaccatccagacctggcactggctcatgacagtggcggagctgctcagcctggcctgctacatcgcctccctggtgttcttacacgagttcatcgatgtgtacttcatcgccaccttgtcattcttgtggaaagtctccgtcatcactctggtcagctgcctccccctctatgtcctcaagtacctgcgaagacggttctctccccccagctactcaaagctcacatcataggccgtgcgttcgctggagggggccctggtcttggcgcttccctgatggacagagctcaagttccatttatattaaccgccacctgtggattttgcagtaattgctaacacatgcagttttaatgggaagnggctctgcgcctaaacggagtcctaacgctgcatcaacgggagggagggtcctgaaagagacccatctgggcctgtctgaacccctcgttcttcatgtttaggtgaatatgaatatgttaaagctggtggctcagctgggagatttatatgggtcactgtgcgagcttccttatgacttgaattttgttgtcacatgataaaagtttctgtgtagctgaaggttgtagaaggcttgtgtgtgtgtgtgtgtgtgtgtgtgtgtgtgtgtgtgtttttaaagagtcctaatgtgtatgtactctttatgtctttcttgctcttacaaagaggtgtcagaaaaatagaaagctcttggtgtcggtttgggaggaaaagacagtgacatttggtaaaaagttatccacacaataatctccattcggaaatgctcagtatcgtctccagccagccctgcttatccaggttacactggattcctgggatcgtaaccagtaaatgagaggagagggagagagagtgtcctaagtccaatctgttatccttgatctgattcagcatccatagtgtgtgagttaacttcacctgccacctcgtaaaagaatttcagaggtgtgatcccgctttattgggacctggtaacaatcacaaagccagtggctgtttgagaaggacctcagacattttcagcagagttgttttagcaggaaacgtgccactgaatggcccctaaatgtgtcgacagtgtgataagagactcaactaattctttaggcaacatggcagatgtgactcagatcctccaagaccaaagcggaaaggtcagggggctgggactcttctcttccatagaagcctgtttcctgttaggaggcataatggaagatgaccccacaaaggcagaggcatctttcggaacaacactggtggcagctttcagaacaaggaacccctggtgggaggacgcccaagctacagcgttgggatctgggatctgttccactgccggcagatttcaaggggaacttgctgaaaggcagccagtggtgaagatttctcccctcccaggatggactacatgccggcatgtttcttataaagctgtggctgcttgtttcagaggaagggagtttgcagtcgcgggacgtggtagagcaaggcattcttgggttttcaagttgcttcttgcagaagccacatatgcatgccataagggttaagttggtggatctttaagagccaagtgtggttgagatcttggatttgcgtttacttcttgatgaatacatatccttcaaaccctctgcctggcgctacttctgtgtgcttcagagatgtacatcacagcctggtttctgatgcctactaactcctgctcttggagagctggagacacgaggatcagatagtcccttgcctttggagcactcttgataagcttttgtattttgtgttgtccttttaaaatgttctagaatgactttacgttgcaggtactggttaattggctgttgacaccacatctattttgtcttatgattctgcagttttgcagtacttttctctatctgattcagccatttctgccagagggaaaaggtcggcagaaaagatgtattgagtgaatagttaaggataggatctttgtccaaaaatttcagaaagattgagcaaatctgacgtattcattgagtgagtttctgtgttttcaaaggtggaggagaaatttgtgctggaagtttttaagcctccgttttcttggaaatcagtctgtaacactggcaagtcttaagatagtcccgtttagactttgcagatgctgaacctggctctgtaacgctgggaagtcttaagatagtcctgtttagactttgcaaaccctgtacctggctttgctcggagattcgggatgctggctcctgcaggcagggcgtgtgggagcctcgtcagaaagttttagaggtttccagcagaagcagaatgaagatggtctccctggccttttccttaattctcaattttgattgaggtgcacaagttgacttttaaagccaacgcttaagatactgattgacatcttcaagggagaatgctcccaggaggggctgaagaagccatagttggaagtggaaggtactcgtcagtgttctccacaaacctttttactctgttgtctcagccgcactggggcggaggcggtcaagggtgagaagtaccgacactcaagtgcaaactgccacgtcgttggcccatcccatcagtgggcagctggctgacgccattcactggacggtccctgaacacctaggaatgcacacaccgtgcttctcagacactggagacgcaaaggcaggaggatgcagtccggtgagaggacacgatctttacctgcacaatcagactgtaagcccagcagagaaccccaggggcgcctgggtacttctcggaggtcatcttagttgtggtggggaagacaaagaaataagcaaacaagaaactagagttactatacaagaaactctcctgagtttgtaaaccttaagcataaggattcagttgacctttttcttggttcatcaatctggaaagaacttacataaagcgccattgacactgtcacctgggagctccatgggccgtaagtctttgacagccaatttaatttgaggtcagagggccttgaggtacacagtcagcactgtttgaacacttttcctgaaagcaaaactcacagctccctgcgccctctgacaacactagctatttctgccagagtaagaacttctattactattttattattgttcatatgtcttttgatgatggttgtgtgacagggggaagcaggatctatttggtttcttccccctccccccaccccttcctttttgtctctctttttttttctctaagaaaatcaccagactagtttttccatcttgagtaatttcttatgtgggacagttttgatcctcattttgaaagcatgcgtgtgcacatgtgtgttgcctgtggtgccaggtgagacaggtggcactaactccagctgcttggaaggcatcccaagggcgcatcttaaagttggagcagacctcccttttccagcccctggggccattagaccacgtgctggaactagcattgtaaaattcccatcccagttccactcccctgaagtgaaacccttttttttttgtgacagtaaatcttaaaaatcattgtctctttatgaacatttcctcagtttcttctctgctgaaaatgtaagccatgctactttttaatgtattttgaattttgtgctcattggaaattgatatgctaatgcctcccccaccccccgccagacttttctttttatactttgtcttgtttttactggggtaggctgggcatgcgtgcgtgcctttagggcagcattttaaacctttgccaaaattgcaaatgggacatgtacattcttctgctccatcctacttaaacacctatcagctatttttatctttaaccttttctgtatgtttgaagtgtgtggggggtgtgtgtgtgtgtgaaagagcgagagaatgatgtcatctaaagttttttgaagaattatttggttttcattgcattaaaattctatcactcccagctttgttttcatttaaaaaaatatacaaagagctttgtaaatacaacacattttatttctcccccttcttttaatgtacagcttttttgccacttatatatacttaaaatattcccatgaattatgtccagttcttcttggaaaaaaatttggttttgaatgaacctgcaaagcatcctgcagcgtgagcagctcctccacctggagctccgaagcatcttctcaggccaaagcggcattacccgtgaatctgtcttctccgccacagcatggtttgaggcgcagtctgttaatatagctgggccatgtcagtgactgttgtgtttgtggggtcaggtggggggcatggtatttgcaaaaaaaacaaattatggctaatttattattttgttgcagtggggttaactgtaaactcatgtaagagtctgtgatttcctcattggttgatctctctctctgtaatcctcattgcaaattttcaccaggacagcgttttttgattagaggggagctctggcacagtatgctttaatttagcaggaacttccagatgatttaaattctcgatgctgtgatgacacacatatgatctttcgtgtttctgagcgactctactttcattgtttgccagcgtggctcgttgctgttgcccaataaagcttgtgtacgttc

SEQ ID NO: 341769 - DNA, 5605 bp, Homo sapiens
  misc_feature (1301)..(1301): n is a, c, g, or t
cttgaacctgctgctttgcaggcacagtgaaggtgaagagttctaacatccaagttggagaccttatcatcgttgaaaagaaccagcgggtccctgccgacatgatcttcctgaggacatcagaaaaaaacgggtcatgcttcttgcggacggatcagctggatggggagacggactggaagctgcggcttcccgtggcctgcacgcagaggctccccacggccgccgaccttcttcagattcgatcgtatgtgtacgcagaagagccaaatattgacattcacaacttcgtgggaacttttacccgagaagacagcgaccccccgatcagcgagagcctgagcatagagaacacgctgtgggctggcactgtggtcgcatcaggtactgttgtgggtgttgttctttacactggcagagaactccggagtgtcatgaatacgaaggaaaacaggcttcgttggctgcagacttctccatcactcaatttaagcatcttggccggttgcttatggtgcatggccggaacagctacaagcggtcagccgccctcagccagttcgtgattcacaggagcctctgtatcagcaccatgcaggctgtcttttcctccgtgttttactttgcctccgtccctctctatcaaggattcctcatcattgggtactccacaatttacaccatgtttcctgtgttttctctggtcctggacaaagatgtcaaatcggaagttgccatgctgtatcctgagctctacaaggatcttctcaagggacggccgttgtcctacaagacattcttaatatgggttttgattagcatctatcaagggagcaccatcatgtacggggcgctgctgctgtttgagtcggagttcgtgcacatcgtggccatctccttcacctcgctgatcctcaccgagctgctcatggtggcgctgaccatccagacctggcactggctcatgacagtggcggagctgctcagcctggcctgctacatcgcctccctggtgttcttacacgagttcatcgatgtgtacttcatcgccaccttgtcattcttgtggaaagtctccgtcatcactctggtcagctgcctccccctctatgtcctcaagtacctgcgaagacggttctctccccccagctactcaaagctcacatcataggccgtgcgttcgctggagggggccctggtcttggcgcttccctgatggacagagctcaagttccatttatattaaccgccacctgtggattttgcagtaattgctaacacatgcagttttaatgggaagnggctctgcgcctaaacggagtcctaacgctgcatcaacgggagggagggtcctgaaagagacccatctgggcctgtctgaacccctcgttcttcatgtttaggtgaatatgaatatgttaaagctggtggctcagctgggagatttatatgggtcactgtgcgagcttccttatgacttgaattttgttgtcacatgataaaagtttctgtgtagctgaaggttgtagaaggcttgtgtgtgtgtgtgtgtgtgtgtgtgtgtgtgtgtgtgtttttaaagagtcctaatgtgtatgtactctttatgtctttcttgctcttacaaagaggtgtcagaaaaatagaaagctcttggtgtcggtttgggaggaaaagacagtgacatttggtaaaaagttatccacacaataatctccattcggaaatgctcagtatcgtctccagccagccctgcttatccaggttacactggattcctgggatcgtaaccagtaaatgagaggagagggagagagagtgtcctaagtccaatctgttatccttgatctgattcagcatccatagtgtgtgagttaacttcacctgccacctcgtaaaagaatttcagaggtgtgatcccgctttattgggacctggtaacaatcacaaagccagtggctgtttgagaaggacctcagacattttcagcagagttgttttagcaggaaacgtgccactgaatggcccctaaatgtgtcgacagtgtgataagagactcaactaattctttaggcaacatggcagatgtgactcagatcctccaagaccaaagcggaaaggtcagggggctgggactcttctcttccatagaagcctgtttcctgttaggaggcataatggaagatgaccccacaaaggcagaggcatctttcggaacaacactggtggcagctttcagaacaaggaacccctggtgggaggacgcccaagctacagcgttgggatctgggatctgttccactgccggcagatttcaaggggaacttgctgaaaggcagccagtggtgaagatttctcccctcccaggatggactacatgccggcatgtttcttataaagctgtggctgcttgtttcagaggaagggagtttgcagtcgcgggacgtggtagagcaaggcattcttgggttttcaagttgcttcttgcagaagccacatatgcatgccataagggttaagttggtggatctttaagagccaagtgtggttgagatcttggatttgcgtttacttcttgatgaatacatatccttcaaaccctctgcctggcgctacttctgtgtgcttcagagatgtacatcacagcctggtttctgatgcctactaactcctgctcttggagagctggagacacgaggatcagatagtcccttgcctttggagcactcttgataagcttttgtattttgtgttgtccttttaaaatgttctagaatgactttacgttgcaggtactggttaattggctgttgacaccacatctattttgtcttatgattctgcagttttgcagtacttttctctatctgattcagccatttctgccagagggaaaaggtcggcagaaaagatgtattgagtgaatagttaaggataggatctttgtccaaaaatttcagaaagattgagcaaatctgacgtattcattgagtgagtttctgtgttttcaaaggtggaggagaaatttgtgctggaagtttttaagcctccgttttcttggaaatcagtctgtaacactggcaagtcttaagatagtcccgtttagactttgcagatgctgaacctggctctgtaacgctgggaagtcttaagatagtcctgtttagactttgcaaaccctgtacctggctttgctcggagattcgggatgctggctcctgcaggcagggcgtgtgggagcctcgtcagaaagttttagaggtttccagcagaagcagaatgaagatggtctccctggccttttccttaattctcaattttgattgaggtgcacaagttgacttttaaagccaacgcttaagatactgattgacatcttcaagggagaatgctcccaggaggggctgaagaagccatagttggaagtggaaggtactcgtcagtgttctccacaaacctttttactctgttgtctcagccgcactggggcggaggcggtcaagggtgagaagtaccgacactcaagtgcaaactgccacgtcgttggcccatcccatcagtgggcagctggctgacgccattcactggacggtccctgaacacctaggaatgcacacaccgtgcttctcagacactggagacgcaaaggcaggaggatgcagtccggtgagaggacacgatctttacctgcacaatcagactgtaagcccagcagagaaccccaggggcgcctgggtacttctcggaggtcatcttagttgtggtggggaagacaaagaaataagcaaacaagaaactagagttactatacaagaaactctcctgagtttgtaaaccttaagcataaggattcagttgacctttttcttggttcatcaatctggaaagaacttacataaagcgccattgacactgtcacctgggagctccatgggccgtaagtctttgacagccaatttaatttgaggtcagagggccttgaggtacacagtcagcactgtttgaacacttttcctgaaagcaaaactcacagctccctgcgccctctgacaacactagctatttctgccagagtaagaacttctattactattttattattgttcatatgtcttttgatgatggttgtgtgacagggggaagcaggatctatttggtttcttccccctccccccaccccttcctttttgtctctctttttttttctctaagaaaatcaccagactagtttttccatcttgagtaatttcttatgtgggacagttttgatcctcattttgaaagcatgcgtgtgcacatgtgtgttgcctgtggtgccaggtgagacaggtggcactaactccagctgcttggaaggcatcccaagggcgcatcttaaagttggagcagacctcccttttccagcccctggggccattagaccacgtgctggaactagcattgtaaaattcccatcccagttccactcccctgaagtgaaacccttttttttttgtgacagtaaatcttaaaaatcattgtctctttatgaacatttcctcagtttcttctctgctgaaaatgtaagccatgctactttttaatgtattttgaattttgtgctcattggaaattgatatgctaatgcctcccccaccccccgccagacttttctttttatactttgtcttgtttttactggggtaggctgggcatgcgtgcgtgcctttagggcagcattttaaacctttgccaaaattgcaaatgggacatgtacattcttctgctccatcctacttaaacacctatcagctatttttatctttaaccttttctgtatgtttgaagtgtgtggggggtgtgtgtgtgtgtgaaagagcgagagaatgatgtcatctaaagttttttgaagaattatttggttttcattgcattaaaattctatcactcccagctttgttttcatttaaaaaaatatacaaagagctttgtaaatacaacacattttatttctcccccttcttttaatgtacagcttttttgccacttatatatacttaaaatattcccatgaattatgtccagttcttcttggaaaaaaatttggttttgaatgaacctgcaaagcatcctgcagcgtgagcagctcctccacctggagctccgaagcatcttctcaggccaaagcggcattacccgtgaatctgtcttctccgccacagcatggtttgaggcgcagtctgttaatatagctgggccatgtcagtgactgttgtgtttgtggggtcaggtggggggcatggtatttgcaaaaaaaacaaattatggctaatttattattttgttgcagtggggttaactgtaaactcatgtaagagtctgtgatttcctcattggttgatctctctctctgtaatcctcattgcaaattttcaccaggacagcgttttttgattagaggggagctctggcacagtatgctttaatttagcaggaacttccagatgatttaaattctcgatgctgtgatgacacacatatgatctttcgtgtttctgagcgactctactttcattgtttgccagcgtggctcgttgctgttgcccaataaagcttgtgtacgttc

SEQ ID NO: 341770 - DNA, 7800 bp, Homo sapiens
  misc_feature (3233)..(3233): n is a, c, g, or t
gcggatggacagcaggccccgcgccgggtgctgcgagtggctgagatgctgcggtggaggggaggccaggccccgcactgtctggctggggcaccccgagaagagagaccagaggtatcctcggaatgtcatcaacaatcagaagtacaatttcttcacctttcttcctggggtgctgttcaaccagttcaaatactttttcaacctctatttcttacttcttgcctgctctcagtttgttcccgaaatgagacttggtgcactctatacctactgggttcccctgggcttcgtgctggccgtcactgtcatccgtgaggcggtggaggagatccgatgctacgtgcgggacaaggaagtcaactcccaggtctacagccggctcacagcacgaggcacagtgaaggtgaagagttctaacatccaagttggagaccttatcatcgttgaaaagaaccagcgggtccctgccgacatgatcttcctgaggacatcagaaaaaaacgggtcatgcttcttgcggacggatcagctggatggggagacggactggaagctgcggcttcccgtggcctgcacgcagaggctccccacggccgccgaccttcttcagattcgatcgtatgtgtacgcagaagagccaaatattgacattcacaacttcgtgggaacttttacccgagaagacagcgaccccccgatcagcgagagcctgagcatagagaacacgctgtgggctggcactgtggtcgcatcaggtactgttgtgggtgttgttctttacactggcagagaactccggagtgtcatgaatacctcaaatccccgaagtaagatcggcctgttcgacttggaagtgaactgcctcaccaagatcctctttggtgccctggtggtggtctcgctggtcatggttgcccttcagcactttgcaggccgttggtacctgcagatcatccgcttcctcctcttgttttccaacatcatccccattagtttgcgcgtgaacctggacatgggcaagatcgtgtacagctgggtgattcgaagggactcaaaaatccccgggaccgtggttcgctccagcacgattcctgagcagctgggcaggatttcgtacttactcacagacaagacaggcactcttacccagaacgagatgattttcaaacggctccatctcggaacagtagcctacggcctcgactcaatggacgaagtacaaagccacattttcagcatttacacccagcaatcccaggacccaccggctcagaagggcccaacgctcaccactaaggtccggcggaccatgagcagccgcgtgcacgaagccgtgaaggccatcgcgctctgccacaacgtgactcccgtgtatgagtccaacggtgtgactgatcaggctgaggccgagaagcagtacgaagactcctgccgcgtataccaggcatccagccccgatgaggtggccctggtacagtggacggaaagtgtgggcttaaccctggtgggccgagaccagtcttccatgcagctgaggacccctggcgaccagatcctgaacttcaccatcctacagatcttccctttcacctatgaaagcaaacgtatgggcatcatcgtgcgggatgaatcaactggagaaattacgttttacatgaagggagcagatgtggtcatggctggcattgtgcagtacaatgactggttggaggaagagtgtggcaacatggcccgagaagggctgcgggtgctcgtggtggcaaagaagtctcttgcagaggagcagtatcaggactttgaagcccgctacgtccaggccaagctgagtgtgcacgaccgctccctcaaagtggccacggtgatcgagagcctggagatggagatggaactgctgtgcctgacgggcgtggaggaccagctgcaggcagatgtgcggcccacgctggagaccctgaggaatgctggcatcaaggtttggatgctgacaggggacaagctggagacagctacgtgcacagcgaagaatgcacatctggtgaccagaaaccaagacatccacgtttttcggctggtgaccaaccgcggggaggctcacctcgagctgaacgccttccgcaggaagcatgattgtgccctggtcatctcgggagactccctggaggtttgcctcaagtactatgagtacgagttcatggagctggcctgccagtgcccggccgtagtctgctgccgatgtgcccccacccagaaggcccagatcgtgcgcctgcttcaggagcgcacgggcaagctcacctgtgcagtaggggacggaggcaatgacgtcagcatgattcaggaatctgactgcggcgtgggagtggaaggaaaggaaggaaaacaggcttcgttggctgcagacttctccatcactcaatttaagcatcttggccggttgcttatggtgcatggccggaacagctacaagcggtcagccgccctcagccagttcgtgattcacaggagcctctgtatcagcaccatgcaggctgtcttttcctccgtgttttactttgcctccgtccctctctatcaaggattcctcatcattgggtactccacaatttacaccatgtttcctgtgttttctctggtcctggacaaagatgtcaaatcggaagttgccatgctgtatcctgagctctacaaggatcttctcaagggacggccgttgtcctacaagacattcttaatatgggttttgattagcatctatcaagggagcaccatcatgtacggggcgctgctgctgtttgagtcggagttcgtgcacatcgtggccatctccttcacctcgctgatcctcaccgagctgctcatggtggcgctgaccatccagacctggcactggctcatgacagtggcggagctgctcagcctggcctgctacatcgcctccctggtgttcttacacgagttcatcgatgtgtacttcatcgccaccttgtcattcttgtggaaagtctccgtcatcactctggtcagctgcctccccctctatgtcctcaagtacctgcgaagacggttctctccccccagctactcaaagctcacatcataggccgtgcgttcgctggagggggccctggtcttggcgcttccctgatggacagagctcaagttccatttatattaaccgccacctgtggattttgcagtaattgctaacacatgcagttttaatgggaagnggctctgcgcctaaacggagtcctaacgctgcatcaacgggagggagggtcctgaaagagacccatctgggcctgtctgaacccctcgttcttcatgtttaggtgaatatgaatatgttaaagctggtggctcagctgggagatttatatgggtcactgtgcgagcttccttatgacttgaattttgttgtcacatgataaaagtttctgtgtagctgaaggttgtagaaggcttgtgtgtgtgtgtgtgtgtgtgtgtgtgtgtgtgtgtgtttttaaagagtcctaatgtgtatgtactctttatgtctttcttgctcttacaaagaggtgtcagaaaaatagaaagctcttggtgtcggtttgggaggaaaagacagtgacatttggtaaaaagttatccacacaataatctccattcggaaatgctcagtatcgtctccagccagccctgcttatccaggttacactggattcctgggatcgtaaccagtaaatgagaggagagggagagagagtgtcctaagtccaatctgttatccttgatctgattcagcatccatagtgtgtgagttaacttcacctgccacctcgtaaaagaatttcagaggtgtgatcccgctttattgggacctggtaacaatcacaaagccagtggctgtttgagaaggacctcagacattttcagcagagttgttttagcaggaaacgtgccactgaatggcccctaaatgtgtcgacagtgtgataagagactcaactaattctttaggcaacatggcagatgtgactcagatcctccaagaccaaagcggaaaggtcagggggctgggactcttctcttccatagaagcctgtttcctgttaggaggcataatggaagatgaccccacaaaggcagaggcatctttcggaacaacactggtggcagctttcagaacaaggaacccctggtgggaggacgcccaagctacagcgttgggatctgggatctgttccactgccggcagatttcaaggggaacttgctgaaaggcagccagtggtgaagatttctcccctcccaggatggactacatgccggcatgtttcttataaagctgtggctgcttgtttcagaggaagggagtttgcagtcgcgggacgtggtagagcaaggcattcttgggttttcaagttgcttcttgcagaagccacatatgcatgccataagggttaagttggtggatctttaagagccaagtgtggttgagatcttggatttgcgtttacttcttgatgaatacatatccttcaaaccctctgcctggcgctacttctgtgtgcttcagagatgtacatcacagcctggtttctgatgcctactaactcctgctcttggagagctggagacacgaggatcagatagtcccttgcctttggagcactcttgataagcttttgtattttgtgttgtccttttaaaatgttctagaatgactttacgttgcaggtactggttaattggctgttgacaccacatctattttgtcttatgattctgcagttttgcagtacttttctctatctgattcagccatttctgccagagggaaaaggtcggcagaaaagatgtattgagtgaatagttaaggataggatctttgtccaaaaatttcagaaagattgagcaaatctgacgtattcattgagtgagtttctgtgttttcaaaggtggaggagaaatttgtgctggaagtttttaagcctccgttttcttggaaatcagtctgtaacactggcaagtcttaagatagtcccgtttagactttgcagatgctgaacctggctctgtaacgctgggaagtcttaagatagtcctgtttagactttgcaaaccctgtacctggctttgctcggagattcgggatgctggctcctgcaggcagggcgtgtgggagcctcgtcagaaagttttagaggtttccagcagaagcagaatgaagatggtctccctggccttttccttaattctcaattttgattgaggtgcacaagttgacttttaaagccaacgcttaagatactgattgacatcttcaagggagaatgctcccaggaggggctgaagaagccatagttggaagtggaaggtactcgtcagtgttctccacaaacctttttactctgttgtctcagccgcactggggcggaggcggtcaagggtgagaagtaccgacactcaagtgcaaactgccacgtcgttggcccatcccatcagtgggcagctggctgacgccattcactggacggtccctgaacacctaggaatgcacacaccgtgcttctcagacactggagacgcaaaggcaggaggatgcagtccggtgagaggacacgatctttacctgcacaatcagactgtaagcccagcagagaaccccaggggcgcctgggtacttctcggaggtcatcttagttgtggtggggaagacaaagaaataagcaaacaagaaactagagttactatacaagaaactctcctgagtttgtaaaccttaagcataaggattcagttgacctttttcttggttcatcaatctggaaagaacttacataaagcgccattgacactgtcacctgggagctccatgggccgtaagtctttgacagccaatttaatttgaggtcagagggccttgaggtacacagtcagcactgtttgaacacttttcctgaaagcaaaactcacagctccctgcgccctctgacaacactagctatttctgccagagtaagaacttctattactattttattattgttcatatgtcttttgatgatggttgtgtgacagggggaagcaggatctatttggtttcttccccctccccccaccccttcctttttgtctctctttttttttctctaagaaaatcaccagactagtttttccatcttgagtaatttcttatgtgggacagttttgatcctcattttgaaagcatgcgtgtgcacatgtgtgttgcctgtggtgccaggtgagacaggtggcactaactccagctgcttggaaggcatcccaagggcgcatcttaaagttggagcagacctcccttttccagcccctggggccattagaccacgtgctggaactagcattgtaaaattcccatcccagttccactcccctgaagtgaaacccttttttttttgtgacagtaaatcttaaaaatcattgtctctttatgaacatttcctcagtttcttctctgctgaaaatgtaagccatgctactttttaatgtattttgaattttgtgctcattggaaattgatatgctaatgcctcccccaccccccgccagacttttctttttatactttgtcttgtttttactggggtaggctgggcatgcgtgcgtgcctttagggcagcattttaaacctttgccaaaattgcaaatgggacatgtacattcttctgctccatcctacttaaacacctatcagctatttttatctttaaccttttctgtatgtttgaagtgtgtggggggtgtgtgtgtgtgtgaaagagcgagagaatgatgtcatctaaagttttttgaagaattatttggttttcattgcattaaaattctatcactcccagctttgttttcatttaaaaaaatatacaaagagctttgtaaatacaacacattttatttctcccccttcttttaatgtacagcttttttgccacttatatatacttaaaatattcccatgaattatgtccagttcttcttggaaaaaaatttggttttgaatgaacctgcaaagcatcctgcagcgtgagcagctcctccacctggagctccgaagcatcttctcaggccaaagcggcattacccgtgaatctgtcttctccgccacagcatggtttgaggcgcagtctgttaatatagctgggccatgtcagtgactgttgtgtttgtggggtcaggtggggggcatggtatttgcaaaaaaaacaaattatggctaatttattattttgttgcagtggggttaactgtaaactcatgtaagagtctgtgatttcctcattggttgatctctctctctgtaatcctcattgcaaattttcaccaggacagcgttttttgattagaggggagctctggcacagtatgctttaatttagcaggaacttccagatgatttaaattctcgatgctgtgatgacacacatatgatctttcgtgtttctgagcgactctactttcattgtttgccagcgtggctcgttgctgttgcccaataaagcttgtgtacgttctgccttgggggattattttaatttgtacagaaacatgaattctggtatcaaaatgaggactttttattataacgctcctattttttctttatttcatggtacatgaaatgtaaagaaaactctttccagttcagaaaattattttgattttggcaaaaaaaaccccaaatcaatgcatgttatttattattttgtactattgtccatcccagacgtgtcagaatttcaaaaggtgatagatataaatggaaaataagatgaaa

SEQ ID NO: 341771 - DNA, 3208 bp, Homo sapiens
ccatcaatatcacacaataccggatgttggtcattaaggttcttgtagttgaagtacaacgatgatttttcatgtcattggtcgtggttagattccatgtgagaataatgacaatatatattgcatttattttaagtactatttttgttattgggtttgttggatatccttcaaaccctctgcctggcgctacttctgtgtgcttcagagatgtacatcacagcctggtttctgatgcctactaactcctgctcttggagagctggagacacgaggatcagatagtcccttgcctttggagcactcttgataagcttttgtattttgtgttgtccttttaaaatgttctagaatgactttacgttgcaggtactggttaattggctgttgacaccacatctattttgtcttatgattctgcagttttgcagtacttttctctatctgattcagccatttctgccagagggaaaaggtcggcagaaaagatgtattgagtgaatagttaaggataggatctttgtccaaaaatttcagaaagattgagcaaatctgacgtattcattgagtgagtttctgtgttttcaaaggtggaggagaaatttgtgctggaagtttttaagcctccgttttcttggaaatcagtctgtaacactggcaagtcttaagatagtcccgtttagactttgcagatgctgaacctggctctgtaacgctgggaagtcttaagatagtcctgtttagactttgcaaaccctgtacctggctttgctcggagattcgggatgctggctcctgcaggcagggcgtgtgggagcctcgtcagaaagttttagaggtttccagcagaagcagaatgaagatggtctccctggccttttccttaattctcaattttgattgaggtgcacaagttgacttttaaagccaacgcttaagatactgattgacatcttcaagggagaatgctcccaggaggggctgaagaagccatagttggaagtggaaggtactcgtcagtgttctccacaaacctttttactctgttgtctcagccgcactggggcggaggcggtcaagggtgagaagtaccgacactcaagtgcaaactgccacgtcgttggcccatcccatcagtgggcagctggctgacgccattcactggacggtccctgaacacctaggaatgcacacaccgtgcttctcagacactggagacgcaaaggcaggaggatgcagtccggtgagaggacacgatctttacctgcacaatcagactgtaagcccagcagagaaccccaggggcgcctgggtacttctcggaggtcatcttagttgtggtggggaagacaaagaaataagcaaacaagaaactagagttactatacaagaaactctcctgagtttgtaaaccttaagcataaggattcagttgacctttttcttggttcatcaatctggaaagaacttacataaagcgccattgacactgtcacctgggagctccatgggccgtaagtctttgacagccaatttaatttgaggtcagagggccttgaggtacacagtcagcactgtttgaacacttttcctgaaagcaaaactcacagctccctgcgccctctgacaacactagctatttctgccagagtaagaacttctattactattttattattgttcatatgtcttttgatgatggttgtgtgacagggggaagcaggatctatttggtttcttccccctccccccaccccttcctttttgtctctctttttttttctctaagaaaatcaccagactagtttttccatcttgagtaatttcttatgtgggacagttttgatcctcattttgaaagcatgcgtgtgcacatgtgtgttgcctgtggtgccaggtgagacaggtggcactaactccagctgcttggaaggcatcccaagggcgcatcttaaagttggagcagacctcccttttccagcccctggggccattagaccacgtgctggaactagcattgtaaaattcccatcccagttccactcccctgaagtgaaacccttttttttttgtgacagtaaatcttaaaaatcattgtctctttatgaacatttcctcagtttcttctctgctgaaaatgtaagccatgctactttttaatgtattttgaattttgtgctcattggaaattgatatgctaatgcctcccccaccccccgccagacttttctttttatactttgtcttgtttttactggggtaggctgggcatgcgtgcgtgcctttagggcagcattttaaacctttgccaaaattgcaaatgggacatgtacattcttctgctccatcctacttaaacacctatcagctatttttatctttaaccttttctgtatgtttgaagtgtgtggggggtgtgtgtgtgtgtgaaagagcgagagaatgatgtcatctaaagttttttgaagaattatttggttttcattgcattaaaattctatcactcccagctttgttttcatttaaaaaaatatacaaagagctttgtaaatacaacacattttatttctcccccttcttttaatgtacagcttttttgccacttatatatacttaaaatattcccatgaattatgtccagttcttcttggaaaaaaatttggttttgaatgaacctgcaaagcatcctgcagcgtgagcagctcctccacctggagctccgaagcatcttctcaggccaaagcggcattacccgtgaatctgtcttctccgccacagcatggtttgaggcgcagtctgttaatatagctgggccatgtcagtgactgttgtgtttgtggggtcaggtggggggcatggtatttgcaaaaaaaacaaattatggctaatttattattttgttgcagtggggttaactgtaaactcatgtaagagtctgtgatttcctcattggttgatctctctctctgtaatcctcattgcaaattttcaccaggacagcgttttttgattagaggggagctctggcacagtatgctttaatttagcaggaacttccagatgatttaaattctcgatgctgtgatgacacacatatgatctttcgtgtttctgagcgactctactttcattgtttgccagcgtggctcgttgctgttgcccaataaagcttgtgtacgttcaaaaaaaaaaaacaaacagaaacaaa

SEQ ID NO: 341772 - DNA, 2208 bp, Homo sapiens
tttgctttcagaaaaagtgttcaaacagtgctgactgtgtacctcaaggccctctgacctcaaattaattggcggtcaagggtgagaagtaccgacactcaagtgcaaactgccacgtcgttggcccatcccatcagtgggcagctggctgacgccattcactggacggtccctgaacacctaggaatgcacacaccgtgcttctcagacactggagacgcaaaggcaggaggatgcagtccggtgagaggacacgatctttacctgcacaatcagactgtaagcccagcagagaaccccaggggcgcctgggtacttctcggaggtcatcttagttgtggtggggaagacaaagaaataagcaaacaagaaactagagttactatacaagaaactctcctgagtttgtaaaccttaagcataaggattcagttgacctttttcttggttcatcaatctggaaagaacttacataaagcgccattgacactgtcacctgggagctccatgggccgtaagtctttgacagccaatttaatttgaggtcagagggccttgaggtacacagtcagcactgtttgaacacttttcctgaaagcaaaactcacagctccctgcgccctctgacaacactagctatttctgccagagtaagaacttctattactattttattattgttcatatgtcttttgatgatggttgtgtgacagggggaagcaggatctatttggtttcttccccctccccccaccccttcctttttgtctctctttttttttctctaagaaaatcaccagactagtttttccatcttgagtaatttcttatgtgggacagttttgatcctcattttgaaagcatgcgtgtgcacatgtgtgttgcctgtggtgccaggtgagacaggtggcactaactccagctgcttggaaggcatcccaagggcgcatcttaaagttggagcagacctcccttttccagcccctggggccattagaccacgtgctggaactagcattgtaaaattcccatcccagttccactcccctgaagtgaaacccttttttttttgtgacagtaaatcttaaaaatcattgtctctttatgaacatttcctcagtttcttctctgctgaaaatgtaagccatgctactttttaatgtattttgaattttgtgctcattggaaattgatatgctaatgcctcccccaccccccgccagacttttctttttatactttgtcttgtttttactggggtaggctgggcatgcgtgcgtgcctttagggcagcattttaaacctttgccaaaattgcaaatgggacatgtacattcttctgctccatcctacttaaacacctatcagctatttttatctttaaccttttctgtatgtttgaagtgtgtggggggtgtgtgtgtgtgtgaaagagcgagagaatgatgtcatctaaagttttttgaagaattatttggttttcattgcattaaaattctatcactcccagctttgttttcatttaaaaaaatatacaaagagctttgtaaatacaacacattttatttctcccccttcttttaatgtacagcttttttgccacttatatatacttaaaatattcccatgaattatgtccagttcttcttggaaaaaaatttggttttgaatgaacctgcaaagcatcctgcagcgtgagcagctcctccacctggagctccgaagcatcttctcaggccaaagcggcattacccgtgaatctgtcttctccgccacagcatggtttgaggcgcagtctgttaatatagctgggccatgtcagtgactgttgtgtttgtggggtcaggtggggggcatggtatttgcaaaaaaaacaaattatggctaatttattattttgttgcagtggggttaactgtaaactcatgtaagagtctgtgatttcctcattggttgatctctctctctgtaatcctcattgcaaattttcaccaggacagcgttttttgattagaggggagctctggcacagtatgctttaatttagcaggaacttccagatgatttaaattctcgatgctgtgatgacacacatatgatctttcgtgtttctgagcgactctactttcattgtttgccagcgtggctcgttgctgttgcccaataaagcttgtgtacgttcaaaaaaaaaaaacaaacagaaacaaa

SEQ ID NO: 341773 - DNA, 6989 bp, Homo sapiens
  misc_feature (3233)..(3233): n is a, c, g, or t
gcggatggacagcaggccccgcgccgggtgctgcgagtggctgagatgctgcggtggaggggaggccaggccccgcactgtctggctggggcaccccgagaagagagaccagaggtatcctcggaatgtcatcaacaatcagaagtacaatttcttcacctttcttcctggggtgctgttcaaccagttcaaatactttttcaacctctatttcttacttcttgcctgctctcagtttgttcccgaaatgagacttggtgcactctatacctactgggttcccctgggcttcgtgctggccgtcactgtcatccgtgaggcggtggaggagatccgatgctacgtgcgggacaaggaagtcaactcccaggtctacagccggctcacagcacgaggcacagtgaaggtgaagagttctaacatccaagttggagaccttatcatcgttgaaaagaaccagcgggtccctgccgacatgatcttcctgaggacatcagaaaaaaacgggtcatgcttcttgcggacggatcagctggatggggagacggactggaagctgcggcttcccgtggcctgcacgcagaggctccccacggccgccgaccttcttcagattcgatcgtatgtgtacgcagaagagccaaatattgacattcacaacttcgtgggaacttttacccgagaagacagcgaccccccgatcagcgagagcctgagcatagagaacacgctgtgggctggcactgtggtcgcatcaggtactgttgtgggtgttgttctttacactggcagagaactccggagtgtcatgaatacctcaaatccccgaagtaagatcggcctgttcgacttggaagtgaactgcctcaccaagatcctctttggtgccctggtggtggtctcgctggtcatggttgcccttcagcactttgcaggccgttggtacctgcagatcatccgcttcctcctcttgttttccaacatcatccccattagtttgcgcgtgaacctggacatgggcaagatcgtgtacagctgggtgattcgaagggactcaaaaatccccgggaccgtggttcgctccagcacgattcctgagcagctgggcaggatttcgtacttactcacagacaagacaggcactcttacccagaacgagatgattttcaaacggctccatctcggaacagtagcctacggcctcgactcaatggacgaagtacaaagccacattttcagcatttacacccagcaatcccaggacccaccggctcagaagggcccaacgctcaccactaaggtccggcggaccatgagcagccgcgtgcacgaagccgtgaaggccatcgcgctctgccacaacgtgactcccgtgtatgagtccaacggtgtgactgatcaggctgaggccgagaagcagtacgaagactcctgccgcgtataccaggcatccagccccgatgaggtggccctggtacagtggacggaaagtgtgggcttaaccctggtgggccgagaccagtcttccatgcagctgaggacccctggcgaccagatcctgaacttcaccatcctacagatcttccctttcacctatgaaagcaaacgtatgggcatcatcgtgcgggatgaatcaactggagaaattacgttttacatgaagggagcagatgtggtcatggctggcattgtgcagtacaatgactggttggaggaagagtgtggcaacatggcccgagaagggctgcgggtgctcgtggtggcaaagaagtctcttgcagaggagcagtatcaggactttgaagcccgctacgtccaggccaagctgagtgtgcacgaccgctccctcaaagtggccacggtgatcgagagcctggagatggagatggaactgctgtgcctgacgggcgtggaggaccagctgcaggcagatgtgcggcccacgctggagaccctgaggaatgctggcatcaaggtttggatgctgacaggggacaagctggagacagctacgtgcacagcgaagaatgcacatctggtgaccagaaaccaagacatccacgtttttcggctggtgaccaaccgcggggaggctcacctcgagctgaacgccttccgcaggaagcatgattgtgccctggtcatctcgggagactccctggaggtttgcctcaagtactatgagtacgagttcatggagctggcctgccagtgcccggccgtagtctgctgccgatgtgcccccacccagaaggcccagatcgtgcgcctgcttcaggagcgcacgggcaagctcacctgtgcagtaggggacggaggcaatgacgtcagcatgattcaggaatctgactgcggcgtgggagtggaaggaaaggaaggaaaacaggcttcgttggctgcagacttctccatcactcaatttaagcatcttggccggttgcttatggtgcatggccggaacagctacaagcggtcagccgccctcagccagttcgtgattcacaggagcctctgtatcagcaccatgcaggctgtcttttcctccgtgttttactttgcctccgtccctctctatcaaggattcctcatcattgggtactccacaatttacaccatgtttcctgtgttttctctggtcctggacaaagatgtcaaatcggaagttgccatgctgtatcctgagctctacaaggatcttctcaagggacggccgttgtcctacaagacattcttaatatgggttttgattagcatctatcaagggagcaccatcatgtacggggcgctgctgctgtttgagtcggagttcgtgcacatcgtggccatctccttcacctcgctgatcctcaccgagctgctcatggtggcgctgaccatccagacctggcactggctcatgacagtggcggagctgctcagcctggcctgctacatcgcctccctggtgttcttacacgagttcatcgatgtgtacttcatcgccaccttgtcattcttgtggaaagtctccgtcatcactctggtcagctgcctccccctctatgtcctcaagtacctgcgaagacggttctctccccccagctactcaaagctcacatcataggccgtgcgttcgctggagggggccctggtcttggcgcttccctgatggacagagctcaagttccatttatattaaccgccacctgtggattttgcagtaattgctaacacatgcagttttaatgggaagnggctctgcgcctaaacggagtcctaacgctgcatcaacgggagggagggtcctgaaagagacccatctgggcctgtctgaacccctcgttcttcatgtttaggtgaatatgaatatgttaaagctggtggctcagctgggagatttatatgggtcactgtgcgagcttccttatgacttgaattttgttgtcacatgataaaagtttctgtgtagctgaaggttgtagaaggcttgtgtgtgtgtgtgtgtgtgtgtgtgtgtgtgtgtgtgtttttaaagagtcctaatgtgtatgtactctttatgtctttcttgctcttacaaagaggtgtcagaaaaatagaaagctcttggtgtcggtttgggaggaaaagacagtgacatttggtaaaaagttatccacacaataatctccattcggaaatgctcagtatcgtctccagccagccctgcttatccaggttacactggattcctgggatcgtaaccagtaaatgagaggagagggagagagagtgtcctaagtccaatctgttatccttgatctgattcagcatccatagtgtgtgagttaacttcacctgccacctcgtaaaagaatttcagaggtgtgatcccgctttattgggacctggtaacaatcacaaagccagtggctgtttgagaaggacctcagacattttcagcagagttgttttagcaggaaacgtgccactgaatggcccctaaatgtgtcgacagtgtgataagagactcaactaattctttaggcaacatggcagatgtgactcagatcctccaagaccaaagcggaaaggtcagggggctgggactcttctcttccatagaagcctgtttcctgttaggaggcataatggaagatgaccccacaaaggcagaggcatctttcggaacaacactggtggcagctttcagaacaaggaacccctggtgggaggacgcccaagctacagcgttgggatctgggatctgttccactgccggcagatttcaaggggaacttgctgaaaggcagccagtggtgaagatttctcccctcccaggatggactacatgccggcatgtttcttataaagctgtggctgcttgtttcagaggaagggagtttgcagtcgcgggacgtggtagagcaaggcattcttgggttttcaagttgcttcttgcagaagccacatatgcatgccataagggttaagttggtggatctttaagagccaagtgtggttgagatcttggatttgcgtttacttcttgatgaatacatatccttcaaaccctctgcctggcgctacttctgtgtgcttcagagatgtacatcacagcctggtttctgatgcctactaactcctgctcttggagagctggagacacgaggatcagatagtcccttgcctttggagcactcttgataagcttttgtattttgtgttgtccttttaaaatgttctagaatgactttacgttgcaggtactggttaattggctgttgacaccacatctattttgtcttatgattctgcagttttgcagtacttttctctatctgattcagccatttctgccagagggaaaaggtcggcagaaaagatgtattgagtgaatagttaaggataggatctttgtccaaaaatttcagaaagattgagcaaatctgacgtattcattgagtgagtttctgtgttttcaaaggtggaggagaaatttgtgctggaagtttttaagcctccgttttcttggaaatcagtctgtaacactggcaagtcttaagatagtcccgtttagactttgcagatgctgaacctggctctgtaacgctgggaagtcttaagatagtcctgtttagactttgcaaaccctgtacctggctttgctcggagattcgggatgctggctcctgcaggcagggcgtgtgggagcctcgtcagaaagttttagaggtttccagcagaagcagaatgaagatggtctccctggccttttccttaattctcaattttgattgaggtgcacaagttgacttttaaagccaacgcttaagatactgattgacatcttcaagggagaatgctcccaggaggggctgaagaagccatagttggaagtggaaggtactcgtcagtgttctccacaaacctttttactctgttgtctcagccgcactggggcggaggcggtcaagggtgagaagtaccgacactcaagtgcaaactgccacgtcgttggcccatcccatcagtgggcagctggctgacgccattcactggacggtccctgaacacctaggaatgcacacaccgtgcttctcagacactggagacgcaaaggcaggaggatgcagtccggtgagaggacacgatctttacctgcacaatcagactgtaagcccagcagagaaccccaggggcgcctgggtacttctcggaggtcatcttagttgtggtggggaagacaaagaaataagcaaacaagaaactagagttactatacaagaaactctcctgagtttgtaaaccttaagcataaggattcagttgacctttttcttggttcatcaatctggaaagaacttacataaagcgccattgacactgtcacctgggagctccatgggccgtaagtctttgacagccaatttaatttgaggtcagagggccttgaggtacacagtcagcactgtttgaacacttttcctgaaagcaaaactcacagctccctgcgccctctgacaacactagctatttctgccagagtaagaacttctattactattttattattgttcatatgtcttttgatgatggttgtgtgacagggggaagcaggatctatttggtttcttccccctccccccaccccttcctttttgtctctctttttttttctctaagaaaatcaccagactagtttttccatcttgagtaatttcttatgtgggacagttttgatcctcattttgaaagcatgcgtgtgcacatgtgtgttgcctgtggtgccaggtgagacaggtggcactaactccagctgcttggaaggcatcccaagggcgcatcttaaagttggagcagacctcccttttccagcccctggggccattagaccacgtgctggaactagcattgtaaaattcccatcccagttccactcccctgaagtgaaacccttttttttttgtgacagtaaatcttaaaaatcattgtctctttatgaacatttcctcagtttcttctctgctgaaaatgtaagccatgctactttttaatgtattttgaattttgtgctcattggaaattgatatgctaatgcctcccccaccccccgccagacttttctttttatactttgtcttgtttttactggggtaggctgggcatgcgtgcgtgcctttagggcagcattttaaacctttgccaaaattgcaaatgggacatgtacattcttctgctccatcctacttaaacacctatcagctatttttatctttaaccttttctgtatgtttgaagtgtgtggggggtgtgtgtgtgtgtgaaagagcgagagaatgatgtcatctaaagttttttgaagaattatttggttttcattgcattaaaattctatcactcccagctttgttttcatttaaaaaaatatacaaagagctttgtaaatacaacacattttatttctccccccgaatgcatacggcgggtcctctctatctagctccagcctctcgcctacgccccgaatg

SEQ ID NO: 341774 - DNA, 7032 bp, Homo sapiens
  misc_feature (3233)..(3233): n is a, c, g, or t
gcggatggacagcaggccccgcgccgggtgctgcgagtggctgagatgctgcggtggaggggaggccaggccccgcactgtctggctggggcaccccgagaagagagaccagaggtatcctcggaatgtcatcaacaatcagaagtacaatttcttcacctttcttcctggggtgctgttcaaccagttcaaatactttttcaacctctatttcttacttcttgcctgctctcagtttgttcccgaaatgagacttggtgcactctatacctactgggttcccctgggcttcgtgctggccgtcactgtcatccgtgaggcggtggaggagatccgatgctacgtgcgggacaaggaagtcaactcccaggtctacagccggctcacagcacgaggcacagtgaaggtgaagagttctaacatccaagttggagaccttatcatcgttgaaaagaaccagcgggtccctgccgacatgatcttcctgaggacatcagaaaaaaacgggtcatgcttcttgcggacggatcagctggatggggagacggactggaagctgcggcttcccgtggcctgcacgcagaggctccccacggccgccgaccttcttcagattcgatcgtatgtgtacgcagaagagccaaatattgacattcacaacttcgtgggaacttttacccgagaagacagcgaccccccgatcagcgagagcctgagcatagagaacacgctgtgggctggcactgtggtcgcatcaggtactgttgtgggtgttgttctttacactggcagagaactccggagtgtcatgaatacctcaaatccccgaagtaagatcggcctgttcgacttggaagtgaactgcctcaccaagatcctctttggtgccctggtggtggtctcgctggtcatggttgcccttcagcactttgcaggccgttggtacctgcagatcatccgcttcctcctcttgttttccaacatcatccccattagtttgcgcgtgaacctggacatgggcaagatcgtgtacagctgggtgattcgaagggactcaaaaatccccgggaccgtggttcgctccagcacgattcctgagcagctgggcaggatttcgtacttactcacagacaagacaggcactcttacccagaacgagatgattttcaaacggctccatctcggaacagtagcctacggcctcgactcaatggacgaagtacaaagccacattttcagcatttacacccagcaatcccaggacccaccggctcagaagggcccaacgctcaccactaaggtccggcggaccatgagcagccgcgtgcacgaagccgtgaaggccatcgcgctctgccacaacgtgactcccgtgtatgagtccaacggtgtgactgatcaggctgaggccgagaagcagtacgaagactcctgccgcgtataccaggcatccagccccgatgaggtggccctggtacagtggacggaaagtgtgggcttaaccctggtgggccgagaccagtcttccatgcagctgaggacccctggcgaccagatcctgaacttcaccatcctacagatcttccctttcacctatgaaagcaaacgtatgggcatcatcgtgcgggatgaatcaactggagaaattacgttttacatgaagggagcagatgtggtcatggctggcattgtgcagtacaatgactggttggaggaagagtgtggcaacatggcccgagaagggctgcgggtgctcgtggtggcaaagaagtctcttgcagaggagcagtatcaggactttgaagcccgctacgtccaggccaagctgagtgtgcacgaccgctccctcaaagtggccacggtgatcgagagcctggagatggagatggaactgctgtgcctgacgggcgtggaggaccagctgcaggcagatgtgcggcccacgctggagaccctgaggaatgctggcatcaaggtttggatgctgacaggggacaagctggagacagctacgtgcacagcgaagaatgcacatctggtgaccagaaaccaagacatccacgtttttcggctggtgaccaaccgcggggaggctcacctcgagctgaacgccttccgcaggaagcatgattgtgccctggtcatctcgggagactccctggaggtttgcctcaagtactatgagtacgagttcatggagctggcctgccagtgcccggccgtagtctgctgccgatgtgcccccacccagaaggcccagatcgtgcgcctgcttcaggagcgcacgggcaagctcacctgtgcagtaggggacggaggcaatgacgtcagcatgattcaggaatctgactgcggcgtgggagtggaaggaaaggaaggaaaacaggcttcgttggctgcagacttctccatcactcaatttaagcatcttggccggttgcttatggtgcatggccggaacagctacaagcggtcagccgccctcagccagttcgtgattcacaggagcctctgtatcagcaccatgcaggctgtcttttcctccgtgttttactttgcctccgtccctctctatcaaggattcctcatcattgggtactccacaatttacaccatgtttcctgtgttttctctggtcctggacaaagatgtcaaatcggaagttgccatgctgtatcctgagctctacaaggatcttctcaagggacggccgttgtcctacaagacattcttaatatgggttttgattagcatctatcaagggagcaccatcatgtacggggcgctgctgctgtttgagtcggagttcgtgcacatcgtggccatctccttcacctcgctgatcctcaccgagctgctcatggtggcgctgaccatccagacctggcactggctcatgacagtggcggagctgctcagcctggcctgctacatcgcctccctggtgttcttacacgagttcatcgatgtgtacttcatcgccaccttgtcattcttgtggaaagtctccgtcatcactctggtcagctgcctccccctctatgtcctcaagtacctgcgaagacggttctctccccccagctactcaaagctcacatcataggccgtgcgttcgctggagggggccctggtcttggcgcttccctgatggacagagctcaagttccatttatattaaccgccacctgtggattttgcagtaattgctaacacatgcagttttaatgggaagnggctctgcgcctaaacggagtcctaacgctgcatcaacgggagggagggtcctgaaagagacccatctgggcctgtctgaacccctcgttcttcatgtttaggtgaatatgaatatgttaaagctggtggctcagctgggagatttatatgggtcactgtgcgagcttccttatgacttgaattttgttgtcacatgataaaagtttctgtgtagctgaaggttgtagaaggcttgtgtgtgtgtgtgtgtgtgtgtgtgtgtgtgtgtgtgtttttaaagagtcctaatgtgtatgtactctttatgtctttcttgctcttacaaagaggtgtcagaaaaatagaaagctcttggtgtcggtttgggaggaaaagacagtgacatttggtaaaaagttatccacacaataatctccattcggaaatgctcagtatcgtctccagccagccctgcttatccaggttacactggattcctgggatcgtaaccagtaaatgagaggagagggagagagagtgtcctaagtccaatctgttatccttgatctgattcagcatccatagtgtgtgagttaacttcacctgccacctcgtaaaagaatttcagaggtgtgatcccgctttattgggacctggtaacaatcacaaagccagtggctgtttgagaaggacctcagacattttcagcagagttgttttagcaggaaacgtgccactgaatggcccctaaatgtgtcgacagtgtgataagagactcaactaattctttaggcaacatggcagatgtgactcagatcctccaagaccaaagcggaaaggtcagggggctgggactcttctcttccatagaagcctgtttcctgttaggaggcataatggaagatgaccccacaaaggcagaggcatctttcggaacaacactggtggcagctttcagaacaaggaacccctggtgggaggacgcccaagctacagcgttgggatctgggatctgttccactgccggcagatttcaaggggaacttgctgaaaggcagccagtggtgaagatttctcccctcccaggatggactacatgccggcatgtttcttataaagctgtggctgcttgtttcagaggaagggagtttgcagtcgcgggacgtggtagagcaaggcattcttgggttttcaagttgcttcttgcagaagccacatatgcatgccataagggttaagttggtggatctttaagagccaagtgtggttgagatcttggatttgcgtttacttcttgatgaatacatatccttcaaaccctctgcctggcgctacttctgtgtgcttcagagatgtacatcacagcctggtttctgatgcctactaactcctgctcttggagagctggagacacgaggatcagatagtcccttgcctttggagcactcttgataagcttttgtattttgtgttgtccttttaaaatgttctagaatgactttacgttgcaggtactggttaattggctgttgacaccacatctattttgtcttatgattctgcagttttgcagtacttttctctatctgattcagccatttctgccagagggaaaaggtcggcagaaaagatgtattgagtgaatagttaaggataggatctttgtccaaaaatttcagaaagattgagcaaatctgacgtattcattgagtgagtttctgtgttttcaaaggtggaggagaaatttgtgctggaagtttttaagcctccgttttcttggaaatcagtctgtaacactggcaagtcttaagatagtcccgtttagactttgcagatgctgaacctggctctgtaacgctgggaagtcttaagatagtcctgtttagactttgcaaaccctgtacctggctttgctcggagattcgggatgctggctcctgcaggcagggcgtgtgggagcctcgtcagaaagttttagaggtttccagcagaagcagaatgaagatggtctccctggccttttccttaattctcaattttgattgaggtgcacaagttgacttttaaagccaacgcttaagatactgattgacatcttcaagggagaatgctcccaggaggggctgaagaagccatagttggaagtggaaggtactcgtcagtgttctccacaaacctttttactctgttgtctcagccgcactggggcggaggcggtcaagggtgagaagtaccgacactcaagtgcaaactgccacgtcgttggcccatcccatcagtgggcagctggctgacgccattcactggacggtccctgaacacctaggaatgcacacaccgtgcttctcagacactggagacgcaaaggcaggaggatgcagtccggtgagaggacacgatctttacctgcacaatcagactgtaagcccagcagagaaccccaggggcgcctgggtacttctcggaggtcatcttagttgtggtggggaagacaaagaaataagcaaacaagaaactagagttactatacaagaaactctcctgagtttgtaaaccttaagcataaggattcagttgacctttttcttggttcatcaatctggaaagaacttacataaagcgccattgacactgtcacctgggagctccatgggccgtaagtctttgacagccaatttaatttgaggtcagagggccttgaggtacacagtcagcactgtttgaacacttttcctgaaagcaaaactcacagctccctgcgccctctgacaacactagctatttctgccagagtaagaacttctattactattttattattgttcatatgtcttttgatgatggttgtgtgacagggggaagcaggatctatttggtttcttccccctccccccaccccttcctttttgtctctctttttttttctctaagaaaatcaccagactagtttttccatcttgagtaatttcttatgtgggacagttttgatcctcattttgaaagcatgcgtgtgcacatgtgtgttgcctgtggtgccaggtgagacaggtggcactaactccagctgcttggaaggcatcccaagggcgcatcttaaagttggagcagacctcccttttccagcccctggggccattagaccacgtgctggaactagcattgtaaaattcccatcccagttccactcccctgaagtgaaacccttttttttttgtgacagtaaatcttaaaaatcattgtctctttatgaacatttcctcagtttcttctctgctgaaaatgtaagccatgctactttttaatgtattttgaattttgtgctcattggaaattgatatgctaatgcctcccccaccccccgccagacttttctttttatactttgtcttgtttttactggggtaggctgggcatgcgtgcgtgcctttagggcagcattttaaacctttgccaaaattgcaaatgggacatgtacattcttctgctccatcctacttaaacacctatcagctatttttatctttaaccttttctgtatgtttgaagtgtgtggggggtgtgttttactcttcaagtgttcagccatgaggttttctacagttggcccccccatatttttttaacccaacccacggttttggggtggttacccacatcaacccttttatctcttgtggaaaggaccccccccactttcttcagggttttttctttttttggacccatctcccctttggggccttggttaaaactggaaatttttttaaccattttcttttccctgtcggggaaataacaaaatttctgttcacagcgggg

SEQ ID NO: 341775 - DNA, 1585 bp, Homo sapiens
gtgttttctcttgccattttcgtttgccaggttcgttctgacttctaagaatgatcagtggatcgacttttggcggcatcttgtcatagcctctggtctaattgggtcgttcaatgcaaagggtggatccgggtctgggctcctctggtatgattgacttgatgccgctcactgctactagttacaatctgtttgtaaccagttctggcttctcggtcaaggagcgattttctggtgtagacatccgtgtccgtgtcaaggtttgttgtcacgtggcccagagtttatgctatccgtcagtccatgctcccaatcccaagggcgcatcttaaagttggagcagacctcccttttccagcccctggggccattagaccacgtgctggaactagcattgtaaaattcccatcccagttccactcccctgaagtgaaacccttttttttttgtgacagtaaatcttaaaaatcattgtctctttatgaacatttcctcagtttcttctctgctgaaaatgtaagccatgctactttttaatgtattttgaattttgtgctcattggaaattgatatgctaatgcctcccccaccccccgccagacttttctttttatactttgtcttgtttttactggggtaggctgggcatgcgtgcgtgcctttagggcagcattttaaacctttgccaaaattgcaaatgggacatgtacattcttctgctccatcctacttaaacacctatcagctatttttatctttaaccttttctgtatgtttgaagtgtgtggggggtgtgtgtgtgtgtgaaagagcgagagaatgatgtcatctaaagttttttgaagaattatttggttttcattgcattaaaattctatcactcccagctttgttttcatttaaaaaaatatacaaagagctttgtaaatacaacacattttatttctcccccttcttttaatgtacagcttttttgccacttatatatacttaaaatattcccatgaattatgtccagttcttcttggaaaaaaatttggttttgaatgaacctgcaaagcatcctgcagcgtgagcagctcctccacctggagctccgaagcatcttctcaggccaaagcggcattacccgtgaatctgtcttctccgccacagcatggtttgaggcgcagtctgttaatatagctgggccatgtcagtgactgttgtgtttgtggggtcaggtggggggcatggtatttgcaaaaaaaacaaattatggctaatttattattttgttgcagtggggttaactgtaaactcatgtaagagtctgtgatttcctcattggttgatctctctctctgtaatcctcattgcaaattttcaccaggacagcgttttttgattagaggggagctctggcacagtatgctttaatttagcaggaacttccagatgatttaaattctcgatgctgtgatgacacacatatgatctttcgtgtttctgagcgactctactttcattgtttgccagcgtggctcgttgctgttgcccaataaagcttgtgtacgttcaaaaaaaaaaaacaaacagaaacaaa

SEQ ID NO: 341776 - DNA, 6425 bp, Homo sapiens
  misc_feature (3233)..(3233): n is a, c, g, or t
gcggatggacagcaggccccgcgccgggtgctgcgagtggctgagatgctgcggtggaggggaggccaggccccgcactgtctggctggggcaccccgagaagagagaccagaggtatcctcggaatgtcatcaacaatcagaagtacaatttcttcacctttcttcctggggtgctgttcaaccagttcaaatactttttcaacctctatttcttacttcttgcctgctctcagtttgttcccgaaatgagacttggtgcactctatacctactgggttcccctgggcttcgtgctggccgtcactgtcatccgtgaggcggtggaggagatccgatgctacgtgcgggacaaggaagtcaactcccaggtctacagccggctcacagcacgaggcacagtgaaggtgaagagttctaacatccaagttggagaccttatcatcgttgaaaagaaccagcgggtccctgccgacatgatcttcctgaggacatcagaaaaaaacgggtcatgcttcttgcggacggatcagctggatggggagacggactggaagctgcggcttcccgtggcctgcacgcagaggctccccacggccgccgaccttcttcagattcgatcgtatgtgtacgcagaagagccaaatattgacattcacaacttcgtgggaacttttacccgagaagacagcgaccccccgatcagcgagagcctgagcatagagaacacgctgtgggctggcactgtggtcgcatcaggtactgttgtgggtgttgttctttacactggcagagaactccggagtgtcatgaatacctcaaatccccgaagtaagatcggcctgttcgacttggaagtgaactgcctcaccaagatcctctttggtgccctggtggtggtctcgctggtcatggttgcccttcagcactttgcaggccgttggtacctgcagatcatccgcttcctcctcttgttttccaacatcatccccattagtttgcgcgtgaacctggacatgggcaagatcgtgtacagctgggtgattcgaagggactcaaaaatccccgggaccgtggttcgctccagcacgattcctgagcagctgggcaggatttcgtacttactcacagacaagacaggcactcttacccagaacgagatgattttcaaacggctccatctcggaacagtagcctacggcctcgactcaatggacgaagtacaaagccacattttcagcatttacacccagcaatcccaggacccaccggctcagaagggcccaacgctcaccactaaggtccggcggaccatgagcagccgcgtgcacgaagccgtgaaggccatcgcgctctgccacaacgtgactcccgtgtatgagtccaacggtgtgactgatcaggctgaggccgagaagcagtacgaagactcctgccgcgtataccaggcatccagccccgatgaggtggccctggtacagtggacggaaagtgtgggcttaaccctggtgggccgagaccagtcttccatgcagctgaggacccctggcgaccagatcctgaacttcaccatcctacagatcttccctttcacctatgaaagcaaacgtatgggcatcatcgtgcgggatgaatcaactggagaaattacgttttacatgaagggagcagatgtggtcatggctggcattgtgcagtacaatgactggttggaggaagagtgtggcaacatggcccgagaagggctgcgggtgctcgtggtggcaaagaagtctcttgcagaggagcagtatcaggactttgaagcccgctacgtccaggccaagctgagtgtgcacgaccgctccctcaaagtggccacggtgatcgagagcctggagatggagatggaactgctgtgcctgacgggcgtggaggaccagctgcaggcagatgtgcggcccacgctggagaccctgaggaatgctggcatcaaggtttggatgctgacaggggacaagctggagacagctacgtgcacagcgaagaatgcacatctggtgaccagaaaccaagacatccacgtttttcggctggtgaccaaccgcggggaggctcacctcgagctgaacgccttccgcaggaagcatgattgtgccctggtcatctcgggagactccctggaggtttgcctcaagtactatgagtacgagttcatggagctggcctgccagtgcccggccgtagtctgctgccgatgtgcccccacccagaaggcccagatcgtgcgcctgcttcaggagcgcacgggcaagctcacctgtgcagtaggggacggaggcaatgacgtcagcatgattcaggaatctgactgcggcgtgggagtggaaggaaaggaaggaaaacaggcttcgttggctgcagacttctccatcactcaatttaagcatcttggccggttgcttatggtgcatggccggaacagctacaagcggtcagccgccctcagccagttcgtgattcacaggagcctctgtatcagcaccatgcaggctgtcttttcctccgtgttttactttgcctccgtccctctctatcaaggattcctcatcattgggtactccacaatttacaccatgtttcctgtgttttctctggtcctggacaaagatgtcaaatcggaagttgccatgctgtatcctgagctctacaaggatcttctcaagggacggccgttgtcctacaagacattcttaatatgggttttgattagcatctatcaagggagcaccatcatgtacggggcgctgctgctgtttgagtcggagttcgtgcacatcgtggccatctccttcacctcgctgatcctcaccgagctgctcatggtggcgctgaccatccagacctggcactggctcatgacagtggcggagctgctcagcctggcctgctacatcgcctccctggtgttcttacacgagttcatcgatgtgtacttcatcgccaccttgtcattcttgtggaaagtctccgtcatcactctggtcagctgcctccccctctatgtcctcaagtacctgcgaagacggttctctccccccagctactcaaagctcacatcataggccgtgcgttcgctggagggggccctggtcttggcgcttccctgatggacagagctcaagttccatttatattaaccgccacctgtggattttgcagtaattgctaacacatgcagttttaatgggaagnggctctgcgcctaaacggagtcctaacgctgcatcaacgggagggagggtcctgaaagagacccatctgggcctgtctgaacccctcgttcttcatgtttaggtgaatatgaatatgttaaagctggtggctcagctgggagatttatatgggtcactgtgcgagcttccttatgacttgaattttgttgtcacatgataaaagtttctgtgtagctgaaggttgtagaaggcttgtgtgtgtgtgtgtgtgtgtgtgtgtgtgtgtgtgtgtttttaaagagtcctaatgtgtatgtactctttatgtctttcttgctcttacaaagaggtgtcagaaaaatagaaagctcttggtgtcggtttgggaggaaaagacagtgacatttggtaaaaagttatccacacaataatctccattcggaaatgctcagtatcgtctccagccagccctgcttatccaggttacactggattcctgggatcgtaaccagtaaatgagaggagagggagagagagtgtcctaagtccaatctgttatccttgatctgattcagcatccatagtgtgtgagttaacttcacctgccacctcgtaaaagaatttcagaggtgtgatcccgctttattgggacctggtaacaatcacaaagccagtggctgtttgagaaggacctcagacattttcagcagagttgttttagcaggaaacgtgccactgaatggcccctaaatgtgtcgacagtgtgataagagactcaactaattctttaggcaacatggcagatgtgactcagatcctccaagaccaaagcggaaaggtcagggggctgggactcttctcttccatagaagcctgtttcctgttaggaggcataatggaagatgaccccacaaaggcagaggcatctttcggaacaacactggtggcagctttcagaacaaggaacccctggtgggaggacgcccaagctacagcgttgggatctgggatctgttccactgccggcagatttcaaggggaacttgctgaaaggcagccagtggtgaagatttctcccctcccaggatggactacatgccggcatgtttcttataaagctgtggctgcttgtttcagaggaagggagtttgcagtcgcgggacgtggtagagcaaggcattcttgggttttcaagttgcttcttgcagaagccacatatgcatgccataagggttaagttggtggatctttaagagccaagtgtggttgagatcttggatttgcgtttacttcttgatgaatacatatccttcaaaccctctgcctggcgctacttctgtgtgcttcagagatgtacatcacagcctggtttctgatgcctactaactcctgctcttggagagctggagacacgaggatcagatagtcccttgcctttggagcactcttgataagcttttgtattttgtgttgtccttttaaaatgttctagaatgactttacgttgcaggtactggttaattggctgttgacaccacatctattttgtcttatgattctgcagttttgcagtacttttctctatctgattcagccatttctgccagagggaaaaggtcggcagaaaagatgtattgagtgaatagttaaggataggatctttgtccaaaaatttcagaaagattgagcaaatctgacgtattcattgagtgagtttctgtgttttcaaaggtggaggagaaatttgtgctggaagtttttaagcctccgttttcttggaaatcagtctgtaacactggcaagtcttaagatagtcccgtttagactttgcagatgctgaacctggctctgtaacgctgggaagtcttaagatagtcctgtttagactttgcaaaccctgtacctggctttgctcggagattcgggatgctggctcctgcaggcagggcgtgtgggagcctcgtcagaaagttttagaggtttccagcagaagcagaatgaagatggtctccctggccttttccttaattctcaattttgattgaggtgcacaagttgacttttaaagccaacgcttaagatactgattgacatcttcaagggagaatgctcccaggaggggctgaagaagccatagttggaagtggaaggtactcgtcagtgttctccacaaacctttttactctgttgtctcagccgcactggggcggaggcggtcaagggtgagaagtaccgacactcaagtgcaaactgccacgtcgttggcccatcccatcagtgggcagctggctgacgccattcactggacggtccctgaacacctaggaatgcacacaccgtgcttctcagacactggagacgcaaaggcaggaggatgcagtccggtgagaggacacgatctttacctgcacaatcagactgtaagcccagcagagaaccccaggggcgcctgggtacttctcggaggtcatcttagttgtggtggggaagacaaagaaataagcaaacaagaaactagagttactatacaagaaactctcctgagtttgtaaaccttaagcataaggattcagttgacctttttcttggttcatcaatctggaaagaacttacataaagcgccattgacactgtcacctgggagctccatgggccgtaagtctttgacagccaatttaatttgaggtcagagggccttgaggtacacagtcagcactggttgatctctctctctgtaatcctcattgcaaattttcaccaggacagcgttttttgattagaggggagctctggcacagtatgctttaatttagcaggaacttccagatgatttaaattctcgatgctgtgatgacacacatatgatctttcgtgtttctgagcgactctactttcattgtttgccagcgtggctcgttgctgttgcccaataaagcttgtgtacgttctgccttgggggattattttaatttgtacagaaacatgaattctggtatcaaaatgaggactttttattataacgctcctattttttctttatttcatggtacatgaaatgtaaagaaaactctttccagttcagaaaattattttgattttggcaaaaaaaaccccaaatcaatgcatgttatttattattttgtactattgtccatcccagacgtgtcagaatttcaaaaggtgatagatataaatggaaaataagatgaaa

SEQ ID NO: 341777 - DNA, 1048 bp, Homo sapiens
cccctgcagcctggatataggcgaagagtgcagcagagcagctgttggaaccagccattcgcactgtgcagacttcgcgtccctggctaagggggttaactttgagactgtaataagcttaaacttatctccctggtgaaggaacacttgcatgagaataagaggtcttccctaggcattttaaaccttttgtcttgcctcttctccacccagtcagcaattaaccttttctgtatgtttgaagtgtgtggggggtgtgtgtgtgtgtgaaagagcgagagaatgatgtcatctaaagttttttgaagaattatttggttttcattgcattaaaattctatcactcccagctttgttttcatttaaaaaaatatacaaagagctttgtaaatacaacacattttatttctcccccttcttttaatgtacagcttttttgccacttatatatacttaaaatattcccatgaattatgtccagttcttcttggaaaaaaatttggttttgaatgaacctgcaaagcatcctgcagcgtgagcagctcctccacctggagctccgaagcatcttctcaggccaaagcggcattacccgtgaatctgtcttctccgccacagcatggtttgaggcgcagtctgttaatatagctgggccatgtcagtgactgttgtgtttgtggggtcaggtggggggcatggtatttgcaaaaaaaacaaattatggctaatttattattttgttgcagtggggttaactgtaaactcatgtaagagtctgtgatttcctcattggttgatctctctctctgtaatcctcattgcaaattttcaccaggacagcgttttttgattagaggggagctctggcacagtatgctttaatttagcaggaacttccagatgatttaaattctcgatgctgtgatgacacacatatgatctttcgtgtttctgagcgactctactttcattgtttgccagcgtggctcgttgctgttgcccaataaagcttgtgtacgttcaaaaaaaaaaaacaaacagaaacaaa

SEQ ID NO: 341778 - DNA, 2229 bp, Homo sapiens
gcggatggacagcaggccccgcgccgggtgctgcgagtggctgagatgctgcggtggaggggaggccaggccccgcactgtctggctggggcaccccgagaagagagaccagaggtatcctcggaatgtcatcaacaatcagaagtacaatttcttcacctttcttcctggggtgctgttcaaccagttcaaatactttttcaacctctatttcttacttcttgcctgctctcagtttgttcccgaaatgagacttggtgcactctatacctactgggttcccctgggcttcgtgctggccgtcactgtcatccgtgaggcggtggaggagatccgatgctacgtgcgggacaaggaagtcaactcccaggtctacagccggctcacagcacgaggcacagtgaaggtgaagagttctaacatccaagttggagaccttatcatcgttgaaaagaaccagcgggtccctgccgacatgatcttcctgaggacatcagaaaaaaacgggtcatgcttcttgcggacggatcagctggatggggagacggactggaagctgcggcttcccgtggcctgcacgcagaggctccccacggccgccgaccttcttcagattcgatcgtatgtgtacgcagaagagccaaatattgacattcacaacttcgtgggaacttttacccgagaagacagcgaccccccgatcagcgagagcctgagcatagagaacacgctgtgggctggcactgtggtcgcatcaggtactgttgtgggtgttgttctttacactggcagagaactccggagtgtcatgaatacctcaaatccccgaagtaagatcggcctgttcgacttggaagtgaactgcctcaccaagatcctctttggtgccctggtggtggtctcgctggtcatggttgcccttcagcactttgcaggccgttggtacctgcagatcatccgcttcctcctcttgttttccaacatcatccccattagtttgcgcgtgaacctggacatgggcaagatcgtgtacagctgggtgattcgaagggactcaaaaatccccgggaccgtggttcgctccagcacgattcctgagcagctgggcaggatttcgtacttactcacagacaagacaggcactcttacccagaacgagatgattttcaaacggctccatctcggaacagtagcctacggcctcgactcaatggacgaagtacaaagccacattttcagcatttacacccagcaatcccaggacccaccggctcagaagggcccaacgctcaccactaaggtccggcggaccatgagcagccgcgtgcacgaagccgtgaaggccatcgcgctctgccacaacgtgactcccgtgtatgagtccaacggtgtgactgatcaggctgaggccgagaagcagtacgaagactcctgccgcgtataccaggcatccagccccgatgaggtggccctggtacagtggacggaaagtgtgggcttaaccctggtgggccgagaccagtcttccatgcagctgaggacccctggcgaccagatcctgaacttcaccatcctacagatcttccctttcacctatgaaagcaaacgtatgggcatcatcgtgcgggaaggttgtgtccctgttttgtttttgtggcgtacaagatgttccagtgccttctcccccttcccacgtggagccacgggtttggatcgtggctgtagatcatcgtagcgctgtcattgctggactaaaagaggcctttgagcaggtgccagatgcagaccacggtgggaaaagatgaggcccccaaacaatgccacacagccggccgatctctgtaaatttatggcgtaatcttgccataatatgggaacgaaataaacttgtgatgaactccgtgggaggaagtgactcatgggaggggatcgttgatgcggtatttatattggacagaacttctgaactcactcaagcccttttcttagtgaggaagctgggctgggagcatcatttcctacagccacatgttgttgagcaccctttggttgtcggggggaaggaaaaaataaaacctctgattctttaatgtgcagaccccacagctctctttggcctgcgtcaagagcaggcatagccacagtctatcagagataaagtgtgcagttgaacgcttttaaacgtgggtgcctgtcttggcctgggggtgctcttatgagtcagcatgt

SEQ ID NO: 341779 - DNA, 515 bp, Homo sapiens
tttgtgtgtggtctggtgtgtgtctggtatgtttgctgggtgtgtgtagtgtatgtgtgtgtggtgtgtgtttggtgtgtgtagtgtgtgtgtgtgggtgtgtgagtgtgtttgtgtggtggctgtcggtgactgttgtgtttgtggggtcaggtggggggcatggtatttgcaaaaaaaacaaattatggctaatttattattttgttgcagtggggttaactgtaaactcatgtaagagtctgtgatttcctcattggttgatctctctctctgtaatcctcattgcaaattttcaccaggacagcgttttttgattagaggggagctctggcacagtatgctttaatttagcaggaacttccagatgatttaaattctcgatgctgtgatgacacacatatgatctttcgtgtttctgagcgactctactttcattgtttgccagcgtggctcgttgctgttgcccaataaagcttgtgtacgttcaaaaaaaaaaaacaaacagaaacaaa

SEQ ID NO: 341780 - DNA, 1038 bp, Homo sapiens
gcggatggacagcaggccccgcgccgggtgctgcgagtggctgagatgctgcggtggaggggaggccaggccccgcactgtctggctggggcaccccgagaagagagaccagaggtatcctcggaatgtcatcaacaatcagaagtacaatttcttcacctttcttcctggggtgctgttcaaccagttcaaatactttttcaacctctatttcttacttcttgcctgctctcagtttgttcccgaaatgagacttggtgcactctatacctactgggttcccctgggcttcgtgctggccgtcactgtcatccgtgaggcggtggaggagatccgatgctacgtgcgggacaaggaagtcaactcccaggtctacagccggctcacagcacgaggcacagtgaaggtgaagagttctaacatccaagttggagaccttatcatcgttgaaaagaaccagcgggtccctgccgacatgatcttcctgaggacatcagaaaaaaacgggtcatgcttcttgcggacggatcagctggatggggagacggactggaagctgcggcttcccgtggcctgcacgcagaggctccccacggccgccgaccttcttcagattcgatcgtatgtgtacgcagaagagccaaatattgacattcacaacttcgtgggaacttttacccgagaagacagcgaccccccgatcagcgagagcctgagcatagagaacacgctgtgggctggcactgtggtcgcatcaggtactgttgtgggtgttgttctttacactggcagagaactccggagtgtcatgaatacctcaaatccccgaagtaaggtgtgtacgaggtcatggggtacattgaccggctgtgggctggttggttctggtgggtgagtgacgagatattaaaataggaacacctaagagtgatatttatacagacattttatctttttatgcatatgtgtgtgtgtgtatgcaataaatacatatacaatacacatgtataatacagtacgtaaatatgtagttacatg

SEQ ID NO: 341781 - DNA, 341 bp, Homo sapiens
caggcctgagcccccgcgcctggccgcgactccatcattttaaatattatatttaactttctatttctttcatcaactctagatactcccctccctgccttacttccttttttctccctttttctcactttgtagttaaagattatttatcctacaaggtcaaagaggaaaatcagaaaaccataggttcagacctgcataaagcaccagtcattaacctcatgtaacaagtgatgcctttcatgtctaaatgaaaactgcggaaaggagccaggtgtaggcgagcagcgcacggctttcgcagggagggtgaggggaatacccttctctggtgtttgcag

SEQ ID NO: 341782 - DNA, 389 bp, Homo sapiens
tcatttcccaccaaatgttccagatctcatcagacaagccctgaatgtctttctctgttgtctccctccattccaggtgctgttcaaccagttcaaatactttttcaacctctatttcttacttcttgcctgctctcagtttgttcccgaaatgagacttggtgcactctatacctactgggttcccctggtaagttaatcggcattgtttgttcagtaaccttagaggtttggaaacagaaagttctttgtttctctcacttaggcatctggaatgggatggtggccttgtaagggaaaggatgcccttaggccaatacattgggagtctctgagactttaacgttgaagctccatttcatataccgcctggatcaaactatagcaaa

SEQ ID NO: 341783 - DNA, 7537 bp, Homo sapiens
  misc_feature (3233)..(3233): n is a, c, g, or t
gcggatggacagcaggccccgcgccgggtgctgcgagtggctgagatgctgcggtggaggggaggccaggccccgcactgtctggctggggcaccccgagaagagagaccagaggtatcctcggaatgtcatcaacaatcagaagtacaatttcttcacctttcttcctggggtgctgttcaaccagttcaaatactttttcaacctctatttcttacttcttgcctgctctcagtttgttcccgaaatgagacttggtgcactctatacctactgggttcccctgggcttcgtgctggccgtcactgtcatccgtgaggcggtggaggagatccgatgctacgtgcgggacaaggaagtcaactcccaggtctacagccggctcacagcacgaggcacagtgaaggtgaagagttctaacatccaagttggagaccttatcatcgttgaaaagaaccagcgggtccctgccgacatgatcttcctgaggacatcagaaaaaaacgggtcatgcttcttgcggacggatcagctggatggggagacggactggaagctgcggcttcccgtggcctgcacgcagaggctccccacggccgccgaccttcttcagattcgatcgtatgtgtacgcagaagagccaaatattgacattcacaacttcgtgggaacttttacccgagaagacagcgaccccccgatcagcgagagcctgagcatagagaacacgctgtgggctggcactgtggtcgcatcaggtactgttgtgggtgttgttctttacactggcagagaactccggagtgtcatgaatacctcaaatccccgaagtaagatcggcctgttcgacttggaagtgaactgcctcaccaagatcctctttggtgccctggtggtggtctcgctggtcatggttgcccttcagcactttgcaggccgttggtacctgcagatcatccgcttcctcctcttgttttccaacatcatccccattagtttgcgcgtgaacctggacatgggcaagatcgtgtacagctgggtgattcgaagggactcaaaaatccccgggaccgtggttcgctccagcacgattcctgagcagctgggcaggatttcgtacttactcacagacaagacaggcactcttacccagaacgagatgattttcaaacggctccatctcggaacagtagcctacggcctcgactcaatggacgaagtacaaagccacattttcagcatttacacccagcaatcccaggacccaccggctcagaagggcccaacgctcaccactaaggtccggcggaccatgagcagccgcgtgcacgaagccgtgaaggccatcgcgctctgccacaacgtgactcccgtgtatgagtccaacggtgtgactgatcaggctgaggccgagaagcagtacgaagactcctgccgcgtataccaggcatccagccccgatgaggtggccctggtacagtggacggaaagtgtgggcttaaccctggtgggccgagaccagtcttccatgcagctgaggacccctggcgaccagatcctgaacttcaccatcctacagatcttccctttcacctatgaaagcaaacgtatgggcatcatcgtgcgggatgaatcaactggagaaattacgttttacatgaagggagcagatgtggtcatggctggcattgtgcagtacaatgactggttggaggaagagtgtggcaacatggcccgagaagggctgcgggtgctcgtggtggcaaagaagtctcttgcagaggagcagtatcaggactttgaagcccgctacgtccaggccaagctgagtgtgcacgaccgctccctcaaagtggccacggtgatcgagagcctggagatggagatggaactgctgtgcctgacgggcgtggaggaccagctgcaggcagatgtgcggcccacgctggagaccctgaggaatgctggcatcaaggtttggatgctgacaggggacaagctggagacagctacgtgcacagcgaagaatgcacatctggtgaccagaaaccaagacatccacgtttttcggctggtgaccaaccgcggggaggctcacctcgagctgaacgccttccgcaggaagcatgattgtgccctggtcatctcgggagactccctggaggtttgcctcaagtactatgagtacgagttcatggagctggcctgccagtgcccggccgtagtctgctgccgatgtgcccccacccagaaggcccagatcgtgcgcctgcttcaggagcgcacgggcaagctcacctgtgcagtaggggacggaggcaatgacgtcagcatgattcaggaatctgactgcggcgtgggagtggaaggaaaggaaggaaaacaggcttcgttggctgcagacttctccatcactcaatttaagcatcttggccggttgcttatggtgcatggccggaacagctacaagcggtcagccgccctcagccagttcgtgattcacaggagcctctgtatcagcaccatgcaggctgtcttttcctccgtgttttactttgcctccgtccctctctatcaaggattcctcatcattgggtactccacaatttacaccatgtttcctgtgttttctctggtcctggacaaagatgtcaaatcggaagttgccatgctgtatcctgagctctacaaggatcttctcaagggacggccgttgtcctacaagacattcttaatatgggttttgattagcatctatcaagggagcaccatcatgtacggggcgctgctgctgtttgagtcggagttcgtgcacatcgtggccatctccttcacctcgctgatcctcaccgagctgctcatggtggcgctgaccatccagacctggcactggctcatgacagtggcggagctgctcagcctggcctgctacatcgcctccctggtgttcttacacgagttcatcgatgtgtacttcatcgccaccttgtcattcttgtggaaagtctccgtcatcactctggtcagctgcctccccctctatgtcctcaagtacctgcgaagacggttctctccccccagctactcaaagctcacatcataggccgtgcgttcgctggagggggccctggtcttggcgcttccctgatggacagagctcaagttccatttatattaaccgccacctgtggattttgcagtaattgctaacacatgcagttttaatgggaagnggctctgcgcctaaacggagtcctaacgctgcatcaacgggagggagggtcctgaaagagacccatctgggcctgtctgaacccctcgttcttcatgtttaggtgaatatgaatatgttaaagctggtggctcagctgggagatttatatgggtcactgtgcgagcttccttatgacttgaattttgttgtcacatgataaaagtttctgtgtagctgaaggttgtagaaggcttgtgtgtgtgtgtgtgtgtgtgtgtgtgtgtgtgtgtgtttttaaagagtcctaatgtgtatgtactctttatgtctttcttgctcttacaaagaggtgtcagaaaaatagaaagctcttggtgtcggtttgggaggaaaagacagtgacatttggtaaaaagttatccacacaataatctccattcggaaatgctcagtatcgtctccagccagccctgcttatccaggttacactggattcctgggatcgtaaccagtaaatgagaggagagggagagagagtgtcctaagtccaatctgttatccttgatctgattcagcatccatagtgtgtgagttaacttcacctgccacctcgtaaaagaatttcagaggtgtgatcccgctttattgggacctggtaacaatcacaaagccagtggctgtttgagaaggacctcagacattttcagcagagttgttttagcaggaaacgtgccactgaatggcccctaaatgtgtcgacagtgtgataagagactcaactaattctttaggcaacatggcagatgtgactcagatcctccaagaccaaagcggaaaggtcagggggctgggactcttctcttccatagaagcctgtttcctgttaggaggcataatggaagatgaccccacaaaggcagaggcatctttcggaacaacactggtggcagctttcagaacaaggaacccctggtgggaggacgcccaagctacagcgttgggatctgggatctgttccactgccggcagatttcaaggggaacttgctgaaaggcagccagtggtgaagatttctcccctcccaggatggactacatgccggcatgtttcttataaagctgtggctgcttgtttcagaggaagggagtttgcagtcgcgggacgtggtagagcaaggcattcttgggttttcaagttgcttcttgcagaagccacatatgcatgccataagggttaagttggtggatctttaagagccaagtgtggttgagatcttggatttgcgtttacttcttgatgaatacatatccttcaaaccctctgcctggcgctacttctgtgtgcttcagagatgtacatcacagcctggtttctgatgcctactaactcctgctcttggagagctggagacacgaggatcagatagtcccttgcctttggagcactcttgataagcttttgtattttgtgttgtccttttaaaatgttctagaatgactttacgttgcaggtactggttaattggctgttgacaccacatctattttgtcttatgattctgcagttttgcagtacttttctctatctgattcagccatttctgccagagggaaaaggtcggcagaaaagatgtattgagtgaatagttaaggataggatctttgtccaaaaatttcagaaagattgagcaaatctgacgtattcattgagtgagtttctgtgttttcaaaggtggaggagaaatttgtgctggaagtttttaagcctccgttttcttggaaatcagtctgtaacactggcaagtcttaagatagtcccgtttagactttgcagatgctgaacctggctctgtaacgctgggaagtcttaagatagtcctgtttagactttgcaaaccctgtacctggctttgctcggagattcgggatgctggctcctgcaggcagggcgtgtgggagcctcgtcagaaagttttagaggtttccagcagaagcagaatgaagatggtctccctggccttttccttaattctcaattttgattgaggtgcacaagttgacttttaaagccaacgcttaagatactgattgacatcttcaagggagaatgctcccaggaggggctgaagaagccatagttggaagtggaaggtactcgtcagtgttctccacaaacctttttactctgttgtctcagccgcactggggcggaggcggtcaagggtgagaagtaccgacactcaagtgcaaactgccacgtcgttggcccatcccatcagtgggcagctggctgacgccattcactggacggtccctgaacacctaggaatgcacacaccgtgcttctcagacactggagacgcaaaggcaggaggatgcagtccggtgagaggacacgatctttacctgcacaatcagactgtaagcccagcagagaaccccaggggcgcctgggtacttctcggaggtcatcttagttgtggtggggaagacaaagaaataagcaaacaagaaactagagttactatacaagaaactctcctgagtttgtaaaccttaagcataaggattcagttgacctttttcttggttcatcaatctggaaagaacttacataaagcgccattgacactgtcacctgggagctccatgggccgtaagtctttgacagccaatttaatttgaggtcagagggccttgaggtacacagtcagcactgtttgaacacttttcctgaaagcaaaactcacagctccctgcgccctctgacaacactagctatttctgccagagtaagaacttctattactattttattattgttcatatgtcttttgatgatggttgtgtgacagggggaagcaggatctatttggtttcttccccctccccccaccccttcctttttgtctctctttttttttctctaagaaaatcaccagactagtttttccatcttgagtaatttcttatgtgggacagttttgatcctcattttgaaagcatgcgtgtgcacatgtgtgttgcctgtggtgccaggtgagacaggtggcactaactccagctgcttggaaggcatcccaagggcgcatcttaaagttggagcagacctcccttttccagcccctggggccattagaccacgtgctggaactagcattgtaaaattcccatcccagttccactcccctgaagtgaaacccttttttttttgtgacagtaaatcttaaaaatcattgtctctttatgaacatttcctcagtttcttctctgctgaaaatgtaagccatgctactttttaatgtattttgaattttgtgctcattggaaattgatatgctaatgcctcccccaccccccgccagacttttctttttatactttgtcttgtttttactggggtaggctgggcatgcgtgcgtgcctttagggcagcattttaaacctttgccaaaattgcaaatgggacatgtacattcttctgctccatcctacttaaacacctatcagctatttttatctttaaccttttctgtatgtttgaagtgtgtggggggtgtgtgtgtgtgtgaaagagcgagagaatgatgtcatctaaagttttttgaagaattatttggttttcattgcattaaaattctatcactcccagctttgttttcatttaaaaaaatatacaaagagctttgtaaatacaacacattttatttctcccccttcttttaatgtacagcttttttgccacttatatatacttaaaatattcccatgaattatgtccagttcttcttggaaaaaaatttggttttgaatgaacctgcaaagcatcctgcagcgtgagcagctcctccacctggagctccgaagcatcttctcaggccaaagcggcattacccgtgaatctgtcttctccgccacagcatggtttgaggcgcagtctgttaatatagctgggccatgtcagtgactgttgtgtttgtggggtcaggtggggggcatggtatttgcaaaaaaaacaaattatggctaatttattattttgttgcagtggggttaactgtaaactcatgtaagagtctgtgatttcctcattggttgatctctctctctgtaatcctcattgcaaattttcaccaggacagcgttttttgattagaggggagctctggcacagtatgctttaatttagcaggaacttccagatgatttaaattctcgatgctgtgatgacacacatatgatctttcgtgtttctgagcgactctactttcattgtttgccagcgtggctcgttgctgttgcccaataaagcttgtgtacgttc

SEQ ID NO: 341784 - DNA, 6874 bp, Homo sapiens
  misc_feature (2570)..(2570): n is a, c, g, or t
ggatcccactgtcctacctggggtagaggtgtttgtaggggaaggaccagctctccggcaggctgagttagtgcagtgaggctcagctcactgcagcctccacctcctggtttaggtttgagattagttacaccagctcatctcaagccctggtttgtgcttcgtcccacagatcggcctgttcgacttggaagtgaactgcctcaccaagatcctctttggtgccctggtggtggtctcgctggtcatggttgcccttcagcactttgcaggccgttggtacctgcagatcatccgcttcctcctcttgttttccaacatcatccccattagtttgcgcgtgaacctggacatgggcaagatcgtgtacagctgggtgattcgaagggactcaaaaatccccgggaccgtggttcgctccagcacgattcctgagcagctgggcaggatttcgtacttactcacagacaagacaggcactcttacccagaacgagatgattttcaaacggctccatctcggaacagtagcctacggcctcgactcaatggacgaagtacaaagccacattttcagcatttacacccagcaatcccaggacccaccggctcagaagggcccaacgctcaccactaaggtccggcggaccatgagcagccgcgtgcacgaagccgtgaaggccatcgcgctctgccacaacgtgactcccgtgtatgagtccaacggtgtgactgatcaggctgaggccgagaagcagtacgaagactcctgccgcgtataccaggcatccagccccgatgaggtggccctggtacagtggacggaaagtgtgggcttaaccctggtgggccgagaccagtcttccatgcagctgaggacccctggcgaccagatcctgaacttcaccatcctacagatcttccctttcacctatgaaagcaaacgtatgggcatcatcgtgcgggatgaatcaactggagaaattacgttttacatgaagggagcagatgtggtcatggctggcattgtgcagtacaatgactggttggaggaagagtgtggcaacatggcccgagaagggctgcgggtgctcgtggtggcaaagaagtctcttgcagaggagcagtatcaggactttgaagcccgctacgtccaggccaagctgagtgtgcacgaccgctccctcaaagtggccacggtgatcgagagcctggagatggagatggaactgctgtgcctgacgggcgtggaggaccagctgcaggcagatgtgcggcccacgctggagaccctgaggaatgctggcatcaaggtttggatgctgacaggggacaagctggagacagctacgtgcacagcgaagaatgcacatctggtgaccagaaaccaagacatccacgtttttcggctggtgaccaaccgcggggaggctcacctcgagctgaacgccttccgcaggaagcatgattgtgccctggtcatctcgggagactccctggaggtttgcctcaagtactatgagtacgagttcatggagctggcctgccagtgcccggccgtagtctgctgccgatgtgcccccacccagaaggcccagatcgtgcgcctgcttcaggagcgcacgggcaagctcacctgtgcagtaggggacggaggcaatgacgtcagcatgattcaggaatctgactgcggcgtgggagtggaaggaaaggaaggaaaacaggcttcgttggctgcagacttctccatcactcaatttaagcatcttggccggttgcttatggtgcatggccggaacagctacaagcggtcagccgccctcagccagttcgtgattcacaggagcctctgtatcagcaccatgcaggctgtcttttcctccgtgttttactttgcctccgtccctctctatcaaggattcctcatcattgggtactccacaatttacaccatgtttcctgtgttttctctggtcctggacaaagatgtcaaatcggaagttgccatgctgtatcctgagctctacaaggatcttctcaagggacggccgttgtcctacaagacattcttaatatgggttttgattagcatctatcaagggagcaccatcatgtacggggcgctgctgctgtttgagtcggagttcgtgcacatcgtggccatctccttcacctcgctgatcctcaccgagctgctcatggtggcgctgaccatccagacctggcactggctcatgacagtggcggagctgctcagcctggcctgctacatcgcctccctggtgttcttacacgagttcatcgatgtgtacttcatcgccaccttgtcattcttgtggaaagtctccgtcatcactctggtcagctgcctccccctctatgtcctcaagtacctgcgaagacggttctctccccccagctactcaaagctcacatcataggccgtgcgttcgctggagggggccctggtcttggcgcttccctgatggacagagctcaagttccatttatattaaccgccacctgtggattttgcagtaattgctaacacatgcagttttaatgggaagnggctctgcgcctaaacggagtcctaacgctgcatcaacgggagggagggtcctgaaagagacccatctgggcctgtctgaacccctcgttcttcatgtttaggtgaatatgaatatgttaaagctggtggctcagctgggagatttatatgggtcactgtgcgagcttccttatgacttgaattttgttgtcacatgataaaagtttctgtgtagctgaaggttgtagaaggcttgtgtgtgtgtgtgtgtgtgtgtgtgtgtgtgtgtgtgtttttaaagagtcctaatgtgtatgtactctttatgtctttcttgctcttacaaagaggtgtcagaaaaatagaaagctcttggtgtcggtttgggaggaaaagacagtgacatttggtaaaaagttatccacacaataatctccattcggaaatgctcagtatcgtctccagccagccctgcttatccaggttacactggattcctgggatcgtaaccagtaaatgagaggagagggagagagagtgtcctaagtccaatctgttatccttgatctgattcagcatccatagtgtgtgagttaacttcacctgccacctcgtaaaagaatttcagaggtgtgatcccgctttattgggacctggtaacaatcacaaagccagtggctgtttgagaaggacctcagacattttcagcagagttgttttagcaggaaacgtgccactgaatggcccctaaatgtgtcgacagtgtgataagagactcaactaattctttaggcaacatggcagatgtgactcagatcctccaagaccaaagcggaaaggtcagggggctgggactcttctcttccatagaagcctgtttcctgttaggaggcataatggaagatgaccccacaaaggcagaggcatctttcggaacaacactggtggcagctttcagaacaaggaacccctggtgggaggacgcccaagctacagcgttgggatctgggatctgttccactgccggcagatttcaaggggaacttgctgaaaggcagccagtggtgaagatttctcccctcccaggatggactacatgccggcatgtttcttataaagctgtggctgcttgtttcagaggaagggagtttgcagtcgcgggacgtggtagagcaaggcattcttgggttttcaagttgcttcttgcagaagccacatatgcatgccataagggttaagttggtggatctttaagagccaagtgtggttgagatcttggatttgcgtttacttcttgatgaatacatatccttcaaaccctctgcctggcgctacttctgtgtgcttcagagatgtacatcacagcctggtttctgatgcctactaactcctgctcttggagagctggagacacgaggatcagatagtcccttgcctttggagcactcttgataagcttttgtattttgtgttgtccttttaaaatgttctagaatgactttacgttgcaggtactggttaattggctgttgacaccacatctattttgtcttatgattctgcagttttgcagtacttttctctatctgattcagccatttctgccagagggaaaaggtcggcagaaaagatgtattgagtgaatagttaaggataggatctttgtccaaaaatttcagaaagattgagcaaatctgacgtattcattgagtgagtttctgtgttttcaaaggtggaggagaaatttgtgctggaagtttttaagcctccgttttcttggaaatcagtctgtaacactggcaagtcttaagatagtcccgtttagactttgcagatgctgaacctggctctgtaacgctgggaagtcttaagatagtcctgtttagactttgcaaaccctgtacctggctttgctcggagattcgggatgctggctcctgcaggcagggcgtgtgggagcctcgtcagaaagttttagaggtttccagcagaagcagaatgaagatggtctccctggccttttccttaattctcaattttgattgaggtgcacaagttgacttttaaagccaacgcttaagatactgattgacatcttcaagggagaatgctcccaggaggggctgaagaagccatagttggaagtggaaggtactcgtcagtgttctccacaaacctttttactctgttgtctcagccgcactggggcggaggcggtcaagggtgagaagtaccgacactcaagtgcaaactgccacgtcgttggcccatcccatcagtgggcagctggctgacgccattcactggacggtccctgaacacctaggaatgcacacaccgtgcttctcagacactggagacgcaaaggcaggaggatgcagtccggtgagaggacacgatctttacctgcacaatcagactgtaagcccagcagagaaccccaggggcgcctgggtacttctcggaggtcatcttagttgtggtggggaagacaaagaaataagcaaacaagaaactagagttactatacaagaaactctcctgagtttgtaaaccttaagcataaggattcagttgacctttttcttggttcatcaatctggaaagaacttacataaagcgccattgacactgtcacctgggagctccatgggccgtaagtctttgacagccaatttaatttgaggtcagagggccttgaggtacacagtcagcactgtttgaacacttttcctgaaagcaaaactcacagctccctgcgccctctgacaacactagctatttctgccagagtaagaacttctattactattttattattgttcatatgtcttttgatgatggttgtgtgacagggggaagcaggatctatttggtttcttccccctccccccaccccttcctttttgtctctctttttttttctctaagaaaatcaccagactagtttttccatcttgagtaatttcttatgtgggacagttttgatcctcattttgaaagcatgcgtgtgcacatgtgtgttgcctgtggtgccaggtgagacaggtggcactaactccagctgcttggaaggcatcccaagggcgcatcttaaagttggagcagacctcccttttccagcccctggggccattagaccacgtgctggaactagcattgtaaaattcccatcccagttccactcccctgaagtgaaacccttttttttttgtgacagtaaatcttaaaaatcattgtctctttatgaacatttcctcagtttcttctctgctgaaaatgtaagccatgctactttttaatgtattttgaattttgtgctcattggaaattgatatgctaatgcctcccccaccccccgccagacttttctttttatactttgtcttgtttttactggggtaggctgggcatgcgtgcgtgcctttagggcagcattttaaacctttgccaaaattgcaaatgggacatgtacattcttctgctccatcctacttaaacacctatcagctatttttatctttaaccttttctgtatgtttgaagtgtgtggggggtgtgtgtgtgtgtgaaagagcgagagaatgatgtcatctaaagttttttgaagaattatttggttttcattgcattaaaattctatcactcccagctttgttttcatttaaaaaaatatacaaagagctttgtaaatacaacacattttatttctcccccttcttttaatgtacagcttttttgccacttatatatacttaaaatattcccatgaattatgtccagttcttcttggaaaaaaatttggttttgaatgaacctgcaaagcatcctgcagcgtgagcagctcctccacctggagctccgaagcatcttctcaggccaaagcggcattacccgtgaatctgtcttctccgccacagcatggtttgaggcgcagtctgttaatatagctgggccatgtcagtgactgttgtgtttgtggggtcaggtggggggcatggtatttgcaaaaaaaacaaattatggctaatttattattttgttgcagtggggttaactgtaaactcatgtaagagtctgtgatttcctcattggttgatctctctctctgtaatcctcattgcaaattttcaccaggacagcgttttttgattagaggggagctctggcacagtatgctttaatttagcaggaacttccagatgatttaaattctcgatgctgtgatgacacacatatgatctttcgtgtttctgagcgactctactttcattgtttgccagcgtggctcgttgctgttgcccaataaagcttgtgtacgttc

SEQ ID NO: 341785 - DNA, 6458 bp, Homo sapiens
  misc_feature (2154)..(2154): n is a, c, g, or t
atttgctaaagtctagagacattctggttgtcaccatggagggtgtatgactggcatctagtgcgtaggggccagggatgctgctcaacattgtacagtgcacaggaggggccctgcagagcaaagagttatctggccccaaatgttcacagtgacgaggttgagactccctgttctagtccttatcttccctattctttcagtggaccacagtttgatgatatctgcagtcccaagtgtaaatctaaaatcatagcatgtgagtctattccagttgaaatagtaataactttcaaaacaaaggtcttaaatccatttgatctttctttcatcattgaaaatcttccaagtgctttgagttttccttttactttctgtagcctttgcccctaaatgaggccccttctcgcttttcatcttcagccaactgaaaaaacattggtgtctgttaagtgcactttgtacactgtctgtcatgggaagcgggctttgccgctgaaagagggtgttcctttcagtttctcattccttccggcctccctctctaggatgaatcaactggagaaattacgttttacatgaagggagcagatgtggtcatggctggcattgtgcagtacaatgactggttggaggaagagtgtggcaacatggcccgagaagggctgcgggtgctcgtggtggcaaagaagtctcttgcagaggagcagtatcaggactttgaagcccgctacgtccaggccaagctgagtgtgcacgaccgctccctcaaagtggccacggtgatcgagagcctggagatggagatggaactgctgtgcctgacgggcgtggaggaccagctgcaggcagatgtgcggcccacgctggagaccctgaggaatgctggcatcaaggtttggatgctgacaggggacaagctggagacagctacgtgcacagcgaagaatgcacatctggtgaccagaaaccaagacatccacgtttttcggctggtgaccaaccgcggggaggctcacctcgagctgaacgccttccgcaggaagcatgattgtgccctggtcatctcgggagactccctggaggtttgcctcaagtactatgagtacgagttcatggagctggcctgccagtgcccggccgtagtctgctgccgatgtgcccccacccagaaggcccagatcgtgcgcctgcttcaggagcgcacgggcaagctcacctgtgcagtaggggacggaggcaatgacgtcagcatgattcaggaatctgactgcggcgtgggagtggaaggaaaggaaggaaaacaggcttcgttggctgcagacttctccatcactcaatttaagcatcttggccggttgcttatggtgcatggccggaacagctacaagcggtcagccgccctcagccagttcgtgattcacaggagcctctgtatcagcaccatgcaggctgtcttttcctccgtgttttactttgcctccgtccctctctatcaaggattcctcatcattgggtactccacaatttacaccatgtttcctgtgttttctctggtcctggacaaagatgtcaaatcggaagttgccatgctgtatcctgagctctacaaggatcttctcaagggacggccgttgtcctacaagacattcttaatatgggttttgattagcatctatcaagggagcaccatcatgtacggggcgctgctgctgtttgagtcggagttcgtgcacatcgtggccatctccttcacctcgctgatcctcaccgagctgctcatggtggcgctgaccatccagacctggcactggctcatgacagtggcggagctgctcagcctggcctgctacatcgcctccctggtgttcttacacgagttcatcgatgtgtacttcatcgccaccttgtcattcttgtggaaagtctccgtcatcactctggtcagctgcctccccctctatgtcctcaagtacctgcgaagacggttctctccccccagctactcaaagctcacatcataggccgtgcgttcgctggagggggccctggtcttggcgcttccctgatggacagagctcaagttccatttatattaaccgccacctgtggattttgcagtaattgctaacacatgcagttttaatgggaagnggctctgcgcctaaacggagtcctaacgctgcatcaacgggagggagggtcctgaaagagacccatctgggcctgtctgaacccctcgttcttcatgtttaggtgaatatgaatatgttaaagctggtggctcagctgggagatttatatgggtcactgtgcgagcttccttatgacttgaattttgttgtcacatgataaaagtttctgtgtagctgaaggttgtagaaggcttgtgtgtgtgtgtgtgtgtgtgtgtgtgtgtgtgtgtgtttttaaagagtcctaatgtgtatgtactctttatgtctttcttgctcttacaaagaggtgtcagaaaaatagaaagctcttggtgtcggtttgggaggaaaagacagtgacatttggtaaaaagttatccacacaataatctccattcggaaatgctcagtatcgtctccagccagccctgcttatccaggttacactggattcctgggatcgtaaccagtaaatgagaggagagggagagagagtgtcctaagtccaatctgttatccttgatctgattcagcatccatagtgtgtgagttaacttcacctgccacctcgtaaaagaatttcagaggtgtgatcccgctttattgggacctggtaacaatcacaaagccagtggctgtttgagaaggacctcagacattttcagcagagttgttttagcaggaaacgtgccactgaatggcccctaaatgtgtcgacagtgtgataagagactcaactaattctttaggcaacatggcagatgtgactcagatcctccaagaccaaagcggaaaggtcagggggctgggactcttctcttccatagaagcctgtttcctgttaggaggcataatggaagatgaccccacaaaggcagaggcatctttcggaacaacactggtggcagctttcagaacaaggaacccctggtgggaggacgcccaagctacagcgttgggatctgggatctgttccactgccggcagatttcaaggggaacttgctgaaaggcagccagtggtgaagatttctcccctcccaggatggactacatgccggcatgtttcttataaagctgtggctgcttgtttcagaggaagggagtttgcagtcgcgggacgtggtagagcaaggcattcttgggttttcaagttgcttcttgcagaagccacatatgcatgccataagggttaagttggtggatctttaagagccaagtgtggttgagatcttggatttgcgtttacttcttgatgaatacatatccttcaaaccctctgcctggcgctacttctgtgtgcttcagagatgtacatcacagcctggtttctgatgcctactaactcctgctcttggagagctggagacacgaggatcagatagtcccttgcctttggagcactcttgataagcttttgtattttgtgttgtccttttaaaatgttctagaatgactttacgttgcaggtactggttaattggctgttgacaccacatctattttgtcttatgattctgcagttttgcagtacttttctctatctgattcagccatttctgccagagggaaaaggtcggcagaaaagatgtattgagtgaatagttaaggataggatctttgtccaaaaatttcagaaagattgagcaaatctgacgtattcattgagtgagtttctgtgttttcaaaggtggaggagaaatttgtgctggaagtttttaagcctccgttttcttggaaatcagtctgtaacactggcaagtcttaagatagtcccgtttagactttgcagatgctgaacctggctctgtaacgctgggaagtcttaagatagtcctgtttagactttgcaaaccctgtacctggctttgctcggagattcgggatgctggctcctgcaggcagggcgtgtgggagcctcgtcagaaagttttagaggtttccagcagaagcagaatgaagatggtctccctggccttttccttaattctcaattttgattgaggtgcacaagttgacttttaaagccaacgcttaagatactgattgacatcttcaagggagaatgctcccaggaggggctgaagaagccatagttggaagtggaaggtactcgtcagtgttctccacaaacctttttactctgttgtctcagccgcactggggcggaggcggtcaagggtgagaagtaccgacactcaagtgcaaactgccacgtcgttggcccatcccatcagtgggcagctggctgacgccattcactggacggtccctgaacacctaggaatgcacacaccgtgcttctcagacactggagacgcaaaggcaggaggatgcagtccggtgagaggacacgatctttacctgcacaatcagactgtaagcccagcagagaaccccaggggcgcctgggtacttctcggaggtcatcttagttgtggtggggaagacaaagaaataagcaaacaagaaactagagttactatacaagaaactctcctgagtttgtaaaccttaagcataaggattcagttgacctttttcttggttcatcaatctggaaagaacttacataaagcgccattgacactgtcacctgggagctccatgggccgtaagtctttgacagccaatttaatttgaggtcagagggccttgaggtacacagtcagcactgtttgaacacttttcctgaaagcaaaactcacagctccctgcgccctctgacaacactagctatttctgccagagtaagaacttctattactattttattattgttcatatgtcttttgatgatggttgtgtgacagggggaagcaggatctatttggtttcttccccctccccccaccccttcctttttgtctctctttttttttctctaagaaaatcaccagactagtttttccatcttgagtaatttcttatgtgggacagttttgatcctcattttgaaagcatgcgtgtgcacatgtgtgttgcctgtggtgccaggtgagacaggtggcactaactccagctgcttggaaggcatcccaagggcgcatcttaaagttggagcagacctcccttttccagcccctggggccattagaccacgtgctggaactagcattgtaaaattcccatcccagttccactcccctgaagtgaaacccttttttttttgtgacagtaaatcttaaaaatcattgtctctttatgaacatttcctcagtttcttctctgctgaaaatgtaagccatgctactttttaatgtattttgaattttgtgctcattggaaattgatatgctaatgcctcccccaccccccgccagacttttctttttatactttgtcttgtttttactggggtaggctgggcatgcgtgcgtgcctttagggcagcattttaaacctttgccaaaattgcaaatgggacatgtacattcttctgctccatcctacttaaacacctatcagctatttttatctttaaccttttctgtatgtttgaagtgtgtggggggtgtgtgtgtgtgtgaaagagcgagagaatgatgtcatctaaagttttttgaagaattatttggttttcattgcattaaaattctatcactcccagctttgttttcatttaaaaaaatatacaaagagctttgtaaatacaacacattttatttctcccccttcttttaatgtacagcttttttgccacttatatatacttaaaatattcccatgaattatgtccagttcttcttggaaaaaaatttggttttgaatgaacctgcaaagcatcctgcagcgtgagcagctcctccacctggagctccgaagcatcttctcaggccaaagcggcattacccgtgaatctgtcttctccgccacagcatggtttgaggcgcagtctgttaatatagctgggccatgtcagtgactgttgtgtttgtggggtcaggtggggggcatggtatttgcaaaaaaaacaaattatggctaatttattattttgttgcagtggggttaactgtaaactcatgtaagagtctgtgatttcctcattggttgatctctctctctgtaatcctcattgcaaattttcaccaggacagcgttttttgattagaggggagctctggcacagtatgctttaatttagcaggaacttccagatgatttaaattctcgatgctgtgatgacacacatatgatctttcgtgtttctgagcgactctactttcattgtttgccagcgtggctcgttgctgttgcccaataaagcttgtgtacgttc

SEQ ID NO: 341786 - DNA, 7563 bp, Homo sapiens
  misc_feature (3233)..(3233): n is a, c, g, or t
gcggatggacagcaggccccgcgccgggtgctgcgagtggctgagatgctgcggtggaggggaggccaggccccgcactgtctggctggggcaccccgagaagagagaccagaggtatcctcggaatgtcatcaacaatcagaagtacaatttcttcacctttcttcctggggtgctgttcaaccagttcaaatactttttcaacctctatttcttacttcttgcctgctctcagtttgttcccgaaatgagacttggtgcactctatacctactgggttcccctgggcttcgtgctggccgtcactgtcatccgtgaggcggtggaggagatccgatgctacgtgcgggacaaggaagtcaactcccaggtctacagccggctcacagcacgaggcacagtgaaggtgaagagttctaacatccaagttggagaccttatcatcgttgaaaagaaccagcgggtccctgccgacatgatcttcctgaggacatcagaaaaaaacgggtcatgcttcttgcggacggatcagctggatggggagacggactggaagctgcggcttcccgtggcctgcacgcagaggctccccacggccgccgaccttcttcagattcgatcgtatgtgtacgcagaagagccaaatattgacattcacaacttcgtgggaacttttacccgagaagacagcgaccccccgatcagcgagagcctgagcatagagaacacgctgtgggctggcactgtggtcgcatcaggtactgttgtgggtgttgttctttacactggcagagaactccggagtgtcatgaatacctcaaatccccgaagtaagatcggcctgttcgacttggaagtgaactgcctcaccaagatcctctttggtgccctggtggtggtctcgctggtcatggttgcccttcagcactttgcaggccgttggtacctgcagatcatccgcttcctcctcttgttttccaacatcatccccattagtttgcgcgtgaacctggacatgggcaagatcgtgtacagctgggtgattcgaagggactcaaaaatccccgggaccgtggttcgctccagcacgattcctgagcagctgggcaggatttcgtacttactcacagacaagacaggcactcttacccagaacgagatgattttcaaacggctccatctcggaacagtagcctacggcctcgactcaatggacgaagtacaaagccacattttcagcatttacacccagcaatcccaggacccaccggctcagaagggcccaacgctcaccactaaggtccggcggaccatgagcagccgcgtgcacgaagccgtgaaggccatcgcgctctgccacaacgtgactcccgtgtatgagtccaacggtgtgactgatcaggctgaggccgagaagcagtacgaagactcctgccgcgtataccaggcatccagccccgatgaggtggccctggtacagtggacggaaagtgtgggcttaaccctggtgggccgagaccagtcttccatgcagctgaggacccctggcgaccagatcctgaacttcaccatcctacagatcttccctttcacctatgaaagcaaacgtatgggcatcatcgtgcgggatgaatcaactggagaaattacgttttacatgaagggagcagatgtggtcatggctggcattgtgcagtacaatgactggttggaggaagagtgtggcaacatggcccgagaagggctgcgggtgctcgtggtggcaaagaagtctcttgcagaggagcagtatcaggactttgaagcccgctacgtccaggccaagctgagtgtgcacgaccgctccctcaaagtggccacggtgatcgagagcctggagatggagatggaactgctgtgcctgacgggcgtggaggaccagctgcaggcagatgtgcggcccacgctggagaccctgaggaatgctggcatcaaggtttggatgctgacaggggacaagctggagacagctacgtgcacagcgaagaatgcacatctggtgaccagaaaccaagacatccacgtttttcggctggtgaccaaccgcggggaggctcacctcgagctgaacgccttccgcaggaagcatgattgtgccctggtcatctcgggagactccctggaggtttgcctcaagtactatgagtacgagttcatggagctggcctgccagtgcccggccgtagtctgctgccgatgtgcccccacccagaaggcccagatcgtgcgcctgcttcaggagcgcacgggcaagctcacctgtgcagtaggggacggaggcaatgacgtcagcatgattcaggaatctgactgcggcgtgggagtggaaggaaaggaaggaaaacaggcttcgttggctgcagacttctccatcactcaatttaagcatcttggccggttgcttatggtgcatggccggaacagctacaagcggtcagccgccctcagccagttcgtgattcacaggagcctctgtatcagcaccatgcaggctgtcttttcctccgtgttttactttgcctccgtccctctctatcaaggattcctcatcattgggtactccacaatttacaccatgtttcctgtgttttctctggtcctggacaaagatgtcaaatcggaagttgccatgctgtatcctgagctctacaaggatcttctcaagggacggccgttgtcctacaagacattcttaatatgggttttgattagcatctatcaagggagcaccatcatgtacggggcgctgctgctgtttgagtcggagttcgtgcacatcgtggccatctccttcacctcgctgatcctcaccgagctgctcatggtggcgctgaccatccagacctggcactggctcatgacagtggcggagctgctcagcctggcctgctacatcgcctccctggtgttcttacacgagttcatcgatgtgtacttcatcgccaccttgtcattcttgtggaaagtctccgtcatcactctggtcagctgcctccccctctatgtcctcaagtacctgcgaagacggttctctccccccagctactcaaagctcacatcataggccgtgcgttcgctggagggggccctggtcttggcgcttccctgatggacagagctcaagttccatttatattaaccgccacctgtggattttgcagtaattgctaacacatgcagttttaatgggaagnggctctgcgcctaaacggagtcctaacgctgcatcaacgggagggagggtcctgaaagagacccatctgggcctgtctgaacccctcgttcttcatgtttaggtgaatatgaatatgttaaagctggtggctcagctgggagatttatatgggtcactgtgcgagcttccttatgacttgaattttgttgtcacatgataaaagtttctgtgtagctgaaggttgtagaaggcttgtgtgtgtgtgtgtgtgtgtgtgtgtgtgtgtgtgtgtttttaaagagtcctaatgtgtatgtactctttatgtctttcttgctcttacaaagaggtgtcagaaaaatagaaagctcttggtgtcggtttgggaggaaaagacagtgacatttggtaaaaagttatccacacaataatctccattcggaaatgctcagtatcgtctccagccagccctgcttatccaggttacactggattcctgggatcgtaaccagtaaatgagaggagagggagagagagtgtcctaagtccaatctgttatccttgatctgattcagcatccatagtgtgtgagttaacttcacctgccacctcgtaaaagaatttcagaggtgtgatcccgctttattgggacctggtaacaatcacaaagccagtggctgtttgagaaggacctcagacattttcagcagagttgttttagcaggaaacgtgccactgaatggcccctaaatgtgtcgacagtgtgataagagactcaactaattctttaggcaacatggcagatgtgactcagatcctccaagaccaaagcggaaaggtcagggggctgggactcttctcttccatagaagcctgtttcctgttaggaggcataatggaagatgaccccacaaaggcagaggcatctttcggaacaacactggtggcagctttcagaacaaggaacccctggtgggaggacgcccaagctacagcgttgggatctgggatctgttccactgccggcagatttcaaggggaacttgctgaaaggcagccagtggtgaagatttctcccctcccaggatggactacatgccggcatgtttcttataaagctgtggctgcttgtttcagaggaagggagtttgcagtcgcgggacgtggtagagcaaggcattcttgggttttcaagttgcttcttgcagaagccacatatgcatgccataagggttaagttggtggatctttaagagccaagtgtggttgagatcttggatttgcgtttacttcttgatgaatacatatccttcaaaccctctgcctggcgctacttctgtgtgcttcagagatgtacatcacagcctggtttctgatgcctactaactcctgctcttggagagctggagacacgaggatcagatagtcccttgcctttggagcactcttgataagcttttgtattttgtgttgtccttttaaaatgttctagaatgactttacgttgcaggtactggttaattggctgttgacaccacatctattttgtcttatgattctgcagttttgcagtacttttctctatctgattcagccatttctgccagagggaaaaggtcggcagaaaagatgtattgagtgaatagttaaggataggatctttgtccaaaaatttcagaaagattgagcaaatctgacgtattcattgagtgagtttctgtgttttcaaaggtggaggagaaatttgtgctggaagtttttaagcctccgttttcttggaaatcagtctgtaacactggcaagtcttaagatagtcccgtttagactttgcagatgctgaacctggctctgtaacgctgggaagtcttaagatagtcctgtttagactttgcaaaccctgtacctggctttgctcggagattcgggatgctggctcctgcaggcagggcgtgtgggagcctcgtcagaaagttttagaggtttccagcagaagcagaatgaagatggtctccctggccttttccttaattctcaattttgattgaggtgcacaagttgacttttaaagccaacgcttaagatactgattgacatcttcaagggagaatgctcccaggaggggctgaagaagccatagttggaagtggaaggtactcgtcagtgttctccacaaacctttttactctgttgtctcagccgcactggggcggaggcggtcaagggtgagaagtaccgacactcaagtgcaaactgccacgtcgttggcccatcccatcagtgggcagctggctgacgccattcactggacggtccctgaacacctaggaatgcacacaccgtgcttctcagacactggagacgcaaaggcaggaggatgcagtccggtgagaggacacgatctttacctgcacaatcagactgtaagcccagcagagaaccccaggggcgcctgggtacttctcggaggtcatcttagttgtggtggggaagacaaagaaataagcaaacaagaaactagagttactatacaagaaactctcctgagtttgtaaaccttaagcataaggattcagttgacctttttcttggttcatcaatctggaaagaacttacataaagcgccattgacactgtcacctgggagctccatgggccgtaagtctttgacagccaatttaatttgaggtcagagggccttgaggtacacagtcagcactgtttgaacacttttcctgaaagcaaaactcacagctccctgcgccctctgacaacactagctatttctgccagagtaagaacttctattactattttattattgttcatatgtcttttgatgatggttgtgtgacagggggaagcaggatctatttggtttcttccccctccccccaccccttcctttttgtctctctttttttttctctaagaaaatcaccagactagtttttccatcttgagtaatttcttatgtgggacagttttgatcctcattttgaaagcatgcgtgtgcacatgtgtgttgcctgtggtgccaggtgagacaggtggcactaactccagctgcttggaaggcatcccaagggcgcatcttaaagttggagcagacctcccttttccagcccctggggccattagaccacgtgctggaactagcattgtaaaattcccatcccagttccactcccctgaagtgaaacccttttttttttgtgacagtaaatcttaaaaatcattgtctctttatgaacatttcctcagtttcttctctgctgaaaatgtaagccatgctactttttaatgtattttgaattttgtgctcattggaaattgatatgctaatgcctcccccaccccccgccagacttttctttttatactttgtcttgtttttactggggtaggctgggcatgcgtgcgtgcctttagggcagcattttaaacctttgccaaaattgcaaatgggacatgtacattcttctgctccatcctacttaaacacctatcagctatttttatctttaaccttttctgtatgtttgaagtgtgtggggggtgtgtgtgtgtgtgaaagagcgagagaatgatgtcatctaaagttttttgaagaattatttggttttcattgcattaaaattctatcactcccagctttgttttcatttaaaaaaatatacaaagagctttgtaaatacaacacattttatttctcccccttcttttaatgtacagcttttttgccacttatatatacttaaaatattcccatgaattatgtccagttcttcttggaaaaaaatttggttttgaatgaacctgcaaagcatcctgcagcgtgagcagctcctccacctggagctccgaagcatcttctcaggccaaagcggcattacccgtgaatctgtcttctccgccacagcatggtttgaggcgcagtctgttaatatagctgggccatgtcagtgactgttgtgtttgtggggtcaggtggggggcatggtatttgcaaaaaaaacaaattatggctaatttattattttgttgcagtggggttaactgtaaactcatgtaagagtctgtgatttcctcattggttgatctctctctctgtaatcctcattgcaaattttcaccaggacagcgttttttgattagaggggagctctggcacagtatgctttaatttagcaggaacttccagatgatttaaattctcgatgctgtgatgacacacatatgatctttcgtgtttctgagcgactctactttcattgtttgccagcgtggctcgttgctgttgcccaataaagcttgtgtacgttcaaaaaaaaaaaacaaacagaaacaaa

SEQ ID NO: 341787 - DNA, 7520 bp, Homo sapiens
  misc_feature (3233)..(3233): n is a, c, g, or t
gcggatggacagcaggccccgcgccgggtgctgcgagtggctgagatgctgcggtggaggggaggccaggccccgcactgtctggctggggcaccccgagaagagagaccagaggtatcctcggaatgtcatcaacaatcagaagtacaatttcttcacctttcttcctggggtgctgttcaaccagttcaaatactttttcaacctctatttcttacttcttgcctgctctcagtttgttcccgaaatgagacttggtgcactctatacctactgggttcccctgggcttcgtgctggccgtcactgtcatccgtgaggcggtggaggagatccgatgctacgtgcgggacaaggaagtcaactcccaggtctacagccggctcacagcacgaggcacagtgaaggtgaagagttctaacatccaagttggagaccttatcatcgttgaaaagaaccagcgggtccctgccgacatgatcttcctgaggacatcagaaaaaaacgggtcatgcttcttgcggacggatcagctggatggggagacggactggaagctgcggcttcccgtggcctgcacgcagaggctccccacggccgccgaccttcttcagattcgatcgtatgtgtacgcagaagagccaaatattgacattcacaacttcgtgggaacttttacccgagaagacagcgaccccccgatcagcgagagcctgagcatagagaacacgctgtgggctggcactgtggtcgcatcaggtactgttgtgggtgttgttctttacactggcagagaactccggagtgtcatgaatacctcaaatccccgaagtaagatcggcctgttcgacttggaagtgaactgcctcaccaagatcctctttggtgccctggtggtggtctcgctggtcatggttgcccttcagcactttgcaggccgttggtacctgcagatcatccgcttcctcctcttgttttccaacatcatccccattagtttgcgcgtgaacctggacatgggcaagatcgtgtacagctgggtgattcgaagggactcaaaaatccccgggaccgtggttcgctccagcacgattcctgagcagctgggcaggatttcgtacttactcacagacaagacaggcactcttacccagaacgagatgattttcaaacggctccatctcggaacagtagcctacggcctcgactcaatggacgaagtacaaagccacattttcagcatttacacccagcaatcccaggacccaccggctcagaagggcccaacgctcaccactaaggtccggcggaccatgagcagccgcgtgcacgaagccgtgaaggccatcgcgctctgccacaacgtgactcccgtgtatgagtccaacggtgtgactgatcaggctgaggccgagaagcagtacgaagactcctgccgcgtataccaggcatccagccccgatgaggtggccctggtacagtggacggaaagtgtgggcttaaccctggtgggccgagaccagtcttccatgcagctgaggacccctggcgaccagatcctgaacttcaccatcctacagatcttccctttcacctatgaaagcaaacgtatgggcatcatcgtgcgggatgaatcaactggagaaattacgttttacatgaagggagcagatgtggtcatggctggcattgtgcagtacaatgactggttggaggaagagtgtggcaacatggcccgagaagggctgcgggtgctcgtggtggcaaagaagtctcttgcagaggagcagtatcaggactttgaagcccgctacgtccaggccaagctgagtgtgcacgaccgctccctcaaagtggccacggtgatcgagagcctggagatggagatggaactgctgtgcctgacgggcgtggaggaccagctgcaggcagatgtgcggcccacgctggagaccctgaggaatgctggcatcaaggtttggatgctgacaggggacaagctggagacagctacgtgcacagcgaagaatgcacatctggtgaccagaaaccaagacatccacgtttttcggctggtgaccaaccgcggggaggctcacctcgagctgaacgccttccgcaggaagcatgattgtgccctggtcatctcgggagactccctggaggtttgcctcaagtactatgagtacgagttcatggagctggcctgccagtgcccggccgtagtctgctgccgatgtgcccccacccagaaggcccagatcgtgcgcctgcttcaggagcgcacgggcaagctcacctgtgcagtaggggacggaggcaatgacgtcagcatgattcaggaatctgactgcggcgtgggagtggaaggaaaggaaggaaaacaggcttcgttggctgcagacttctccatcactcaatttaagcatcttggccggttgcttatggtgcatggccggaacagctacaagcggtcagccgccctcagccagttcgtgattcacaggagcctctgtatcagcaccatgcaggctgtcttttcctccgtgttttactttgcctccgtccctctctatcaaggattcctcatcattgggtactccacaatttacaccatgtttcctgtgttttctctggtcctggacaaagatgtcaaatcggaagttgccatgctgtatcctgagctctacaaggatcttctcaagggacggccgttgtcctacaagacattcttaatatgggttttgattagcatctatcaagggagcaccatcatgtacggggcgctgctgctgtttgagtcggagttcgtgcacatcgtggccatctccttcacctcgctgatcctcaccgagctgctcatggtggcgctgaccatccagacctggcactggctcatgacagtggcggagctgctcagcctggcctgctacatcgcctccctggtgttcttacacgagttcatcgatgtgtacttcatcgccaccttgtcattcttgtggaaagtctccgtcatcactctggtcagctgcctccccctctatgtcctcaagtacctgcgaagacggttctctccccccagctactcaaagctcacatcataggccgtgcgttcgctggagggggccctggtcttggcgcttccctgatggacagagctcaagttccatttatattaaccgccacctgtggattttgcagtaattgctaacacatgcagttttaatgggaagnggctctgcgcctaaacggagtcctaacgctgcatcaacgggagggagggtcctgaaagagacccatctgggcctgtctgaacccctcgttcttcatgtttaggtgaatatgaatatgttaaagctggtggctcagctgggagatttatatgggtcactgtgcgagcttccttatgacttgaattttgttgtcacatgataaaagtttctgtgtagctgaaggttgtagaaggcttgtgtgtgtgtgtgtgtgtgtgtgtgtgtgtgtgtgtgtttttaaagagtcctaatgtgtatgtactctttatgtctttcttgctcttacaaagaggtgtcagaaaaatagaaagctcttggtgtcggtttgggaggaaaagacagtgacatttggtaaaaagttatccacacaataatctccattcggaaatgctcagtatcgtctccagccagccctgcttatccaggttacactggattcctgggatcgtaaccagtaaatgagaggagagggagagagagtgtcctaagtccaatctgttatccttgatctgattcagcatccatagtgtgtgagttaacttcacctgccacctcgtaaaagaatttcagaggtgtgatcccgctttattgggacctggtaacaatcacaaagccagtggctgtttgagaaggacctcagacattttcagcagagttgttttagcaggaaacgtgccactgaatggcccctaaatgtgtcgacagtgtgataagagactcaactaattctttaggcaacatggcagatgtgactcagatcctccaagaccaaagcggaaaggtcagggggctgggactcttctcttccatagaagcctgtttcctgttaggaggcataatggaagatgaccccacaaaggcagaggcatctttcggaacaacactggtggcagctttcagaacaaggaacccctggtgggaggacgcccaagctacagcgttgggatctgggatctgttccactgccggcagatttcaaggggaacttgctgaaaggcagccagtggtgaagatttctcccctcccaggatggactacatgccggcatgtttcttataaagctgtggctgcttgtttcagaggaagggagtttgcagtcgcgggacgtggtagagcaaggcattcttgggttttcaagttgcttcttgcagaagccacatatgcatgccataagggttaagttggtggatctttaagagccaagtgtggttgagatcttggatttgcgtttacttcttgatgaatacatatccttcaaaccctctgcctggcgctacttctgtgtgcttcagagatgtacatcacagcctggtttctgatgcctactaactcctgctcttggagagctggagacacgaggatcagatagtcccttgcctttggagcactcttgataagcttttgtattttgtgttgtccttttaaaatgttctagaatgactttacgttgcaggtactggttaattggctgttgacaccacatctattttgtcttatgattctgcagttttgcagtacttttctctatctgattcagccatttctgccagagggaaaaggtcggcagaaaagatgtattgagtgaatagttaaggataggatctttgtccaaaaatttcagaaagattgagcaaatctgacgtattcattgagtgagtttctgtgttttcaaaggtggaggagaaatttgtgctggaagtttttaagcctccgttttcttggaaatcagtctgtaacactggcaagtcttaagatagtcccgtttagactttgcagatgctgaacctggctctgtaacgctgggaagtcttaagatagtcctgtttagactttgcaaaccctgtacctggctttgctcggagattcgggatgctggctcctgcaggcagggcgtgtgggagcctcgtcagaaagttttagaggtttccagcagaagcagaatgaagatggtctccctggccttttccttaattctcaattttgattgaggtgcacaagttgacttttaaagccaacgcttaagatactgattgacatcttcaagggagaatgctcccaggaggggctgaagaagccatagttggaagtggaaggtactcgtcagtgttctccacaaacctttttactctgttgtctcagccgcactggggcggaggcggtcaagggtgagaagtaccgacactcaagtgcaaactgccacgtcgttggcccatcccatcagtgggcagctggctgacgccattcactggacggtccctgaacacctaggaatgcacacaccgtgcttctcagacactggagacgcaaaggcaggaggatgcagtccggtgagaggacacgatctttacctgcacaatcagactgtaagcccagcagagaaccccaggggcgcctgggtacttctcggaggtcatcttagttgtggtggggaagacaaagaaataagcaaacaagaaactagagttactatacaagaaactctcctgagtttgtaaaccttaagcataaggattcagttgacctttttcttggttcatcaatctggaaagaacttacataaagcgccattgacactgtcacctgggagctccatgggccgtaagtctttgacagccaatttaatttgaggtcagagggccttgaggtacacagtcagcactgtttgaacacttttcctgaaagcaaaactcacagctccctgcgccctctgacaacactagctatttctgccagagtaagaacttctattactattttattattgttcatatgtcttttgatgatggttgtgtgacagggggaagcaggatctatttggtttcttccccctccccccaccccttcctttttgtctctctttttttttctctaagaaaatcaccagactagtttttccatcttgagtaatttcttatgtgggacagttttgatcctcattttgaaagcatgcgtgtgcacatgtgtgttgcctgtggtgccaggtgagacaggtggcactaactccagctgcttggaaggcatcccaagggcgcatcttaaagttggagcagacctcccttttccagcccctggggccattagaccacgtgctggaactagcattgtaaaattcccatcccagttccactcccctgaagtgaaacccttttttttttgtgacagtaaatcttaaaaatcattgtctctttatgaacatttcctcagtttcttctctgctgaaaatgtaagccatgctactttttaatgtattttgaattttgtgctcattggaaattgatatgctaatgcctcccccaccccccgccagacttttctttttatactttgtcttgtttttactggggtaggctgggcatgcgtgcgtgcctttagggcagcattttaaacctttgccaaaattgcaaatgggacatgtacattcttctgctccatcctacttaaacacctatcagctatttttatctttaaccttttctgtatgtttgaagtgtgtggggggtgtgtgtgtgtgtgaaagagcgagagaatgatgtcatctaaagttttttgaagaattatttggttttcattgcattaaaattctatcactcccagctttgttttcatttaaaaaaatatacaaagagctttgtaaatacaacacattttatttctcccccttcttttaatgtacagcttttttgccacttatatatacttaaaatattcccatgaattatgtccagttcttcttggaaaaaaatttggttttgaatgaacctgcaaagcatcctgcagcgtgagcagctcctccacctggagctccgaagcatcttctcaggccaaagcggcattacccgtgaatctgtcttctccgccacagcatggtttgaggcgcagtctgttaatatagctgggccatgtcagtgactgttgtgtttgtggggtcaggtggggggcatggtatttgcaaaaaaaacaaattatggctaatttattattttgttgcagtggggttaactgtaaactcatgtaagagtctgtgatttcctcattggttgatctctctctctgtaatcctcattgcaaattttcaccaggacagcgttttttgattagaggggagctctggcacagtatacttccagatgatttaaattctcgatgctgtgatgacacacatatgatctttcgtgtttctgagcgactctactttcattgtttgccagcgtggctcgttgctgttgcccaataaagcttgtgtacgttc

SEQ ID NO: 341788 - DNA, 7103 bp, Homo sapiens
  misc_feature (3233)..(3233): n is a, c, g, or t
gcggatggacagcaggccccgcgccgggtgctgcgagtggctgagatgctgcggtggaggggaggccaggccccgcactgtctggctggggcaccccgagaagagagaccagaggtatcctcggaatgtcatcaacaatcagaagtacaatttcttcacctttcttcctggggtgctgttcaaccagttcaaatactttttcaacctctatttcttacttcttgcctgctctcagtttgttcccgaaatgagacttggtgcactctatacctactgggttcccctgggcttcgtgctggccgtcactgtcatccgtgaggcggtggaggagatccgatgctacgtgcgggacaaggaagtcaactcccaggtctacagccggctcacagcacgaggcacagtgaaggtgaagagttctaacatccaagttggagaccttatcatcgttgaaaagaaccagcgggtccctgccgacatgatcttcctgaggacatcagaaaaaaacgggtcatgcttcttgcggacggatcagctggatggggagacggactggaagctgcggcttcccgtggcctgcacgcagaggctccccacggccgccgaccttcttcagattcgatcgtatgtgtacgcagaagagccaaatattgacattcacaacttcgtgggaacttttacccgagaagacagcgaccccccgatcagcgagagcctgagcatagagaacacgctgtgggctggcactgtggtcgcatcaggtactgttgtgggtgttgttctttacactggcagagaactccggagtgtcatgaatacctcaaatccccgaagtaagatcggcctgttcgacttggaagtgaactgcctcaccaagatcctctttggtgccctggtggtggtctcgctggtcatggttgcccttcagcactttgcaggccgttggtacctgcagatcatccgcttcctcctcttgttttccaacatcatccccattagtttgcgcgtgaacctggacatgggcaagatcgtgtacagctgggtgattcgaagggactcaaaaatccccgggaccgtggttcgctccagcacgattcctgagcagctgggcaggatttcgtacttactcacagacaagacaggcactcttacccagaacgagatgattttcaaacggctccatctcggaacagtagcctacggcctcgactcaatggacgaagtacaaagccacattttcagcatttacacccagcaatcccaggacccaccggctcagaagggcccaacgctcaccactaaggtccggcggaccatgagcagccgcgtgcacgaagccgtgaaggccatcgcgctctgccacaacgtgactcccgtgtatgagtccaacggtgtgactgatcaggctgaggccgagaagcagtacgaagactcctgccgcgtataccaggcatccagccccgatgaggtggccctggtacagtggacggaaagtgtgggcttaaccctggtgggccgagaccagtcttccatgcagctgaggacccctggcgaccagatcctgaacttcaccatcctacagatcttccctttcacctatgaaagcaaacgtatgggcatcatcgtgcgggatgaatcaactggagaaattacgttttacatgaagggagcagatgtggtcatggctggcattgtgcagtacaatgactggttggaggaagagtgtggcaacatggcccgagaagggctgcgggtgctcgtggtggcaaagaagtctcttgcagaggagcagtatcaggactttgaagcccgctacgtccaggccaagctgagtgtgcacgaccgctccctcaaagtggccacggtgatcgagagcctggagatggagatggaactgctgtgcctgacgggcgtggaggaccagctgcaggcagatgtgcggcccacgctggagaccctgaggaatgctggcatcaaggtttggatgctgacaggggacaagctggagacagctacgtgcacagcgaagaatgcacatctggtgaccagaaaccaagacatccacgtttttcggctggtgaccaaccgcggggaggctcacctcgagctgaacgccttccgcaggaagcatgattgtgccctggtcatctcgggagactccctggaggtttgcctcaagtactatgagtacgagttcatggagctggcctgccagtgcccggccgtagtctgctgccgatgtgcccccacccagaaggcccagatcgtgcgcctgcttcaggagcgcacgggcaagctcacctgtgcagtaggggacggaggcaatgacgtcagcatgattcaggaatctgactgcggcgtgggagtggaaggaaaggaaggaaaacaggcttcgttggctgcagacttctccatcactcaatttaagcatcttggccggttgcttatggtgcatggccggaacagctacaagcggtcagccgccctcagccagttcgtgattcacaggagcctctgtatcagcaccatgcaggctgtcttttcctccgtgttttactttgcctccgtccctctctatcaaggattcctcatcattgggtactccacaatttacaccatgtttcctgtgttttctctggtcctggacaaagatgtcaaatcggaagttgccatgctgtatcctgagctctacaaggatcttctcaagggacggccgttgtcctacaagacattcttaatatgggttttgattagcatctatcaagggagcaccatcatgtacggggcgctgctgctgtttgagtcggagttcgtgcacatcgtggccatctccttcacctcgctgatcctcaccgagctgctcatggtggcgctgaccatccagacctggcactggctcatgacagtggcggagctgctcagcctggcctgctacatcgcctccctggtgttcttacacgagttcatcgatgtgtacttcatcgccaccttgtcattcttgtggaaagtctccgtcatcactctggtcagctgcctccccctctatgtcctcaagtacctgcgaagacggttctctccccccagctactcaaagctcacatcataggccgtgcgttcgctggagggggccctggtcttggcgcttccctgatggacagagctcaagttccatttatattaaccgccacctgtggattttgcagtaattgctaacacatgcagttttaatgggaagnggctctgcgcctaaacggagtcctaacgctgcatcaacgggagggagggtcctgaaagagacccatctgggcctgtctgaacccctcgttcttcatgtttaggtgaatatgaatatgttaaagctggtggctcagctgggagatttatatgggtcactgtgcgagcttccttatgacttgaattttgttgtcacatgataaaagtttctgtgtagctgaaggttgtagaaggcttgtgtgtgtgtgtgtgtgtgtgtgtgtgtgtgtgtgtgtttttaaagagtcctaatgtgtatgtactctttatgtctttcttgctcttacaaagaggtgtcagaaaaatagaaagctcttggtgtcggtttgggaggaaaagacagtgacatttggtaaaaagttatccacacaataatctccattcggaaatgctcagtatcgtctccagccagccctgcttatccaggttacactggattcctgggatcgtaaccagtaaatgagaggagagggagagagagtgtcctaagtccaatctgttatccttgatctgattcagcatccatagtgtgtgagttaacttcacctgccacctcgtaaaagaatttcagaggtgtgatcccgctttattgggacctggtaacaatcacaaagccagtggctgtttgagaaggacctcagacattttcagcagagttgttttagcaggaaacgtgccactgaatggcccctaaatgtgtcgacagtgtgataagagactcaactaattctttaggcaacatggcagatgtgactcagatcctccaagaccaaagcggaaaggtcagggggctgggactcttctcttccatagaagcctgtttcctgttaggaggcataatggaagatgaccccacaaaggcagaggcatctttcggaacaacactggtggcagctttcagaacaaggaacccctggtgggaggacgcccaagctacagcgttgggatctgggatctgttccactgccggcagatttcaaggggaacttgctgaaaggcagccagtggtgaagatttctcccctcccaggatggactacatgccggcatgtttcttataaagctgtggctgcttgtttcagaggaagggagtttgcagtcgcgggacgtggtagagcaaggcattcttgggttttcaagttgcttcttgcagaagccacatatgcatgccataagggttaagttggtggatctttaagagccaagtgtggttgagatcttggatttgcgtttacttcttgatgaatacatatccttcaaaccctctgcctggcgctacttctgtgtgcttcagagatgtacatcacagcctggtttctgatgcctactaactcctgctcttggagagctggagacacgaggatcagatagtcccttgcctttggagcactcttgataagcttttgtattttgtgttgtccttttaaaatgttctagaatgactttacgttgcaggtactggttaattggctgttgacaccacatctattttgtcttatgattctgcagttttgcagtacttttctctatctgattcagccatttctgccagagggaaaaggtcggcagaaaagatgtattgagtgaatagttaaggataggatctttgtccaaaaatttcagaaagattgagcaaatctgacgtattcattgagtgagtttctgtgttttcaaaggtggaggagaaatttgtgctggaagtttttaagcctccgttttcttggaaatcagtctgtaacactggcaagtcttaagatagtcccgtttagactttgcagatgctgaacctggctctgtaacgctgggaagtcttaagatagtcctgtttagactttgcaaaccctgtacctggctttgctcggagattcgggatgctggctcctgcaggcagggcgtgtgggagcctcgtcagaaagttttagaggtttccagcagaagcagaatgaagatggtctccctggccttttccttaattctcaattttgattgaggtgcacaagttgacttttaaagccaacgcttaagatactgattgacatcttcaagggagaatgctcccaggaggggctgaagaagccatagttggaagtggaaggtactcgtcagtgttctccacaaacctttttactctgttgtctcagccgcactggggcggaggcggtcaagggtgagaagtaccgacactcaagtgcaaactgccacgtcgttggcccatcccatcagtgggcagctggctgacgccattcactggacggtccctgaacacctaggaatgcacacaccgtgcttctcagacactggagacgcaaaggcaggaggatgcagtccggtgagaggacacgatctttacctgcacaatcagactgtaagcccagcagagaaccccaggggcgcctgggtacttctcggaggtcatcttagttgtggtggggaagacaaagaaataagcaaacaagaaactagagttactatacaagaaactctcctgagtttgtaaaccttaagcataaggattcagttgacctttttcttggttcatcaatctggaaagaacttacataaagcgccattgacactgtcacctgggagctccatgggccgtaagtctttgacagccaatttaatttgaggtcagagggccttgaggtacacagtcagcactgtttgaacacttttcctgaaagcaaaactcacagctccctgcgccctctgacaacactagctatttctgccagagtaagaacttctattactattttattattgttcatatgtcttttgatgatggttgtgtgacagggggaagcaggatctatttggtttcttccccctcccccaccccccgccagacttttctttttatactttgtcttgtttttactggggtaggctgggcatgcgtgcgtgcctttagggcagcattttaaacctttgccaaaattgcaaatgggacatgtacattcttctgctccatcctacttaaacacctatcagctatttttatctttaaccttttctgtatgtttgaagtgtgtggggggtgtgtgtgtgtgtgaaagagcgagagaatgatgtcatctaaagttttttgaagaattatttggttttcattgcattaaaattctatcactcccagctttgttttcatttaaaaaaatatacaaagagctttgtaaatacaacacattttatttctcccccttcttttaatgtacagcttttttgccacttatatatacttaaaatattcccatgaattatgtccagttcttcttggaaaaaaatttggttttgaatgaacctgcaaagcatcctgcagcgtgagcagctcctccacctggagctccgaagcatcttctcaggccaaagcggcattacccgtgaatctgtcttctccgccacagcatggtttgaggcgcagtctgttaatatagctgggccatgtcagtgactgttgtgtttgtggggtcaggtggggggcatggtatttgcaaaaaaaacaaattatggctaatttattattttgttgcagtggggttaactgtaaactcatgtaagagtctgtgatttcctcattggttgatctctctctctgtaatcctcattgcaaattttcaccaggacagcgttttttgattagaggggagctctggcacagtatgctttaatttagcaggaacttccagatgatttaaattctcgatgctgtgatgacacacatatgatctttcgtgtttctgagcgactctactttcattgtttgccagcgtggctcgttgctgttgcccaataaagcttgtgtacgttcaaaaaaaaaaaacaaacagaaacaaa

SEQ ID NO: 341789 - DNA, 3540 bp, Homo sapiens
  misc_feature (3262)..(3262): n is a, c, g, or t
gcggatggacagcaggccccgcgccgggtgctgcgagtggctgagatgctgcggtggaggggaggccaggccccgcactgtctggctggggcaccccgagaagagagaccagaggtatcctcggaatgtcatcaacaatcagaagtacaatttcttcacctttcttcctggggtgctgttcaaccagttcaaatactttttcaacctctatttcttacttcttgcctgctctcagtttgttcccgaaatgagacttggtgcactctatacctactgggttcccctgggcttcgtgctggccgtcactgtcatccgtgaggcggtggaggagatccgatgctacgtgcgggacaaggaagtcaactcccaggtctacagccggctcacagcacgaggcacagtgaaggtgaagagttctaacatccaagttggagaccttatcatcgttgaaaagaaccagcgggtccctgccgacatgatcttcctgaggacatcagaaaaaaacgggtcatgcttcttgcggacggatcagctggatggggagacggactggaagctgcggcttcccgtggcctgcacgcagaggctccccacggccgccgaccttcttcagattcgatcgtatgtgtacgcagaagagccaaatattgacattcacaacttcgtgggaacttttacccgagaagacagcgaccccccgatcagcgagagcctgagcatagagaacacgctgtgggctggcactgtggtcgcatcaggtactgttgtgggtgttgttctttacactggcagagaactccggagtgtcatgaatacctcaaatccccgaagtaagatcggcctgttcgacttggaagtgaactgcctcaccaagatcctctttggtgccctggtggtggtctcgctggtcatggttgcccttcagcactttgcaggccgttggtacctgcagatcatccgcttcctcctcttgttttccaacatcatccccattagtttgcgcgtgaacctggacatgggcaagatcgtgtacagctgggtgattcgaagggactcaaaaatccccgggaccgtggttcgctccagcacgattcctgagcagctgggcaggatttcgtacttactcacagacaagacaggcactcttacccagaacgagatgattttcaaacggctccatctcggaacagtagcctacggcctcgactcaatggacgaagtacaaagccacattttcagcatttacacccagcaatcccaggacccaccggctcagaagggcccaacgctcaccactaaggtccggcggaccatgagcagccgcgtgcacgaagccgtgaaggccatcgcgctctgccacaacgtgactcccgtgtatgagtccaacggtgtgactgatcaggctgaggccgagaagcagtacgaagactcctgccgcgtataccaggcatccagccccgatgaggtggccctggtacagtggacggaaagtgtgggcttaaccctggtgggccgagaccagtcttccatgcagctgaggacccctggcgaccagatcctgaacttcaccatcctacagatcttccctttcacctatgaaagcaaacgtatgggcatcatcgtgcgggatgaatcaactggagaaattacgttttacatgaagggagcagatgtggtcatggctggcattgtgcagtacaatgactggttggaggaagagtgtggcaacatggcccgagaagggctgcgggtgctcgtggtggcaaagaagtctcttgcagaggagcagtatcaggactttgaagcccgctacgtccaggccaagctgagtgtgcacgaccgctccctcaaagtggccacggtgatcgagagcctggagatggagatggaactgctgtgcctgacgggcgtggaggaccagctgcaggcagatgtgcggcccacgctggagaccctgaggaatgctggcatcaaggtttggatgctgacaggggacaagctggagacagctacgtgcacagcgaagaatgcacatctggtgaccagaaaccaagacatccacgtttttcggctggtgaccaaccgcggggaggctcacctcgagctgaacgccttccgcaggaagcatgattgtgccctggtcatctcgggagactccctggaggtttgcctcaagtactatgagtacgagttcatggagctggcctgccagtgcccggccgtagtctgctgccgatgtgcccccacccagaaggcccagatcgtgcgcctgcttcaggagcgcacgggcaagctcacctgtgcagtaggggacggaggcaatgacgtcagcatgattcaggaatctgactgcggcgtgggagtggaaggaaaggaaggaaaacaggcttcgttggctgcagacttctccatcactcaatttaagcatcttggccggttgcttatggtgcatggccggaacagctacaagcggtcagccgccctcagccagttcgtgattcacaggagcctctgtatcagcaccatgcaggctgtcttttcctccgtgttttactttgcctccgtccctctctatcaaggattcctcatcattgggtaaggaaatcctgccaaggaattaattgtttacaaaaccttcttcaaatgctgcaacagagagaagaaacgtggtggaaaaattcttgggttcccaagccacattggattcccagccccagcgaatgcaggcccagcaccatggtttagaacctccttcaattaacaaggttttgagctgttaagcccttaaccagatggaggaagtggagttggagatgtgtgtggtgtgttgcactttgccatttgtacctggtcttgaaaaaatactccagagttatcagttgattgaggagagcaaggtggaaggtttgcagacttggtgatttcactggggtcttaataaaaaggggtgggggatctgaaaaatgccctcctggcctgaactgagcccagtagaagtcccatccttggagctccagggagggccagagtccactgcctcggggatgtgcaagtaacagagcttggctgctgtgccacagtgacagagatgatgtcacttgggcctttgcagcctgcaaacccacccccattactgacctggaacttcaggatgatccttctgaccttttcagagaatgtgctcagtctctgaatcacccaggtaggtggagtttggttaccgagtgccctagatacagacacatgcagctgaggccacttntggttatgaggagacggcgggtgcgggaaggtcagctgcgctctggagagtctcacagagtccgctttccatcctactgtgttggctgatgagttcagcctgagaggaggcactagaattctgcctgcttctaactggaaaagcgggctgtctttcgtcgggttctggaagagtacaagaacattacagaatatagtcaggggttccctgagctgtgcgccgtgcgaccttccgtggtctggtcccatctttcccgtgggtcctcatttcctcttccg

SEQ ID NO: 341790 - DNA, 1034 bp, Homo sapiens
gcggatggacagcaggccccgcgccgggtgctgcgagtggctgagatgctgcggtggaggggaggccaggccccgcactgtctggctggggcaccccgagaagagagaccagaggtatcctcggaatgtcatcaacaatcagaagtacaatttcttcacctttcttcctggggtgctgttcaaccagttcaaatactttttcaacctctatttcttacttcttgcctgctctcagtttgttcccgaaatgagacttggtgcactctatacctactgggttcccctgggcttcgtgctggccgtcactgtcatccgtgaggcggtggaggagatccgatgctacgtgcgggacaaggaagtcaactcccaggtctacagccggctcacagcacgaggcacagtgaaggtgaagagttctaacatccaagttggagaccttatcatcgttgaaaagaaccagcgggtccctgccgacatgatcttcctgaggacatcagaaaaaaacgggtcatgcttcttgcggacggatcagctggatggggagacggactggaagctgcggcttcccgtggcctgcacgcagaggctccccacggccgccgaccttcttcagattcgatcgtatgtgtacgcagaagagccaaatattgacattcacaacttcgtgggaacttttacccgagaagacagcgaccccccgatcagcgagagcctgagcatagagaacacgctgtgggctggcactgtggtcgcatcaggtactgttgtgggtgttgttctttacactggcagagaactccggagtgtcatgaatacctcaaatccccgaagtaagatcggcctgttcgacttggaagtgaactgcctcaccaagatcctctttggtgccctggtggtggtctcgctggtcatggttgcccttcagcactttgcaggccgttggtacctgcagatcatccgcttcctcctcttgttttccaacatcatccccattagtttgcgcgtgattcgcgaatgggttacagctcggttcg

SEQ ID NO: 341791 - DNA, 412 bp, Homo sapiens
ctggtcatctcgggagactccctggaggtgagcttggggacccctgagagccagtcctcccagcagcctgggtcttacccggcttcggcaggggcactgcaggctcggcagcgacctccaccaacgcaccacctctccctccaccaacgcaccacctctccctccaccctgcaggtttgcctcaagtactatgagtacgagttcatggagctggcctgccagtgcccggccgtagtctgctgccgatgtgcccccacccagaaggcccagatcgtgcgcctgcttcaggagcgcacgggcaagctcacctgtgcagtaggtaggcgaggctcaggctgtgctgctggccctggcctgccggtgcaccaggctccctttccctaaggatatttggacactgctgctctttctt

SEQ ID NO: 341792 - DNA, 2581 bp, Homo sapiens
aaaagcagcatcagacaagagctttattaatcccttacacgagcaaatgcgatctctgacctactagacttgttttcctacaatttcacaaaaagcctcgctagaggaatgtgcaaggacagaagggaaactgaggagacccgcaactcattagcgaaataatagggtgcacttcaataaaaatgcggtcctgaagtggagcagactcaccggcaaggagcccggaaaatcgtcaggggcggcggcaaaatactatcaaatcagcctgggaagcatcttttcgctcagcaagttcaagagaacaaatatgttacaatccttgcctattcttgcctccacttcataatgtcataaaagccacctggggtgtcatttatcaacctctctccagcccactcttccaaaataacactacagtttcctacatgtgtatttttgccaggactccaaagagccttgctaaagtggaacaagcaaaatcctcccctggcctcctgggactgcagtcaccaggctgtcaaagcctcaataccccactgagttccagagaagggtctcaaagctgggagaggatcaaactaacatggagtagagaattgaactgtgaaaaagaagcccgagattccccagcgacgtggtgttgcagccccgttgaaggagtcaacttgcaggctgttaaagacctcaagtcattagcatcagctgctgcactaaaggggcaagtcagcgcctctaagtggcttagcgcacaaacgaggctcccgagacggcctcggcaactccatcccctcctccaccacccgctggatgtgaaaagctttccggagcccatcttgggggaagcttggtagtgttggcgctcctgaagagagacgacgcccgtttatcacccccaggcaactagctgcgcaaatcagcggtggctccagggctagagaatccctggagctaaccgcacccctctccctttcacggaacgcggactccggggaaatacgcacggggtccgcacgcgctgggtgtccagctctctgtcacagcttctccaagtgcctagtgaaacggggaaaggccctctccaatcattttggaagagcctaaaaggcggcaacaccaacacctcttgacatggaaatacactgatacaataggcaaaaggaaacactcgattgcatcttcccggttccaggtggccttatttgggagattctatactgaccttattcctgtgatggaggatactggcatccagcgaggcatctgggatggagatgccaaggctgtccaacaatgtctgacagatatttttaccagcgtttacaccacctgcgacatccctgagaatgctatatttggtccctgtgtcctgagccatacttccctatatgacagcatagctttcatagctctcaagtctactgacaagagaacagtaccgtatatctttcgggtagacacctcagcagcaaatggttcctcagaaggtctcatgtggctgcggttggtccaatcggccagagataaggaagagcagaaccttgaagcctacataaaaaacggacagctgttctaccgctctctccgcaggattgccaaagacgaggagttactagtttggtacgggaaagaactgactgagttactcttgctctgcccctctagatcccacaacaaaatgaatgggtcgtccccttacacatgcctggaatgcagccaacgtttccagtttgagttcccctatgtggcgcatctgcgtttccgctgccccaagagacttcacagcgctgatataagtccccaagacgaacaaggcggcggcgtgggcaccaaggaccacgggggcggcggcggcggtggcaaagaccagcagcagcagcagcaggaggcacctttaggcccgggtcccaagttttgcaaagccggccccctccaccactacccatccccctccccggaaagcagcaacccatccgctgccgccggcggcagcagcgcgaagccatccacagacttccacaacctggccagggagctggaaaactcccggggaggcagcagctgctccccagcccagagcctcagcagcggtagcggcagcggcggcggcggcggccaccaggaggcggagctgagtcccgacggcatcgccacgggcggcggcaaaggaaagaggaaattcccggaggaggcggcggagggcggcggtggcgctggtctggtagggggccggggccgcttcgtagagcggcccctcccggcctccaaggaggatctggtgtgcacaccgcagcagtaccgagcctcgggcagctacttcggcctggaagagaacggccgcctcttcgcgccgccaagtcccgagacgggcgaggcgaagcgcagcgccttcgtggaggtgaagaaggctgcccgcgcggccagcctgcaggaggaggggacagccgacggcgcgggagtcgcctccgaggaccaggacgctggcggcggcggcggctcctccacgcccgcggccgcgtcaccggtgggcgccgagaagctgctggccccgcggcctgggggcccgctgcccagccggctcgag

SEQ ID NO: 341793 - DNA, 439 bp, Homo sapiens
aaaagcagcatcagacaagagctttattaatcccttacacgagcaaatgcgatctctgacctactagacttgttttcctacaatttcacaaaaagcctcgctagaggaatgtgcaaggacagaagggaaactgaggagacccgcaactcattagcgaaataatagggtgcacttcaataaaaatgcggtcctgaagtggagcagactcaccggcaaggagcccggaaaatcgtcaggggcggcggcaaagtgagtgatggggattggaggaaggggtaggattggaggaaggtcctcatgcacagagtgtggttgggagctggagtgggaacccagttcggtctcttccgaaggcttaggacccatgtgactgaatttaggggctgtccccttgcgagggcactaggacaacaggaggggcgcacctgcaatacggatg

SEQ ID NO: 341794 - DNA, 2757 bp, Homo sapiens
agtcagtcactgcatcgggtccatctgtacaactctctccgtttctccgtctctctccctccctccctccctccacccccccaatctttttctccccatctctccatctctctcttatctcttcaggaagagcctaaaaggcggcaacaccaacacctcttgacatggaaatacactgatacaataggcaaaaggaaacactcgattgcatcttcccggttccaggtggccttatttgggagattctatactgaccttattcctgtgatggaggatactggcatccagcgaggcatctgggatggagatgccaaggctgtccaacaatgtctgacagatatttttaccagcgtttacaccacctgcgacatccctgagaatgctatatttggtccctgtgtcctgagccatacttccctatatgacagcatagctttcatagctctcaagtctactgacaagagaacagtaccgtatatctttcgggtagacacctcagcagcaaatggttcctcagaaggtctcatgtggctgcggttggtccaatcggccagagataaggaagagcagaaccttgaagcctacataaaaaacggacagctgttctaccgctctctccgcaggattgccaaagacgaggagttactagtttggtacgggaaagaactgactgagttactcttgctctgcccctctagatcccacaacaaaatgaatgggtcgtccccttacacatgcctggaatgcagccaacgtttccagtttgagttcccctatgtggcgcatctgcgtttccgctgccccaagagacttcacagcgctgatataagtccccaagacgaacaaggcggcggcgtgggcaccaaggaccacgggggcggcggcggcggtggcaaagaccagcagcagcagcagcaggaggcacctttaggcccgggtcccaagttttgcaaagccggccccctccaccactacccatccccctccccggaaagcagcaacccatccgctgccgccggcggcagcagcgcgaagccatccacagacttccacaacctggccagggagctggaaaactcccggggaggcagcagctgctccccagcccagagcctcagcagcggtagcggcagcgcggcggcggcggcctgcctaagcagagccccttcctgtacgccaccgccttctggcccaagagctccgctgccgctgcagccgcggctgcggcggcggccgcggggcccttgcagctgcagctgccctcggcgctcacgctgctgccgccctccttcacctcgctgtgtctgcccgcgcagaactggtgcgccaagtgcaatgcctccttccgcatgacctccgacctggtgtaccatatgaggtcgcaccacaaaaaggagtatgcgatggagcccttggtgaagcggcggcgagaggagaaactcaagtgccccatctgcaatgagtccttcagggagcgccaccacctctccaggcacatgacctcgcataattgactcggaaaggaccccagctttccacgcgcgcgcaagcacagttaagccacctgcaggaataaacacgcgagaacatccaccgcttccttgcaccccgaaaccctgcacaaagacacatacattcaccgcccccccgcccccccaacgcgcacacacacgtcctctcctcccaggaacctcattcaaatatttacccgggacacacacccccccccacacacacacacagacacactcacacacaagagccaggatggtggagttttgattgggtgggttgtttgagggggttttcttttgaatgcacgcattttcactttccccaaaacaaaggtacattttttaaaatgtcatatattgcaacatattgatgcatttgtcatacgtttctacttaaattattaagcacttacgatttagatgtaataattatatgtaagggcaaaatttattttagatataaagtaaaggaggagggtgagatgctttctgcatttcttgatgacagtttgtgttcctacaaaaataaacaaaatgaataaaaagggatcaccattcaatttgagtttccagggggaagtgcatgtataatgaaatgataatggacttcaatgaagaatgtcatcaattatgtacatatgtattttcttttaatacaaagtgtaattttgtgccagtgaaatggagtctgaatagttatgtgtttcttttatccctggaaatatttattaaactttatagtttatccgagtatgttggatgctttgacaataaatgactattttcttcaaagcaaaaaaaaaaataaaaataaaaaaaaaaaaaaaaaaaaaaaaaaaaaaaaaaaaaaaaaaaaaaaaaaaaaaaaaaaaaaaaaaaaaaactttggggcccgtttggcccaatcgatttttaaattgggccagttttttcattgggcccgaattcggggttaattggccaaattccccttaaggggggccgtttacaatttaatggcccgtggtttaaaacggtcggattgggaaaaccctgggggtaaccaaattaaaacgcttggaagaaaatccccttttggcaggtgggggaaaaagcaaaaggccccgaccggatggcctttccaaaaatttgccaaccttgatggccaaaggaaatttgaaggcgtaaatttttggataaaattggggtaaatttttggttaacaagtttttttttaacccaaagggccgaaatgggctccttt

SEQ ID NO: 341795 - DNA, 2219 bp, Homo sapiens
aggctggtacggatcgcggatttaaggcatggcgtcccgcccccgccccggggaacgctgcctctgccgcaaagatgcccccttccgctggaaagcggtcataaaagccacctggggtgtcatttatcaacctctctccagcccactcttccaaaataacactacagtttcctacatgtgtatttttgccaggactccaaagagccttgctaaagtggaacaaggagtagagaattgaactgtgaaaaagaagcccgagattccccagcgacgtggtgttgcagccccgttgaaggagtcaacttgcaggctgttaaagacctcaagtcattagcatcagctgctgcactaaaggggcaagtcagcgcctctaagtggcttagcgcacaaacgaggctcccgagacggcctcggcaactccatcccctcctccaccacccgctggatgtgaaaagctttccggagcccatcttgggggaagcttggtagtgttggcgctcctgaagagagacgacgcccgtttatcacccccaggcaactagctgcgcaaatcagcggtggctccagggctagagaatccctggagctaaccgcacccctctccctttcacggaacgcggactccggggaaatacgcacggggtccgcacgcgctgggtgtccagctctctgtcacagcttctccaagtgcctagtgaaacggggaaaggccctctccaatcattttggaagagcctaaaaggcggcaacaccaacacctcttgacatggaaatacactgatacaataggcaaaaggaaacactcgattgcatcttcccggttccaggtggccttatttgggagattctatactgaccttattcctgtgatggaggatactggcatccagcgaggcatctgggatggagatgccaaggctgtccaacaatgtctgacagatatttttaccagcgtttacaccacctgcgacatccctgagaatgctatatttggtccctgtgtcctgagccatacttccctatatgacagcatagctttcatagctctcaagtctactgacaagagaacagtaccgtatatctttcgggtagacacctcagcagcaaatggttcctcagaaggtctcatgtggctgcggttggtccaatcggccagagataaggaagagcagaaccttgaagcctacataaaaaacggacagctgttctaccgctctctccgcaggattgccaaagacgaggagttactagtttggtacgggaaagaactgactgagttactcttgctctgcccctctagatcccacaacaaaatgaatgggtcgtccccttacacatgcctggaatgcagccaacgtttccagtttgagttcccctatgtggcgcatctgcgtttccgctgccccaagagacttcacagcgctgatataagtccccaagacgaacaaggcggcggcgtgggcaccaaggaccacgggggcggcggcggcggtggcaaagaccagcagcagcagcagcaggaggcacctttaggcccgggtcccaagttttgcaaagccggccccctccaccactacccatccccctccccggaaagcagcaacccatccgctgccgccggcggcagcagcgcgaagccatccacagacttccacaacctggccagggagctggaaaactcccggggaggcagcagctgctccccagcccagagcctcagcagcggtagcggcagcggcggcggcggcggccaccaggaggcggagctgagtcccgacggcatcgccacgggcggcggcaaaggaaagaggaaattcccggaggaggcggcggagggcggcggtggcgctggtctggtagggggccggggccgcttcgtagagcggcccctcccggcctccaaggaggatctggtgtgcacaccgcagcagtaccgagcctcgggcagctacttcggcctggaagagaacggccgcctcttcgcgccgccaagtcccgagacgggcgaggcgaagcgcagcgccttcgtggaggtgaagaaggctgcccgcgcggccagcctgcaggaggaggggacagccgacggcgcgggagtcgcctccgaggaccaggacgctggcggcggcggcggctcctccacgcccgcggccgcgtcaccggtgggcgccgagaagctgctggccccgcggcctgggggcccgctgcccagccggctcgag

SEQ ID NO: 341796 - DNA, 2337 bp, Homo sapiens
accccggggccggggctacagggctggctctgccccggcgtcccgcccccgccccggggaacgctgcctctgccgcaaagatgcccccttccgctggaaagcggtcataaaagccacctggggtgtcatttatcaacctctctccagcccactcttccaaaataacactacagtttcctacatgtgtatttttgccaggactccaaagagccttgctaaagtggaacaagcaaaatcctcccctggcctcctgggactgcagtcaccaggctgtcaaagcctcaataccccactgagttccagagaagggtctcaaagctgggagaggatcaaactaacatggagtagagaattgaactgtgaaaaagaagcccgagattccccagcgacgtggtgttgcagccccgttgaaggagtcaacttgcaggctgttaaagacctcaagtcattagcatcagctgctgcactaaaggggcaagtcagcgcctctaagtggcttagcgcacaaacgaggctcccgagacggcctcggcaactccatcccctcctccaccacccgctggatgtgaaaagctttccggagcccatcttgggggaagcttggtagtgttggcgctcctgaagagagacgacgcccgtttatcacccccaggcaactagctgcgcaaatcagcggtggctccagggctagagaatccctggagctaaccgcacccctctccctttcacggaacgcggactccggggaaatacgcacggggtccgcacgcgctgggtgtccagctctctgtcacagcttctccaagtgcctagtgaaacggggaaaggccctctccaatcattttggaagagcctaaaaggcggcaacaccaacacctcttgacatggaaatacactgatacaataggcaaaaggaaacactcgattgcatcttcccggttccaggtggccttatttgggagattctatactgaccttattcctgtgatggaggatactggcatccagcgaggcatctgggatggagatgccaaggctgtccaacaatgtctgacagatatttttaccagcgtttacaccacctgcgacatccctgagaatgctatatttggtccctgtgtcctgagccatacttccctatatgacagcatagctttcatagctctcaagtctactgacaagagaacagtaccgtatatctttcgggtagacacctcagcagcaaatggttcctcagaaggtctcatgtggctgcggttggtccaatcggccagagataaggaagagcagaaccttgaagcctacataaaaaacggacagctgttctaccgctctctccgcaggattgccaaagacgaggagttactagtttggtacgggaaagaactgactgagttactcttgctctgcccctctagatcccacaacaaaatgaatgggtcgtccccttacacatgcctggaatgcagccaacgtttccagtttgagttcccctatgtggcgcatctgcgtttccgctgccccaagagacttcacagcgctgatataagtccccaagacgaacaaggcggcggcgtgggcaccaaggaccacgggggcggcggcggcggtggcaaagaccagcagcagcagcagcaggaggcacctttaggcccgggtcccaagttttgcaaagccggccccctccaccactacccatccccctccccggaaagcagcaacccatccgctgccgccggcggcagcagcgcgaagccatccacagacttccacaacctggccagggagctggaaaactcccggggaggcagcagctgctccccagcccagagcctcagcagcggtagcggcagcggcggcggcggcggccaccaggaggcggagctgagtcccgacggcatcgccacgggcggcggcaaaggaaagaggaaattcccggaggaggcggcggagggcggcggtggcgctggtctggtagggggccggggccgcttcgtagagcggcccctcccggcctccaaggaggatctggtgtgcacaccgcagcagtaccgagcctcgggcagctacttcggcctggaagagaacggccgcctcttcgcgccgccaagtcccgagacgggcgaggcgaagcgcagcgccttcgtggaggtgaagaaggctgcccgcgcggccagcctgcaggaggaggggacagccgacggcgcgggagtcgcctccgaggaccaggacgctggcggcggcggcggctcctccacgcccgcggccgcgtcaccggtgggcgccgagaagctgctggccccgcggcctgggggcccgctgcccagccggctcgag

SEQ ID NO: 341797 - DNA, 2153 bp, Homo sapiens
gcggccgccgaggggcccgcagtagctgcgctcccggggaaggagccccacagtccccagatactatcaaatcagcctgggaagcatcttttcgctcagcaagttcaagagaacaaatatgttacaatccttgcctattcttgcctccacttcataatgagtagagaattgaactgtgaaaaagaagcccgagattccccagcgacgtggtgttgcagccccgttgaaggagtcaacttgcaggctgttaaagacctcaagtcattagcatcagctgctgcactaaaggggcaagtcagcgcctctaagtggcttagcgcacaaacgaggctcccgagacggcctcggcaactccatcccctcctccaccacccgctggatgtgaaaagctttccggagcccatcttgggggaagcttggtagtgttggcgctcctgaagagagacgacgcccgtttatcacccccaggcaactagctgcgcaaatcagcggtggctccagggctagagaatccctggagctaaccgcacccctctccctttcacggaacgcggactccggggaaatacgcacggggtccgcacgcgctgggtgtccagctctctgtcacagcttctccaagtgcctagtgaaacggggaaaggccctctccaatcattttggaagagcctaaaaggcggcaacaccaacacctcttgacatggaaatacactgatacaataggcaaaaggaaacactcgattgcatcttcccggttccaggtggccttatttgggagattctatactgaccttattcctgtgatggaggatactggcatccagcgaggcatctgggatggagatgccaaggctgtccaacaatgtctgacagatatttttaccagcgtttacaccacctgcgacatccctgagaatgctatatttggtccctgtgtcctgagccatacttccctatatgacagcatagctttcatagctctcaagtctactgacaagagaacagtaccgtatatctttcgggtagacacctcagcagcaaatggttcctcagaaggtctcatgtggctgcggttggtccaatcggccagagataaggaagagcagaaccttgaagcctacataaaaaacggacagctgttctaccgctctctccgcaggattgccaaagacgaggagttactagtttggtacgggaaagaactgactgagttactcttgctctgcccctctagatcccacaacaaaatgaatgggtcgtccccttacacatgcctggaatgcagccaacgtttccagtttgagttcccctatgtggcgcatctgcgtttccgctgccccaagagacttcacagcgctgatataagtccccaagacgaacaaggcggcggcgtgggcaccaaggaccacgggggcggcggcggcggtggcaaagaccagcagcagcagcagcaggaggcacctttaggcccgggtcccaagttttgcaaagccggccccctccaccactacccatccccctccccggaaagcagcaacccatccgctgccgccggcggcagcagcgcgaagccatccacagacttccacaacctggccagggagctggaaaactcccggggaggcagcagctgctccccagcccagagcctcagcagcggtagcggcagcggcggcggcggcggccaccaggaggcggagctgagtcccgacggcatcgccacgggcggcggcaaaggaaagaggaaattcccggaggaggcggcggagggcggcggtggcgctggtctggtagggggccggggccgcttcgtagagcggcccctcccggcctccaaggaggatctggtgtgcacaccgcagcagtaccgagcctcgggcagctacttcggcctggaagagaacggccgcctcttcgcgccgccaagtcccgagacgggcgaggcgaagcgcagcgccttcgtggaggtgaagaaggctgcccgcgcggccagcctgcaggaggaggggacagccgacggcgcgggagtcgcctccgaggaccaggacgctggcggcggcggcggctcctccacgcccgcggccgcgtcaccggtgggcgccgagaagctgctggccccgcggcctgggggcccgctgcccagccggctcgag

SEQ ID NO: 341798 - DNA, 1581 bp, Homo sapiens
aggctggtacggatcgcggatttaaggcatggcgtcccgcccccgccccggggaacgctgcctctgccgcaaagatgcccccttccgctggaaagcggtgcctccctgggtgctcgcgaaagcagccctgagaatggcagctctcagaggttgaagtcattcttttcgggggacggggcacggcgactgtttgattgggggacttgttttcctacaatttcacaaaaagcctcgctagaggaatgtgcaaggacagaagggaaatcaagtgccccatctgcaatgagtccttcagggagcgccaccacctctccaggcacatgacctcgcataattgactcggaaaggaccccagctttccacgcgcgcgcaagcacagttaagccacctgcaggaataaacacgcgagaacatccaccgcttccttgcaccccgaaaccctgcacaaagacacatacattcaccgcccccccgcccccccaacgcgcacacacacgtcctctcctcccaggaacctcattcaaatatttacccgggacacacacccccccccacacacacacacagacacactcacacacaagagccaggatggtggagttttgattgggtgggttgtttgagggggttttcttttgaatgcacgcattttcactttccccaaaacaaaggtacattttttaaaatgtcatatattgcaacatattgatgcatttgtcatacgtttctacttaaattattaagcacttacgatttagatgtaataattatatgtaagggcaaaatttattttagatataaagtaaaggaggagggtgagatgctttctgcatttcttgatgacagtttgtgttcctacaaaaataaacaaaatgaataaaaagggatcaccattcaatttgagtttccagggggaagtgcatgtataatgaaatgataatggacttcaatgaagaatgtcatcaattatgtacatatgtattttcttttaatacaaagtgtaattttgtgccagtgaaatggagtctgaatagttatgtgtttcttttatccctggaaatatttattaaactttatagtttatccgagtatgttggatgctttgacaataaatgactattttcttcaaagcaaaaaaaaaaataaaaataaaaaaaaaaaaaaaaaaaaaaaaaaaaaaaaaaaaaaaaaaaaaaaaaaaaaaaaaaaaaaaaaaaaaaactttggggcccgtttggcccaatcgatttttaaattgggccagttttttcattgggcccgaattcggggttaattggccaaattccccttaaggggggccgtttacaatttaatggcccgtggtttaaaacggtcggattgggaaaaccctgggggtaaccaaattaaaacgcttggaagaaaatccccttttggcaggtgggggaaaaagcaaaaggccccgaccggatggcctttccaaaaatttgccaaccttgatggccaaaggaaatttgaaggcgtaaatttttggataaaattggggtaaatttttggttaacaagtttttttttaacccaaagggccgaaatgggctccttt

SEQ ID NO: 341799 - DNA, 650 bp, Homo sapiens
agttcagagtttgatcccttggggcctttttctcgcacttgagatttcactatcatgtcgttcaattaatcatatttcccttctcccattttattcaaaaccgtcttccagttccctcataatcgtaatttgcgtcattgccttttatcgttgattaattaggaagccgaaaatggtaatggagggtcgggccaataaattagctttaggaacagacggacggacgtccgaggctgctgcatgggtgggcgctgtccaccgaagctggcgggggccaccgtcgctgcagctggcttctcaggaaggcgttaaggaaaaggcgcgcggtactggctgaatggagagatccactctgaaataaacccggtggccacaagggaaaacttctcactgcactaggtggagagactcctgtgacgcttagcttttcccgtttggtatagaaaaggaaagactgggttgttatagaaatggagaagaggaaggatggggtaggataagagtcagactcctgttactttcagaggcctccctactagcgggtaaacaggtttaaagtctgggccttattaggagcctttttttttccagaactggaatgttagatttacttttgcagcctttccttcctctttccacttacctactgg

SEQ ID NO: 341800 - DNA, 290 bp, Homo sapiens
gtacaactctctccgtttctccgtctctctccctccctccctccctccacccccccaatctttttctccccatctctccatctctctcttatctcttcaggaagagcctaaaaggcggcaacaccaacacctcttgacatggaaatacactgatacaataggcaaaaggaaacactcgattgcatcttcccggttccaggtggccttatttgggagattctatactgaccttattcctggtaagtctatttgcattgatgtgggagggggatgggaggaagacagtttgg

SEQ ID NO: 341801 - DNA, 906 bp, Homo sapiens
aagcccgagattccccagcgacgtggtgttgcagccccgttgaaggagtcaacttgcaggctgttaaagacctcaagtcattagcatcagctgctgcactaaaggggcaagtcagcgcctctaagtggcttagcgcacaaacgaggctcccgagacggcctcggcaactccatcccctcctccaccacccgctggatgtgaaaagctttccggagcccatcttggtaatcatttttatttttaatcacccttgccccccaaccccaagacctcagagtgccaacagtacccattatagactccctctggggctgcgcagaacgcaccaagcagagggggggaaaaaccccacgaaaacaaaaacaaacaaaaaaaaaacaggaactgtttgagtccagtaacctgcgctcttcccaccaacctcccacaccccacctccgcccacgtacccgtgtcctgggactaggaggtaccgttatgtccccttccgaggtctggtgacattctcactccaacctcatctcccaagccacgggaaggctgagccaagttctcaccaaagcgcatcctttctgaattttgcagggggaagcttggtagtgttggcgctcctgaagagagacgacgcccgtttatcacccccaggcaactagctgcgcaaatcagcggtggctccagggctagagaatccctggagctaaccgcacccctctccctttcacggaacgcggactccggggaaatacgcacggggtccgcacgcgctgggtgtccagctctctgtcacagcttctccaagtgcctagtgaaacggggaaaggccctctccaatcattttggtaccttcctttccaatcctgaaacgattttcccctcctagcagtcccagagggcccgagctttagg

SEQ ID NO: 341802 - DNA, 1617 bp, Homo sapiens
agtcagtcactgcatcgggtccatctgtacaactctctccgtttctccgtctctctccctccctccctccctccacccccccaatctttttctccccatctctccatctctctcttatctcttcaggaagagcctaaaaggcggcaacaccaacacctcttgacatggaaatacactgatacaataggcaaaaggaaacactcgattgcatcttcccggttccaggtggccttatttgggagattctatactgaccttattcctgtgatggaggatactggcatccagcgaggcatctgggatggagatgccaaggctgtccaacaatgtctgacagatatttttaccagcgtttacaccacctgcgacatccctgagaatgctatatttggtccctgtgtcctgagccatacttccctatatgacagcatagctttcatagctctcaagtctactgacaagagaacagtaccgtatatctttcgggtagacacctcagcagcaaatggttcctcagaaggtctcatgtggctgcggttggtccaatcggccagagataaggaagagcagaaccttgaagcctacataaaaaacggacagctgttctaccgctctctccgcaggattgccaaagacgaggagttactagtttggtacgggaaagaactgactgagttactcttgctctgcccctctagatcccacaacaaaatgaatgggtcgtccccttacacatgcctggaatgcagccaacgtttccagtttgagttcccctatgtggcgcatctgcgtttccgctgccccaagagacttcacagcgctgatataagtccccaagacgaacaaggcggcggcgtgggcaccaaggaccacgggggcggcggcggcggtggcaaagaccagcagcagcagcagcaggaggcacctttaggcccgggtcccaagttttgcaaagccggccccctccaccactacccatccccctccccggaaagcagcaacccatccgctgccgccggcggcagcagcgcgaagccatccacagacttccacaacctggccagggagctggaaaactcccggggaggcagcagctgctccccagcccagagcctcagcagcggtagcggcagcggcggcggcggcggccaccaggaggcggagctgagtcccgacggcatcgccacgggcggcggcaaaggaaagaggaaattcccggaggaggcggcggagggcggcggtggcgctggtctggtagggggccggggccgcttcgtagagcggcccctcccggcctccaaggaggatctggtgtgcacaccgcagcagtaccgagcctcgggcagctacttcggcctggaagagaacggccgcctcttcgcgccgccaagtcccgagacgggcgaggcgaagcgcagcgccttcgtggaggtgaagaaggctgcccgcgcggccagcctgcaggaggaggggacagccgacggcgcgggagtcgcctccgaggaccaggacgctggcggcggcggcggctcctccacgcccgcggccgcgtcaccggtgggcgccgagaagctgctggccccgcggcctgggggcccgctgcccagccggctcgag

SEQ ID NO: 341803 - DNA, 2429 bp, Homo sapiens
aggctggtacggatcgcggatttaaggcatggcgtcccgcccccgccccggggaacgctgcctctgccgcaaagatgcccccttccgctggaaagcgatactatcaaatcagcctgggaagcatcttttcgctcagcaagttcaagagaacaaatatgttacaatccttgcctattcttgcctccacttcataatgtcataaaagccacctggggtgtcatttatcaacctctctccagcccactcttccaaaataacactacagtttcctacatgtgtatttttgccaggactccaaagagccttgctaaagtggaacaagcaaaatcctcccctggcctcctgggactgcagtcaccaggctgtcaaagcctcaataccccactgagttccagagaagggtctcaaagctgggagaggatcaaactaacatggagtagagaattgaactgtgaaaaagaagcccgagattccccagcgacgtggtgttgcagccccgttgaaggagtcaacttgcaggctgttaaagacctcaagtcattagcatcagctgctgcactaaaggggcaagtcagcgcctctaagtggcttagcgcacaaacgaggctcccgagacggcctcggcaactccatcccctcctccaccacccgctggatgtgaaaagctttccggagcccatcttgggggaagcttggtagtgttggcgctcctgaagagagacgacgcccgtttatcacccccaggcaactagctgcgcaaatcagcggtggctccagggctagagaatccctggagctaaccgcacccctctccctttcacggaacgcggactccggggaaatacgcacggggtccgcacgcgctgggtgtccagctctctgtcacagcttctccaagtgcctagtgaaacggggaaaggccctctccaatcattttggaagagcctaaaaggcggcaacaccaacacctcttgacatggaaatacactgatacaataggcaaaaggaaacactcgattgcatcttcccggttccaggtggccttatttgggagattctatactgaccttattcctgtgatggaggatactggcatccagcgaggcatctgggatggagatgccaaggctgtccaacaatgtctgacagatatttttaccagcgtttacaccacctgcgacatccctgagaatgctatatttggtccctgtgtcctgagccatacttccctatatgacagcatagctttcatagctctcaagtctactgacaagagaacagtaccgtatatctttcgggtagacacctcagcagcaaatggttcctcagaaggtctcatgtggctgcggttggtccaatcggccagagataaggaagagcagaaccttgaagcctacataaaaaacggacagctgttctaccgctctctccgcaggattgccaaagacgaggagttactagtttggtacgggaaagaactgactgagttactcttgctctgcccctctagatcccacaacaaaatgaatgggtcgtccccttacacatgcctggaatgcagccaacgtttccagtttgagttcccctatgtggcgcatctgcgtttccgctgccccaagagacttcacagcgctgatataagtccccaagacgaacaaggcggcggcgtgggcaccaaggaccacgggggcggcggcggcggtggcaaagaccagcagcagcagcagcaggaggcacctttaggcccgggtcccaagttttgcaaagccggccccctccaccactacccatccccctccccggaaagcagcaacccatccgctgccgccggcggcagcagcgcgaagccatccacagacttccacaacctggccagggagctggaaaactcccggggaggcagcagctgctccccagcccagagcctcagcagcggtagcggcagcggcggcggcggcggccaccaggaggcggagctgagtcccgacggcatcgccacgggcggcggcaaaggaaagaggaaattcccggaggaggcggcggagggcggcggtggcgctggtctggtagggggccggggccgcttcgtagagcggcccctcccggcctccaaggaggatctggtgtgcacaccgcagcagtaccgagcctcgggcagctacttcggcctggaagagaacggccgcctcttcgcgccgccaagtcccgagacgggcgaggcgaagcgcagcgccttcgtggaggtgaagaaggctgcccgcgcggccagcctgcaggaggaggggacagccgacggcgcgggagtcgcctccgaggaccaggacgctggcggcggcggcggctcctccacgcccgcggccgcgtcaccggtgggcgccgagaagctgctggccccgcggcctgggggcccgctgcccagccggctcgag

SEQ ID NO: 341804 - DNA, 2055 bp, Homo sapiens
gcggccgccgaggggcccgcagtagctgcgctcccggggaaggagccccacagtccccaggagtagagaattgaactgtgaaaaagaagcccgagattccccagcgacgtggtgttgcagccccgttgaaggagtcaacttgcaggctgttaaagacctcaagtcattagcatcagctgctgcactaaaggggcaagtcagcgcctctaagtggcttagcgcacaaacgaggctcccgagacggcctcggcaactccatcccctcctccaccacccgctggatgtgaaaagctttccggagcccatcttgggggaagcttggtagtgttggcgctcctgaagagagacgacgcccgtttatcacccccaggcaactagctgcgcaaatcagcggtggctccagggctagagaatccctggagctaaccgcacccctctccctttcacggaacgcggactccggggaaatacgcacggggtccgcacgcgctgggtgtccagctctctgtcacagcttctccaagtgcctagtgaaacggggaaaggccctctccaatcattttggaagagcctaaaaggcggcaacaccaacacctcttgacatggaaatacactgatacaataggcaaaaggaaacactcgattgcatcttcccggttccaggtggccttatttgggagattctatactgaccttattcctgtgatggaggatactggcatccagcgaggcatctgggatggagatgccaaggctgtccaacaatgtctgacagatatttttaccagcgtttacaccacctgcgacatccctgagaatgctatatttggtccctgtgtcctgagccatacttccctatatgacagcatagctttcatagctctcaagtctactgacaagagaacagtaccgtatatctttcgggtagacacctcagcagcaaatggttcctcagaaggtctcatgtggctgcggttggtccaatcggccagagataaggaagagcagaaccttgaagcctacataaaaaacggacagctgttctaccgctctctccgcaggattgccaaagacgaggagttactagtttggtacgggaaagaactgactgagttactcttgctctgcccctctagatcccacaacaaaatgaatgggtcgtccccttacacatgcctggaatgcagccaacgtttccagtttgagttcccctatgtggcgcatctgcgtttccgctgccccaagagacttcacagcgctgatataagtccccaagacgaacaaggcggcggcgtgggcaccaaggaccacgggggcggcggcggcggtggcaaagaccagcagcagcagcagcaggaggcacctttaggcccgggtcccaagttttgcaaagccggccccctccaccactacccatccccctccccggaaagcagcaacccatccgctgccgccggcggcagcagcgcgaagccatccacagacttccacaacctggccagggagctggaaaactcccggggaggcagcagctgctccccagcccagagcctcagcagcggtagcggcagcggcggcggcggcggccaccaggaggcggagctgagtcccgacggcatcgccacgggcggcggcaaaggaaagaggaaattcccggaggaggcggcggagggcggcggtggcgctggtctggtagggggccggggccgcttcgtagagcggcccctcccggcctccaaggaggatctggtgtgcacaccgcagcagtaccgagcctcgggcagctacttcggcctggaagagaacggccgcctcttcgcgccgccaagtcccgagacgggcgaggcgaagcgcagcgccttcgtggaggtgaagaaggctgcccgcgcggccagcctgcaggaggaggggacagccgacggcgcgggagtcgcctccgaggaccaggacgctggcggcggcggcggctcctccacgcccgcggccgcgtcaccggtgggcgccgagaagctgctggccccgcggcctgggggcccgctgcccagccggctcgag

SEQ ID NO: 341805 - DNA, 2011 bp, Homo sapiens
ggatttgtcaaggggatggtggcaaactggcttgggggcgatgctgagtaatcatgtggtgtgcgtgtgtgtgtgtgtgtgcgtgcgtgcgtgtgtgtggtgtttgctcactaagcagggtcgtccccttacacatgcctggaatgcagccaacgtttccagtttgagttccccgcgtcggacgagcgcaaaagcgccttctcgcagccagcacgctctttctcgcagctgtccccgctggtgctgggccagaagctgggcgcgctcgagccatgccaccccgccgacggcgtgggccccaccagactctatcccgccgccgcggaccctctagcggtgaagctccagggggccgcggacctgaacggaggttgcgggtccctgccgagcggcggcggcggcctgcctaagcagagccccttcctgtacgccaccgccttctggcccaagagctccgctgccgctgcagccgcggctgcggcggcggccgcggggcccttgcagctgcagctgccctcggcgctcacgctgctgccgccctccttcacctcgctgtgtctgcccgcgcagaactggtgcgccaagtgcaatgcctccttccgcatgacctccgacctggtgtaccatatgaggtcgcaccacaaaaaggagtatgcgatggagcccttggtgaagcggcggcgagaggagaaactcaagtgccccatctgcaatgagtccttcagggagcgccaccacctctccaggcacatgacctcgcataattgactcggaaaggaccccagctttccacgcgcgcgcaagcacagttaagccacctgcaggaataaacacgcgagaacatccaccgcttccttgcaccccgaaaccctgcacaaagacacatacattcaccgcccccccgcccccccaacgcgcacacacacgtcctctcctcccaggaacctcattcaaatatttacccgggacacacacccccccccacacacacacacagacacactcacacacaagagccaggatggtggagttttgattgggtgggttgtttgagggggttttcttttgaatgcacgcattttcactttccccaaaacaaaggtacattttttaaaatgtcatatattgcaacatattgatgcatttgtcatacgtttctacttaaattattaagcacttacgatttagatgtaataattatatgtaagggcaaaatttattttagatataaagtaaaggaggagggtgagatgctttctgcatttcttgatgacagtttgtgttcctacaaaaataaacaaaatgaataaaaagggatcaccattcaatttgagtttccagggggaagtgcatgtataatgaaatgataatggacttcaatgaagaatgtcatcaattatgtacatatgtattttcttttaatacaaagtgtaattttgtgccagtgaaatggagtctgaatagttatgtgtttcttttatccctggaaatatttattaaactttatagtttatccgagtatgttggatgctttgacaataaatgactattttcttcaaagcaaaaaaaaaaataaaaataaaaaaaaaaaaaaaaaaaaaaaaaaaaaaaaaaaaaaaaaaaaaaaaaaaaaaaaaaaaaaaaaaaaaaactttggggcccgtttggcccaatcgatttttaaattgggccagttttttcattgggcccgaattcggggttaattggccaaattccccttaaggggggccgtttacaatttaatggcccgtggtttaaaacggtcggattgggaaaaccctgggggtaaccaaattaaaacgcttggaagaaaatccccttttggcaggtgggggaaaaagcaaaaggccccgaccggatggcctttccaaaaatttgccaaccttgatggccaaaggaaatttgaaggcgtaaatttttggataaaattggggtaaatttttggttaacaagtttttttttaacccaaagggccgaaatgggctccttt

SEQ ID NO: 341806 - DNA, 1742 bp, Homo sapiens
aggctggtacggatcgcggatttaaggcatggcgtcccgcccccgccccggggaacgctgcctctgccgcaaagatgcccccttccgctggaaagcggtgcctccctgggtgctcgcgaaagcagccctgagaatggcagctctcagaggttgaagtcattcttttcgggggacggggcacggcgactgtttgattgggggacttgttttcctacaatttcacaaaaagcctcgctagaggaatgtgcaaggacagaagggaaactgaggagacccgcaactcattagcgaaataatagggtgcacttcaataaaaatgcggtcctgaagtggagcagactcaccggcaaggagcccggaaaatcgtcaggggcggcggcaaaatactatcaaatcagcctgggaagcatcttttcgctcagcaagttcaagagaacaaatatgttacaatccttgcctattcttgcctccacttcataatgtcataaaagccacctggggtgtcatttatcaacctctctccagcccactcttccaaaataacactacagtttcctacatgtgtatttttgccaggactccaaagagccttgctaaagtggaacaagcaaaatcctcccctggcctcctgggactgcagtcaccaggctgtcaaagcctcaataccccactgagttccagagaagggtctcaaagctgggagaggatcaaactaacatggagtagagaattgaactgtgaaaaagaagcccgagattccccagcgacgtggtgttgcagccccgttgaaggagtcaacttgcaggctgttaaagacctcaagtcattagcatcagctgctgcactaaaggggcaagtcagcgcctctaagtggcttagcgcacaaacgaggctcccgagacggcctcggcaactccatcccctcctccaccacccgctggatgtgaaaagctttccggagcccatcttgggggaagcttggtagtgttggcgctcctgaagagagacgacgcccgtttatcacccccaggcaactagctgcgcaaatcagcggtggctccagggctagagaatccctggagctaaccgcacccctctccctttcacggaacgcggactccggggaaatacgcacggggtccgcacgcgctgggtgtccagctctctgtcacagcttctccaagtgcctagtgaaacggggaaaggccctctccaatcattttggaagagcctaaaaggcggcaacaccaacacctcttgacatggaaatacactgatacaataggcaaaaggaaacactcgattgcatcttcccggttccaggtggccttatttgggagattctatactgaccttattcctgtgatggaggatactggcatccagcgaggcatctgggatggagatgccaaggctgtccaacaatgtctgacagatatttttaccagcgtttacaccacctcccacagccgaccaggctcaacgcacacaacagcattccctggcagtaccaccatgccaggcgtcagtcaggaatctacagcttcccacagcagcccaggctccacagacacaacattgtcccctggcagtaccacagcatcatcccttggtccagaatctactactttccacagcagcccaggctccactgaaacaacactcttacctgacaacaccacacctcaggcctccttgaagcatctacgcccgtccacaatgcacgtgatcaggatcctcaa

SEQ ID NO: 341807 - DNA, 2880 bp, Homo sapiens
acactgggctccggcggccagagtgggggactaggtgaagcggcgccgggccggggctggccgggaccaggcccgaggctgagcggcggcgacagcggtggccgggaggggggaggagaggcgcagccagaggagccgccgcagtagctcccccgcctcccgggctgagggcggaaagaaaacatgcatatatgattttcttctgatgaaacctaatgtattcaagaaaaagaatcttgctttttggaaggatggaaaaattgggaataattttttcccctttgataattagaccactcagtactgttgcttagtttttggttcagttactttgatgtggttacaagaggaattttggctgtaatggatttcatacatttttaatgtctaatttaatagggatatagacagttggtttaaaccaacatttttggacgaggagaggctatggaaatgaagaaagaagtgtttagaaatatcacacaaacagcattttaagaaagaaagatggatcaacctagtggaagaagtttcatgcaagtattatgtgaaaaatatagtcctgaaaattttccttatcgccgtggcccggggatgggagtccatgtcccagccacacctcagggctctcctatgaaagatcgcctcaacctcccaagtgtactagtgttgaacagctgtggaataacctgtgcaggagatgaaaaagaaattgctgctttctgcgctcatgtgtcggaactagatctttctgacaacaaactcgaagactggcatgaggtttgcagtcctgggaagacattgataaactaaattcatttcccaaactggaagaagtgagattgttaggaattcctcttctgcagccatataccaccgaggagcgaaggaaattggtaatagccagattgccatcagtttccaaacttaatggcagcgttgttactgatggtgaacgagaagattctgagagattttttattcgttactatgtggatgttccacaggaagaagtgccattcaggtatcatgaactgatcactaaatatgggaagttggagcctttggcagaagtggacctaagaccccagagcagtgcaaaagtagaagtccactttaacgatcaggtggaagaaatgagcattcgtctggaccaaacagtggcagaactaaagaaacagttaaaaactctagtacaattacccacaagcaacatgcttctctactattttgaccatgaagcaccctttggcccagaggaaatgaagtacagctctcgggcattgcattcctttggcattagggatggagataaaatttacgtggaatccaaaacaaaataacctctaccagccttgtgaaaaacatacacataaggacttgttgcagggcatttgtttttaatgtggttttctttaggagggagaggttgtttttgttttgttttgttctgtttaggtttgggaaggattttgtatatttttccccctggagtgagtaggggccatttttgggtgttttctaccacagattgatttggctcagccagcggaattggccacatttccagtgtatgtgccctctctaaggaaagatgacaaagaaatcaccgacttcttactgtgttcactgggatttgcctgccacttggttatcattactgttgggtgaacctgtgaagataacatgaacactgtagccccttagaagggtctcatagagaatttaaacagggtgacaaggaatcttcacaggaagggccagaacttctctctcccagttcttccttccgctaccctccctccttggcttttttggttcagttccatttttttttcattttgacatgtggtttacctaatagttttgttctgttcataattcttatttctcaacctgggtgatttttttgttctcatttctcccttttgaaataattgaaagtgttttaagcatttttaacctgattctaatctcaggtacgcagtaagaagctataactctgttagaacctcgaagagtagatgtagaatgaaaactccaggaaaacttgcagttattctggaagcaccggcagaacagtctgatctctttgtatgttactaactcacttttaatgtccctgtacattatgtcagccattactttcataacatgaaatatgtcagattccagagttcttttatttttgcttattgaatgtatttcctcatatctttctttttcattactttaaactattgggaattgaggcctgacttcataaataattcaatagagtcctggatacgtgcaccaggagagttgagaattagctcataaactatctgtggtgtgtgtggggaatgaagttgggggatgtgggggaagagcttatgactttcccacctgtgtcatccattggaagcccttgctcttgcactttgcattaaaagtgggaaacattaatcaaagggagattttattcccaggttttccctgggactttgtgatatcataattgaacagttcttttgttttacatttcaatttagttgcctcatagaagtataactgcccaatctatgagtaaagtgtaagtgtcaaaactttacaattgcctccaagtcatattttttgcagaagcacatttaaagcacttttctgtaaaagctagttccttacctgcttggaaatctttttgtttgttcttctattcctttgttaatcagatgtaatccctttctttaatgtgtatttttcttggtccaccatgtttacaggtgggagacttgagagatacttagcataactggggcagaaagtgtgtaagtgaagtatttttcaaagaatgcagttattatcctgattgccatttgaccttttgacctttgttacata

SEQ ID NO: 341808 - DNA, 5148 bp, Homo sapiens
acactgggctccggcggccagagtgggggactaggtgaagcggcgccgggccggggctggccgggaccaggcccgaggctgagcggcggcgacagcggtggccgggaggggggaggagaggcgcagccagaggagccgccgcagtagctcccccgcctcccgggctgagggcggaaagaaaacatgcatatatgattttcttctgatgaaacctaatgtattcaagaaaaagaatcttgctttttggaaggatggaaaaattgggaataattttttcccctttgataattagaccactcagtactgttgcttagtttttggttcagttactttgatgtggttacaagaggaattttggctgtaatggatttcatacatttttgtaagttatgtttccatgtctcgtgtgtgatgttgtgtactgttgacatgaaatactccttttttggtaaagatggattggcttaacagattagagctacagaaagtatgacttagcacgctggtaaggccacaaaaacccaagcaagttcccccagtttcgtatcctgtaaatagagataagttagtttttctgtttcagagagtggttatggaaaactactaggctttaaaatgattgttaatctcagtgtggggacatttggtttggggacatcagttcaggagtaaatgtatctgatcctgctttgaataaatgcaacttgaaagccttggaattttaccagatcgaatctgggccaaatagaaagaatgtctaatttaatagggatatagacagttggtttaaaccaacatttttggacgaggagaggctatggaaatgaagaaagaagtgtttagaaatatcacacaaacagcattttaagaaagaaagatggatcaacctagtggaagaagtttcatgcaagtattatgtgaaaaatatagtcctgaaaattttccttatcgccgtggcccggggatgggagtccatgtcccagccacacctcagggctctcctatgaaagatcgcctcaacctcccaagtgtactagtgttgaacagctgtggaataacctgtgcaggagatgaaaaagaaattgctgctttctgcgctcatgtgtcggaactagatctttctgacaacaaactcgaagactggcatgaggtcagtaaaattgtgtcaaatgttcctcagttggagtttctaaacctgagttccaaccctctgaatttgtcggttttagaaagaacatgtgctgggtccttctctggggttcgcaaacttgtcctcaacaacagcaaagcttcttgggagacggtccacatgatactacaggagttaccagatttggaggagctcttcctgtgccttaatgactatgaaacagtgtcttgtccttctatttgctgtcattctcttaagctactacatataacagacaataacctccaagactggactgaaatacgaaagttaggagttatgtttccttcactggataccctcgtcctggccaacaatcatttgaatgctattgaggagcctgatgattcattggccaggttgtttcctaatcttcgatccatcagcctccacaagtcaggtttgcagtcctgggaagacattgataaactaaattcatttcccaaactggaagaagtgagattgttaggaattcctcttctgcagccatataccaccgaggagcgaaggaaattggtaatagccagattgccatcagtttccaaacttaatggcagcgttgttactgatggtgaacgagaagattctgagagattttttattcgttactatgtggatgttccacaggaagaagtgccattcaggtatcatgaactgatcactaaatatgggaagttggagcctttggcagaagtggacctaagaccccagagcagtgcaaaagtagaagtccactttaacgatcaggtggaagaaatgagcattcgtctggaccaaacagtggcagaactaaagaaacagttaaaaactctagtacaattacccacaagcaacatgcttctctactattttgaccatgaagcaccctttggcccagaggaaatgaagtacagctctcgggcattgcattcctttggcattagggatggagataaaatttacgtggaatccaaaacaaaataacctctaccagccttgtgaaaaacatacacataaggacttgttgcagggcatttgtttttaatgtggttttctttaggagggagaggttgtttttgttttgttttgttctgtttaggtttgggaaggattttgtatatttttccccctggagtgagtaggggccatttttgggtgttttctaccacagattgatttggctcagccagcggaattggccacatttccagtgtatgtgccctctctaaggaaagatgacaaagaaatcaccgacttcttactgtgttcactgggatttgcctgccacttggttatcattactgttgggtgaacctgtgaagataacatgaacactgtagccccttagaagggtctcatagagaatttaaacagggtgacaaggaatcttcacaggaagggccagaacttctctctcccagttcttccttccgctaccctccctccttggcttttttggttcagttccatttttttttcattttgacatgtggtttacctaatagttttgttctgttcataattcttatttctcaacctgggtgatttttttgttctcatttctcccttttgaaataattgaaagtgttttaagcatttttaacctgattctaatctcaggtacgcagtaagaagctataactctgttagaacctcgaagagtagatgtagaatgaaaactccaggaaaacttgcagttattctggaagcaccggcagaacagtctgatctctttgtatgttactaactcacttttaatgtccctgtacattatgtcagccattactttcataacatgaaatatgtcagattccagagttcttttatttttgcttattgaatgtatttcctcatatctttctttttcattactttaaactattgggaattgaggcctgacttcataaataattcaatagagtcctggatacgtgcaccaggagagttgagaattagctcataaactatctgtggtgtgtgtggggaatgaagttgggggatgtgggggaagagcttatgactttcccacctgtgtcatccattggaagcccttgctcttgcactttgcattaaaagtgggaaacattaatcaaagggagattttatctttcaaaatcataaaaatgagcaatggagatccaggctgggtatagacaagaataattattttgcaaacacattttcctgacagatttttggaagtaggaaaaaagtatggcaacagtgtcatgaagattgaaactgtaggtgctttgtgtatgtatgcatgagtgcagatgagtttgagagagaaaaagtgtaattgagccctttgcttttgtcagcctgggaaacagatgcgttcttattttttgaagttgtgtgaccctggactgtcccacagcagaaggcagaacaaacacttatgttatgctttaatcataagtggaatggtcacaattaataagatattttatatatggcaaagttttatgaaatgcttttttactattagagacctgtttcttctgttattacagaacacagtgtttatcaactgcggacataattcttttattatacagttgcatgtaaagggagcttctcatttaattcagcggatgtgggtatttttagggcattgtaattgatggttttaataattgctgaataatttttgattaagagaaaaatgtaatacaattactggtctgagttacagaacagaagttaatgaaaaaggctatttgagcatgtgtacttatagattcatttgggtggctgagaaaagatgctgcttttgaaataaaattggtgctgtgtagacacttgtaaccaaaattatttttataacagaactaaaagaaggagagaagaggccatggacctttgagtttacatgttatacctaattgattgtctgcagcttatctgtattttaatattgactttgtccagattcagtgagaacatagtattgacattatgaggcaaaatgctgtcatagccagtattactgatatgttgctacagacacaatgtatagaacataccttttctaaaataggaattatttccagttatgaaaaaggaaaagagtaataaagaaaaccaaatcaaaaccaagggatcctttctacatgtgggtgaacggctgctaaagccacagtagaaaccaatttttgaatttgaattgttgaaatatcctagattgctttaatggaaaaaatccagagtcacatatcttttttattatcaagtttttgcagccttttgccagcattgccataaatacgtaagaaagcagcagatagtataagcccctagttattaagacttctcagttaatattaaggccaaaatataacttgagctaggtataacagggctgaatgctacagtgttgtttttaaagattttgcttatttttaaagacaggaaaattcagttctaaccagatgttccagctatgttactcaaccagcagtggtaggagcagagagcacttgcactaagagctgatcaccatttgagatacgcggcttaacgcacatgtgagtgtagcttgctacatgaaaatgctaggctctagggcatgtaaaacatgaatacagaatactagattgttctaagtaatgtcatttcggtttgtgaatttgatttttcccttcatttcatgtcatattgaaaatgcaaacaaactgctctcaagaacacccagaagctatctgtgttaccagatgtgttgtgaacactctactatttttcataggtgcttccttgaaatatatgtccattgtagtggtggagagggactggactctctcaggctctttacttgccagttgtctcccgcagttaatggaaatatatatacatatatatatatattttatttagaatataatttaaacatgaaggtctattctttgcactttttattaatatatatatagataatctttaaaaaaattaaaattcaagtccattttaaaaaaaaa

SEQ ID NO: 341809 - DNA, 4380 bp, Homo sapiens
acactgggctccggcggccagagtgggggactaggtgaagcggcgccgggccggggctggccgggaccaggcccgaggctgagcggcggcgacagcggtggccgggaggggggaggagaggcgcagccagaggagccgccgcagtagctcccccgcctcccgggctgagggcattttaagaaagaaagatggatcaacctagtggaagaagtttcatgcaagtattatgtgaaaaatatagtcctgaaaattttccttatcgccgtggcccggggatgggagtccatgtcccagccacacctcagggctctcctatgaaagatcgcctcaacctcccaagtgtactagtgttgaacagctgtggaataacctgtgcaggagatgaaaaagaaattgctgctttctgcgctcatgtgtcggaactagatctttctgacaacaaactcgaagactggcatgagaaagaacatgtgctgggtccttctctggggttcgcaaacttgtcctcaacaacagcaaagcttcttgggagacggtccacatgatactacaggagttaccagatttggaggagctcttcctgtgccttaatgactatgaaacagtgtcttgtccttctatttgctgtcattctcttaagctactacatataacagacaataacctccaagactggactgaaatacgaaagttaggagttatgtttccttcactggataccctcgtcctggccaacaatcatttgaatgctattgaggagcctgatgattcattggccaggttgtttcctaatcttcgatccatcagcctccacaagtcaggtttgcagtcctgggaagacattgataaactaaattcatttcccaaactggaagaagtgagattgttaggaattcctcttctgcagccatataccaccgaggagcgaaggaaattggtaatagccagattgccatcagtttccaaacttaatggcagcgttgttactgatggtgaacgagaagattctgagagattttttattcgttactatgtggatgttccacaggaagaagtgccattcaggtatcatgaactgatcactaaatatgggaagttggagcctttggcagaagtggacctaagaccccagagcagtgcaaaagtagaagtccactttaacgatcaggtggaagaaatgagcattcgtctggaccaaacagtggcagaactaaagaaacagttaaaaactctagtacaattacccacaagcaacatgcttctctactattttgaccatgaagcaccctttggcccagaggaaatgaagtacagctctcgggcattgcattcctttggcattagggatggagataaaatttacgtggaatccaaaacaaaataacctctaccagccttgtgaaaaacatacacataaggacttgttgcagggcatttgtttttaatgtggttttctttaggagggagaggttgtttttgttttgttttgttctgtttaggtttgggaaggattttgtatatttttccccctggagtgagtaggggccatttttgggtgttttctaccacagattgatttggctcagccagcggaattggccacatttccagtgtatgtgccctctctaaggaaagatgacaaagaaatcaccgacttcttactgtgttcactgggatttgcctgccacttggttatcattactgttgggtgaacctgtgaagataacatgaacactgtagccccttagaagggtctcatagagaatttaaacagggtgacaaggaatcttcacaggaagggccagaacttctctctcccagttcttccttccgctaccctccctccttggcttttttggttcagttccatttttttttcattttgacatgtggtttacctaatagttttgttctgttcataattcttatttctcaacctgggtgatttttttgttctcatttctcccttttgaaataattgaaagtgttttaagcatttttaacctgattctaatctcaggtacgcagtaagaagctataactctgttagaacctcgaagagtagatgtagaatgaaaactccaggaaaacttgcagttattctggaagcaccggcagaacagtctgatctctttgtatgttactaactcacttttaatgtccctgtacattatgtcagccattactttcataacatgaaatatgtcagattccagagttcttttatttttgcttattgaatgtatttcctcatatctttctttttcattactttaaactattgggaattgaggcctgacttcataaataattcaatagagtcctggatacgtgcaccaggagagttgagaattagctcataaactatctgtggtgtgtgtggggaatgaagttgggggatgtgggggaagagcttatgactttcccacctgtgtcatccattggaagcccttgctcttgcactttgcattaaaagtgggaaacattaatcaaagggagattttatctttcaaaatcataaaaatgagcaatggagatccaggctgggtatagacaagaataattattttgcaaacacattttcctgacagatttttggaagtaggaaaaaagtatggcaacagtgtcatgaagattgaaactgtaggtgctttgtgtatgtatgcatgagtgcagatgagtttgagagagaaaaagtgtaattgagccctttgcttttgtcagcctgggaaacagatgcgttcttattttttgaagttgtgtgaccctggactgtcccacagcagaaggcagaacaaacacttatgttatgctttaatcataagtggaatggtcacaattaataagatattttatatatggcaaagttttatgaaatgcttttttactattagagacctgtttcttctgttattacagaacacagtgtttatcaactgcggacataattcttttattatacagttgcatgtaaagggagcttctcatttaattcagcggatgtgggtatttttagggcattgtaattgatggttttaataattgctgaataatttttgattaagagaaaaatgtaatacaattactggtctgagttacagaacagaagttaatgaaaaaggctatttgagcatgtgtacttatagattcatttgggtggctgagaaaagatgctgcttttgaaataaaattggtgctgtgtagacacttgtaaccaaaattatttttataacagaactaaaagaaggagagaagaggccatggacctttgagtttacatgttatacctaattgattgtctgcagcttatctgtattttaatattgactttgtccagattcagtgagaacatagtattgacattatgaggcaaaatgctgtcatagccagtattactgatatgttgctacagacacaatgtatagaacataccttttctaaaataggaattatttccagttatgaaaaaggaaaagagtaataaagaaaaccaaatcaaaaccaagggatcctttctacatgtgggtgaacggctgctaaagccacagtagaaaccaatttttgaatttgaattgttgaaatatcctagattgctttaatggaaaaaatccagagtcacatatcttttttattatcaagtttttgcagccttttgccagcattgccataaatacgtaagaaagcagcagatagtataagcccctagttattaagacttctcagttaatattaaggccaaaatataacttgagctaggtataacagggctgaatgctacagtgttgtttttaaagattttgcttatttttaaagacaggaaaattcagttctaaccagatgttccagctatgttactcaaccagcagtggtaggagcagagagcacttgcactaagagctgatcaccatttgagatacgcggcttaacgcacatgtgagtgtagcttgctacatgaaaatgctaggctctagggcatgtaaaacatgaatacagaatactagattgttctaagtaatgtcatttcggtttgtgaatttgatttttcccttcatttcatgtcatattgaaaatgcaaacaaactgctctcaagaacacccagaagctatctgtgttaccagatgtgttgtgaacactctactatttttcataggtgcttccttgaaatatatgtccattgtagtggtggagagggactggactctctcaggctctttacttgccagttgtctcccgcagttaatggaaatatatatacatatatatatatattttatttagaatataatttaaacatgaaggtctattctttgcactttttattaatatatatatagataatctttaaaaaaattaaaattcaagtccattttaaaaaaaaa

SEQ ID NO: 341810 - DNA, 4778 bp, Homo sapiens
acactgggctccggcggccagagtgggggactaggtgaagcggcgccgggccggggctggccgggaccaggcccgaggctgagcggcggcgacagcggtggccgggaggggggaggagaggcgcagccagaggagccgccgcagtagctcccccgcctcccgggctgagggcggaaagaaaacatgcatatatgattttcttctgatgaaacctaatgtattcaagaaaaagaatcttgctttttggaaggatggaaaaattgggaataattttttcccctttgataattagaccactcagtactgttgcttagtttttggttcagttactttgatgtggttacaagaggaattttggctgtaatggatttcatacatttttaatgtctaatttaatagggatatagacagttggtttaaaccaacatttttggacgaggagaggctatggaaatgaagaaagaagtgtttagaaatatcacacaaacagcattttaagaaagaaagatggatcaacctagtggaagaagtttcatgcaagtattatgtgaaaaatatagtcctgaaaattttccttatcgccgtggcccggggatgggagtccatgtcccagccacacctcagggctctcctatgaaagatcgcctcaacctcccaagtgtactagtgttgaacagctgtggaataacctgtgcaggagatgaaaaagaaattgctgctttctgcgctcatgtgtcggaactagatctttctgacaacaaactcgaagactggcatgaggtcagtaaaattgtgtcaaatgttcctcagttggagtttctaaacctgagttccaaccctctgaatttgtcggttttagaaagaacatgtgctgggtccttctctggggttcgcaaacttgtcctcaacaacagcaaagcttcttgggagacggtccacatgatactacaggagttaccagatttggaggagctcttcctgtgccttaatgactatgaaacagtgtcttgtccttctatttgctgtcattctcttaagctactacatataacagacaataacctccaagactggactgaaatacgaaagttaggagttatgtttccttcactggataccctcgtcctggccaacaatcatttgaatgctattgaggagcctgatgattcattggccaggttgtttcctaatcttcgatccatcagcctccacaagtcaggtttgcagtcctgggaagacattgataaactaaattcatttcccaaactggaagaagtgagattgttaggaattcctcttctgcagccatataccaccgaggagcgaaggaaattggtaatagccagattgccatcagtttccaaacttaatggcagcgttgttactgatggtgaacgagaagattctgagagattttttattcgttactatgtggatgttccacaggaagaagtgccattcaggtatcatgaactgatcactaaatatgggaagttggagcctttggcagaagtggacctaagaccccagagcagtgcaaaagtagaagtccactttaacgatcaggtggaagaaatgagcattcgtctggaccaaacagtggcagaactaaagaaacagttaaaaactctagtacaattacccacaagcaacatgcttctctactattttgaccatgaagcaccctttggcccagaggaaatgaagtacagctctcgggcattgcattcctttggcattagggatggagataaaatttacgtggaatccaaaacaaaataacctctaccagccttgtgaaaaacatacacataaggacttgttgcagggcatttgtttttaatgtggttttctttaggagggagaggttgtttttgttttgttttgttctgtttaggtttgggaaggattttgtatatttttccccctggagtgagtaggggccatttttgggtgttttctaccacagattgatttggctcagccagcggaattggccacatttccagtgtatgtgccctctctaaggaaagatgacaaagaaatcaccgacttcttactgtgttcactgggatttgcctgccacttggttatcattactgttgggtgaacctgtgaagataacatgaacactgtagccccttagaagggtctcatagagaatttaaacagggtgacaaggaatcttcacaggaagggccagaacttctctctcccagttcttccttccgctaccctccctccttggcttttttggttcagttccatttttttttcattttgacatgtggtttacctaatagttttgttctgttcataattcttatttctcaacctgggtgatttttttgttctcatttctcccttttgaaataattgaaagtgttttaagcatttttaacctgattctaatctcaggtacgcagtaagaagctataactctgttagaacctcgaagagtagatgtagaatgaaaactccaggaaaacttgcagttattctggaagcaccggcagaacagtctgatctctttgtatgttactaactcacttttaatgtccctgtacattatgtcagccattactttcataacatgaaatatgtcagattccagagttcttttatttttgcttattgaatgtatttcctcatatctttctttttcattactttaaactattgggaattgaggcctgacttcataaataattcaatagagtcctggatacgtgcaccaggagagttgagaattagctcataaactatctgtggtgtgtgtggggaatgaagttgggggatgtgggggaagagcttatgactttcccacctgtgtcatccattggaagcccttgctcttgcactttgcattaaaagtgggaaacattaatcaaagggagattttatctttcaaaatcataaaaatgagcaatggagatccaggctgggtatagacaagaataattattttgcaaacacattttcctgacagatttttggaagtaggaaaaaagtatggcaacagtgtcatgaagattgaaactgtaggtgctttgtgtatgtatgcatgagtgcagatgagtttgagagagaaaaagtgtaattgagccctttgcttttgtcagcctgggaaacagatgcgttcttattttttgaagttgtgtgaccctggactgtcccacagcagaaggcagaacaaacacttatgttatgctttaatcataagtggaatggtcacaattaataagatattttatatatggcaaagttttatgaaatgcttttttactattagagacctgtttcttctgttattacagaacacagtgtttatcaactgcggacataattcttttattatacagttgcatgtaaagggagcttctcatttaattcagcggatgtgggtatttttagggcattgtaattgatggttttaataattgctgaataatttttgattaagagaaaaatgtaatacaattactggtctgagttacagaacagaagttaatgaaaaaggctatttgagcatgtgtacttatagattcatttgggtggctgagaaaagatgctgcttttgaaataaaattggtgctgtgtagacacttgtaaccaaaattatttttataacagaactaaaagaaggagagaagaggccatggacctttgagtttacatgttatacctaattgattgtctgcagcttatctgtattttaatattgactttgtccagattcagtgagaacatagtattgacattatgaggcaaaatgctgtcatagccagtattactgatatgttgctacagacacaatgtatagaacataccttttctaaaataggaattatttccagttatgaaaaaggaaaagagtaataaagaaaaccaaatcaaaaccaagggatcctttctacatgtgggtgaacggctgctaaagccacagtagaaaccaatttttgaatttgaattgttgaaatatcctagattgctttaatggaaaaaatccagagtcacatatcttttttattatcaagtttttgcagccttttgccagcattgccataaatacgtaagaaagcagcagatagtataagcccctagttattaagacttctcagttaatattaaggccaaaatataacttgagctaggtataacagggctgaatgctacagtgttgtttttaaagattttgcttatttttaaagacaggaaaattcagttctaaccagatgttccagctatgttactcaaccagcagtggtaggagcagagagcacttgcactaagagctgatcaccatttgagatacgcggcttaacgcacatgtgagtgtagcttgctacatgaaaatgctaggctctagggcatgtaaaacatgaatacagaatactagattgttctaagtaatgtcatttcggtttgtgaatttgatttttcccttcatttcatgtcatattgaaaatgcaaacaaactgctctcaagaacacccagaagctatctgtgttaccagatgtgttgtgaacactctactatttttcataggtgcttccttgaaatatatgtccattgtagtggtggagagggactggactctctcaggctctttacttgccagttgtctcccgcagttaatggaaatatatatacatatatatatatattttatttagaatataatttaaacatgaaggtctattctttgcactttttattaatatatatatagataatctttaaaaaaattaaaattcaagtccattttaaaaaaaaa

SEQ ID NO: 341811 - DNA, 4020 bp, Homo sapiens
acactgggctccggcggccagagtgggggactaggtgaagcggcgccgggccggggctggccgggaccaggcccgaggctgagcggcggcgacagcggtggccgggaggggggaggagaggcgcagccagaggagccgccgcagtagctcccccgcctcccgggctgagggcattttaagaaagaaagatggatcaacctagtggaagaagtttcatgcaagtattatgtgaaaaatatagtcctgaaaattttccttatcgccgtggcccggggatgggagtccatgtcccagccacacctcagggctctcctatgaaagatcgcctcaacctcccaagtgtactagtgttgaacagctgtggaataacctgtgcaggagatgaaaaagaaattgctgctttctgcgctcatgtgtcggaactagatctttctgacaacaaactcgaagactggcatgaggtttgcagtcctgggaagacattgataaactaaattcatttcccaaactggaagaagtgagattgttaggaattcctcttctgcagccatataccaccgaggagcgaaggaaattggtaatagccagattgccatcagtttccaaacttaatggcagcgttgttactgatggtgaacgagaagattctgagagattttttattcgttactatgtggatgttccacaggaagaagtgccattcaggtatcatgaactgatcactaaatatgggaagttggagcctttggcagaagtggacctaagaccccagagcagtgcaaaagtagaagtccactttaacgatcaggtggaagaaatgagcattcgtctggaccaaacagtggcagaactaaagaaacagttaaaaactctagtacaattacccacaagcaacatgcttctctactattttgaccatgaagcaccctttggcccagaggaaatgaagtacagctctcgggcattgcattcctttggcattagggatggagataaaatttacgtggaatccaaaacaaaataacctctaccagccttgtgaaaaacatacacataaggacttgttgcagggcatttgtttttaatgtggttttctttaggagggagaggttgtttttgttttgttttgttctgtttaggtttgggaaggattttgtatatttttccccctggagtgagtaggggccatttttgggtgttttctaccacagattgatttggctcagccagcggaattggccacatttccagtgtatgtgccctctctaaggaaagatgacaaagaaatcaccgacttcttactgtgttcactgggatttgcctgccacttggttatcattactgttgggtgaacctgtgaagataacatgaacactgtagccccttagaagggtctcatagagaatttaaacagggtgacaaggaatcttcacaggaagggccagaacttctctctcccagttcttccttccgctaccctccctccttggcttttttggttcagttccatttttttttcattttgacatgtggtttacctaatagttttgttctgttcataattcttatttctcaacctgggtgatttttttgttctcatttctcccttttgaaataattgaaagtgttttaagcatttttaacctgattctaatctcaggtacgcagtaagaagctataactctgttagaacctcgaagagtagatgtagaatgaaaactccaggaaaacttgcagttattctggaagcaccggcagaacagtctgatctctttgtatgttactaactcacttttaatgtccctgtacattatgtcagccattactttcataacatgaaatatgtcagattccagagttcttttatttttgcttattgaatgtatttcctcatatctttctttttcattactttaaactattgggaattgaggcctgacttcataaataattcaatagagtcctggatacgtgcaccaggagagttgagaattagctcataaactatctgtggtgtgtgtggggaatgaagttgggggatgtgggggaagagcttatgactttcccacctgtgtcatccattggaagcccttgctcttgcactttgcattaaaagtgggaaacattaatcaaagggagattttatctttcaaaatcataaaaatgagcaatggagatccaggctgggtatagacaagaataattattttgcaaacacattttcctgacagatttttggaagtaggaaaaaagtatggcaacagtgtcatgaagattgaaactgtaggtgctttgtgtatgtatgcatgagtgcagatgagtttgagagagaaaaagtgtaattgagccctttgcttttgtcagcctgggaaacagatgcgttcttattttttgaagttgtgtgaccctggactgtcccacagcagaaggcagaacaaacacttatgttatgctttaatcataagtggaatggtcacaattaataagatattttatatatggcaaagttttatgaaatgcttttttactattagagacctgtttcttctgttattacagaacacagtgtttatcaactgcggacataattcttttattatacagttgcatgtaaagggagcttctcatttaattcagcggatgtgggtatttttagggcattgtaattgatggttttaataattgctgaataatttttgattaagagaaaaatgtaatacaattactggtctgagttacagaacagaagttaatgaaaaaggctatttgagcatgtgtacttatagattcatttgggtggctgagaaaagatgctgcttttgaaataaaattggtgctgtgtagacacttgtaaccaaaattatttttataacagaactaaaagaaggagagaagaggccatggacctttgagtttacatgttatacctaattgattgtctgcagcttatctgtattttaatattgactttgtccagattcagtgagaacatagtattgacattatgaggcaaaatgctgtcatagccagtattactgatatgttgctacagacacaatgtatagaacataccttttctaaaataggaattatttccagttatgaaaaaggaaaagagtaataaagaaaaccaaatcaaaaccaagggatcctttctacatgtgggtgaacggctgctaaagccacagtagaaaccaatttttgaatttgaattgttgaaatatcctagattgctttaatggaaaaaatccagagtcacatatcttttttattatcaagtttttgcagccttttgccagcattgccataaatacgtaagaaagcagcagatagtataagcccctagttattaagacttctcagttaatattaaggccaaaatataacttgagctaggtataacagggctgaatgctacagtgttgtttttaaagattttgcttatttttaaagacaggaaaattcagttctaaccagatgttccagctatgttactcaaccagcagtggtaggagcagagagcacttgcactaagagctgatcaccatttgagatacgcggcttaacgcacatgtgagtgtagcttgctacatgaaaatgctaggctctagggcatgtaaaacatgaatacagaatactagattgttctaagtaatgtcatttcggtttgtgaatttgatttttcccttcatttcatgtcatattgaaaatgcaaacaaactgctctcaagaacacccagaagctatctgtgttaccagatgtgttgtgaacactctactatttttcataggtgcttccttgaaatatatgtccattgtagtggtggagagggactggactctctcaggctctttacttgccagttgtctcccgcagttaatggaaatatatatacatatatatatatattttatttagaatataatttaaacatgaaggtctattctttgcactttttattaatatatatatagataatctttaaaaaaattaaaattcaagtccattttaaaaaaaaa

SEQ ID NO: 341812 - DNA, 2097 bp, Homo sapiens
ttcttcatgtatgaggagttgtgtttattaatgctactttttaaattttcctgtgccatgtggcagatgtttattctcttaatgcacttcaggtttgctatctgtaaagcctttgacccaggcctactgagtcaaatctacattcagtgtaacattaaaggtggaaaccaaagggtttgagaaagacgaataaggcctattctccttctgctgcagactttatctttcaaaatcataaaaatgagcaatggagatccaggctgggtatagacaagaataattattttgcaaacacattttcctgacagatttttggaagtaggaaaaaagtatggcaacagtgtcatgaagattgaaactgtaggtgctttgtgtatgtatgcatgagtgcagatgagtttgagagagaaaaagtgtaattgagccctttgcttttgtcagcctgggaaacagatgcgttcttattttttgaagttgtgtgaccctggactgtcccacagcagaaggcagaacaaacacttatgttatgctttaatcataagtggaatggtcacaattaataagatattttatatatggcaaagttttatgaaatgcttttttactattagagacctgtttcttctgttattacagaacacagtgtttatcaactgcggacataattcttttattatacagttgcatgtaaagggagcttctcatttaattcagcggatgtgggtatttttagggcattgtaattgatggttttaataattgctgaataatttttgattaagagaaaaatgtaatacaattactggtctgagttacagaacagaagttaatgaaaaaggctatttgagcatgtgtacttatagattcatttgggtggctgagaaaagatgctgcttttgaaataaaattggtgctgtgtagacacttgtaaccaaaattatttttataacagaactaaaagaaggagagaagaggccatggacctttgagtttacatgttatacctaattgattgtctgcagcttatctgtattttaatattgactttgtccagattcagtgagaacatagtattgacattatgaggcaaaatgctgtcatagccagtattactgatatgttgctacagacacaatgtatagaacataccttttctaaaataggaattatttccagttatgaaaaaggaaaagagtaataaagaaaaccaaatcaaaaccaagggatcctttctacatgtgggtgaacggctgctaaagccacagtagaaaccaatttttgaatttgaattgttgaaatatcctagattgctttaatggaaaaaatccagagtcacatatcttttttattatcaagtttttgcagccttttgccagcattgccataaatacgtaagaaagcagcagatagtataagcccctagttattaagacttctcagttaatattaaggccaaaatataacttgagctaggtataacagggctgaatgctacagtgttgtttttaaagattttgcttatttttaaagacaggaaaattcagttctaaccagatgttccagctatgttactcaaccagcagtggtaggagcagagagcacttgcactaagagctgatcaccatttgagatacgcggcttaacgcacatgtgagtgtagcttgctacatgaaaatgctaggctctagggcatgtaaaacatgaatacagaatactagattgttctaagtaatgtcatttcggtttgtgaatttgatttttcccttcatttcatgtcatattgaaaatgcaaacaaactgctctcaagaacacccagaagctatctgtgttaccagatgtgttgtgaacactctactatttttcataggtgcttccttgaaatatatgtccattgtagtggtggagagggactggactctctcaggctctttacttgccagttgtctcccgcagttaatggaaatatatatacatatatatatatattttatttagaatataatttaaacatgaaggtctattctttgcactttttattaatatatatatagataatctttaaaaaaattaaaattcaagtccattttaaaaaaaaa

SEQ ID NO: 341813 - DNA, 822 bp, Homo sapiens
acactgggctccggcggccagagtgggggactaggtgaagcggcgccgggccggggctggccgggaccaggcccgaggctgagcggcggcgacagcggtggccgggaggggggaggagaggcgcagccagaggagccgccgcagtagctcccccgcctcccgggctgagggcggaaagaaaacatgcatatatgattttcttctgatgaaacctaatgtattcaagaaaaagaatcttgctttttggaaggatggaaaaattgggaataattttttcccctttgataattagaccactcagtactgttgcttagtttttggttcagttactttgatgtggttacaagaggaattttggctgtaatggatttcatacatttttgtaagttatgtttccatgtctcgtgtgtgatgttgtgtactgttgacatgaaatactccttttttggtaaagatggattggcttaacagattagagctacagaaagtatgacttagcacgctggtaaggccacaaaaacccaagcaagttcccccagtttcgtatcctgtaaatagagataagttagtttttctgtttcagagagtggttatggaaaactactaggctttaaaatgattgttaatctcagtgtggggacatttggtttggggacatcagttcaggagtaaatgtatctgatcctgctttgaataaatgcaacttgaaagccttggaattttaccagatcgaatctgggccaaatagaaaggtaggagtagatgtaaatttgtttgtaaaggagttggggatgtgtgtggtggggcagagtgagggtggag

SEQ ID NO: 341814 - DNA, 5040 bp, Homo sapiens
acactgggctccggcggccagagtgggggactaggtgaagcggcgccgggccggggctggccgggaccaggcccgaggctgagcggcggcgacagcggtggccgggaggggggaggagaggcgcagccagaggagccgccgcagtagctcccccgcctcccgggctgagggcggaaagaaaacatgcatatatgattttcttctgatgaaacctaatgtattcaagaaaaagaatcttgctttttggaaggatggaaaaattgggaataattttttcccctttgataattagaccactcagtactgttgcttagtttttggttcagttactttgatgtggttacaagaggaattttggctgtaatggatttcatacatttttgtaagttatgtttccatgtctcgtgtgtgatgttgtgtactgttgacatgaaatactccttttttggtaaagatggattggcttaacagattagagctacagaaagtatgacttagcacgctggtaaggccacaaaaacccaagcaagttcccccagtttcgtatcctgtaaatagagataagttagtttttctgtttcagagagtggttatggaaaactactaggctttaaaatgattgttaatctcagtgtggggacatttggtttggggacatcagttcaggagtaaatgtatctgatcctgctttgaataaatgcaacttgaaagccttggaattttaccagatcgaatctgggccaaatagaaagcattttaagaaagaaagatggatcaacctagtggaagaagtttcatgcaagtattatgtgaaaaatatagtcctgaaaattttccttatcgccgtggcccggggatgggagtccatgtcccagccacacctcagggctctcctatgaaagatcgcctcaacctcccaagtgtactagtgttgaacagctgtggaataacctgtgcaggagatgaaaaagaaattgctgctttctgcgctcatgtgtcggaactagatctttctgacaacaaactcgaagactggcatgaggtcagtaaaattgtgtcaaatgttcctcagttggagtttctaaacctgagttccaaccctctgaatttgtcggttttagaaagaacatgtgctgggtccttctctggggttcgcaaacttgtcctcaacaacagcaaagcttcttgggagacggtccacatgatactacaggagttaccagatttggaggagctcttcctgtgccttaatgactatgaaacagtgtcttgtccttctatttgctgtcattctcttaagctactacatataacagacaataacctccaagactggactgaaatacgaaagttaggagttatgtttccttcactggataccctcgtcctggccaacaatcatttgaatgctattgaggagcctgatgattcattggccaggttgtttcctaatcttcgatccatcagcctccacaagtcaggtttgcagtcctgggaagacattgataaactaaattcatttcccaaactggaagaagtgagattgttaggaattcctcttctgcagccatataccaccgaggagcgaaggaaattggtaatagccagattgccatcagtttccaaacttaatggcagcgttgttactgatggtgaacgagaagattctgagagattttttattcgttactatgtggatgttccacaggaagaagtgccattcaggtatcatgaactgatcactaaatatgggaagttggagcctttggcagaagtggacctaagaccccagagcagtgcaaaagtagaagtccactttaacgatcaggtggaagaaatgagcattcgtctggaccaaacagtggcagaactaaagaaacagttaaaaactctagtacaattacccacaagcaacatgcttctctactattttgaccatgaagcaccctttggcccagaggaaatgaagtacagctctcgggcattgcattcctttggcattagggatggagataaaatttacgtggaatccaaaacaaaataacctctaccagccttgtgaaaaacatacacataaggacttgttgcagggcatttgtttttaatgtggttttctttaggagggagaggttgtttttgttttgttttgttctgtttaggtttgggaaggattttgtatatttttccccctggagtgagtaggggccatttttgggtgttttctaccacagattgatttggctcagccagcggaattggccacatttccagtgtatgtgccctctctaaggaaagatgacaaagaaatcaccgacttcttactgtgttcactgggatttgcctgccacttggttatcattactgttgggtgaacctgtgaagataacatgaacactgtagccccttagaagggtctcatagagaatttaaacagggtgacaaggaatcttcacaggaagggccagaacttctctctcccagttcttccttccgctaccctccctccttggcttttttggttcagttccatttttttttcattttgacatgtggtttacctaatagttttgttctgttcataattcttatttctcaacctgggtgatttttttgttctcatttctcccttttgaaataattgaaagtgttttaagcatttttaacctgattctaatctcaggtacgcagtaagaagctataactctgttagaacctcgaagagtagatgtagaatgaaaactccaggaaaacttgcagttattctggaagcaccggcagaacagtctgatctctttgtatgttactaactcacttttaatgtccctgtacattatgtcagccattactttcataacatgaaatatgtcagattccagagttcttttatttttgcttattgaatgtatttcctcatatctttctttttcattactttaaactattgggaattgaggcctgacttcataaataattcaatagagtcctggatacgtgcaccaggagagttgagaattagctcataaactatctgtggtgtgtgtggggaatgaagttgggggatgtgggggaagagcttatgactttcccacctgtgtcatccattggaagcccttgctcttgcactttgcattaaaagtgggaaacattaatcaaagggagattttatctttcaaaatcataaaaatgagcaatggagatccaggctgggtatagacaagaataattattttgcaaacacattttcctgacagatttttggaagtaggaaaaaagtatggcaacagtgtcatgaagattgaaactgtaggtgctttgtgtatgtatgcatgagtgcagatgagtttgagagagaaaaagtgtaattgagccctttgcttttgtcagcctgggaaacagatgcgttcttattttttgaagttgtgtgaccctggactgtcccacagcagaaggcagaacaaacacttatgttatgctttaatcataagtggaatggtcacaattaataagatattttatatatggcaaagttttatgaaatgcttttttactattagagacctgtttcttctgttattacagaacacagtgtttatcaactgcggacataattcttttattatacagttgcatgtaaagggagcttctcatttaattcagcggatgtgggtatttttagggcattgtaattgatggttttaataattgctgaataatttttgattaagagaaaaatgtaatacaattactggtctgagttacagaacagaagttaatgaaaaaggctatttgagcatgtgtacttatagattcatttgggtggctgagaaaagatgctgcttttgaaataaaattggtgctgtgtagacacttgtaaccaaaattatttttataacagaactaaaagaaggagagaagaggccatggacctttgagtttacatgttatacctaattgattgtctgcagcttatctgtattttaatattgactttgtccagattcagtgagaacatagtattgacattatgaggcaaaatgctgtcatagccagtattactgatatgttgctacagacacaatgtatagaacataccttttctaaaataggaattatttccagttatgaaaaaggaaaagagtaataaagaaaaccaaatcaaaaccaagggatcctttctacatgtgggtgaacggctgctaaagccacagtagaaaccaatttttgaatttgaattgttgaaatatcctagattgctttaatggaaaaaatccagagtcacatatcttttttattatcaagtttttgcagccttttgccagcattgccataaatacgtaagaaagcagcagatagtataagcccctagttattaagacttctcagttaatattaaggccaaaatataacttgagctaggtataacagggctgaatgctacagtgttgtttttaaagattttgcttatttttaaagacaggaaaattcagttctaaccagatgttccagctatgttactcaaccagcagtggtaggagcagagagcacttgcactaagagctgatcaccatttgagatacgcggcttaacgcacatgtgagtgtagcttgctacatgaaaatgctaggctctagggcatgtaaaacatgaatacagaatactagattgttctaagtaatgtcatttcggtttgtgaatttgatttttcccttcatttcatgtcatattgaaaatgcaaacaaactgctctcaagaacacccagaagctatctgtgttaccagatgtgttgtgaacactctactatttttcataggtgcttccttgaaatatatgtccattgtagtggtggagagggactggactctctcaggctctttacttgccagttgtctcccgcagttaatggaaatatatatacatatatatatatattttatttagaatataatttaaacatgaaggtctattctttgcactttttattaatatatatatagataatctttaaaaaaattaaaattcaagtccattttaaaaaaaaa

SEQ ID NO: 341815 - DNA, 4123 bp, Homo sapiens
acactgggctccggcggccagagtgggggactaggtgaagcggcgccgggccggggctggccgggaccaggcccgaggctgagcggcggcgacagcggtggccgggaggggggaggagaggcgcagccagaggagccgccgcagtagctcccccgcctcccgggctgagggcattttaagaaagaaagatggatcaacctagtggaagaagtttcatgcaagtattatgtgaaaaatatagtcctgaaaattttccttatcgccgtggcccggggatgggagtccatgtcccagccacacctcagggctctcctatgaaagatcgcctcaacctcccaagtgtactagtgttgaacagctgtggaataacctgtgcaggagatgaaaaagaaattgctgctttctgcgctcatgtgtcggaactagatctttctgacaacaaactcgaagactggcatgagaaagaacatgtgctgggtccttctctggggttcgcaaacttgtcctcaacaacagcaaagcttcttgggagacggtccacatgatactacaggagttaccagagtttgcagtcctgggaagacattgataaactaaattcatttcccaaactggaagaagtgagattgttaggaattcctcttctgcagccatataccaccgaggagcgaaggaaattggtaatagccagattgccatcagtttccaaacttaatggcagcgttgttactgatggtgaacgagaagattctgagagattttttattcgttactatgtggatgttccacaggaagaagtgccattcaggtatcatgaactgatcactaaatatgggaagttggagcctttggcagaagtggacctaagaccccagagcagtgcaaaagtagaagtccactttaacgatcaggtggaagaaatgagcattcgtctggaccaaacagtggcagaactaaagaaacagttaaaaactctagtacaattacccacaagcaacatgcttctctactattttgaccatgaagcaccctttggcccagaggaaatgaagtacagctctcgggcattgcattcctttggcattagggatggagataaaatttacgtggaatccaaaacaaaataacctctaccagccttgtgaaaaacatacacataaggacttgttgcagggcatttgtttttaatgtggttttctttaggagggagaggttgtttttgttttgttttgttctgtttaggtttgggaaggattttgtatatttttccccctggagtgagtaggggccatttttgggtgttttctaccacagattgatttggctcagccagcggaattggccacatttccagtgtatgtgccctctctaaggaaagatgacaaagaaatcaccgacttcttactgtgttcactgggatttgcctgccacttggttatcattactgttgggtgaacctgtgaagataacatgaacactgtagccccttagaagggtctcatagagaatttaaacagggtgacaaggaatcttcacaggaagggccagaacttctctctcccagttcttccttccgctaccctccctccttggcttttttggttcagttccatttttttttcattttgacatgtggtttacctaatagttttgttctgttcataattcttatttctcaacctgggtgatttttttgttctcatttctcccttttgaaataattgaaagtgttttaagcatttttaacctgattctaatctcaggtacgcagtaagaagctataactctgttagaacctcgaagagtagatgtagaatgaaaactccaggaaaacttgcagttattctggaagcaccggcagaacagtctgatctctttgtatgttactaactcacttttaatgtccctgtacattatgtcagccattactttcataacatgaaatatgtcagattccagagttcttttatttttgcttattgaatgtatttcctcatatctttctttttcattactttaaactattgggaattgaggcctgacttcataaataattcaatagagtcctggatacgtgcaccaggagagttgagaattagctcataaactatctgtggtgtgtgtggggaatgaagttgggggatgtgggggaagagcttatgactttcccacctgtgtcatccattggaagcccttgctcttgcactttgcattaaaagtgggaaacattaatcaaagggagattttatctttcaaaatcataaaaatgagcaatggagatccaggctgggtatagacaagaataattattttgcaaacacattttcctgacagatttttggaagtaggaaaaaagtatggcaacagtgtcatgaagattgaaactgtaggtgctttgtgtatgtatgcatgagtgcagatgagtttgagagagaaaaagtgtaattgagccctttgcttttgtcagcctgggaaacagatgcgttcttattttttgaagttgtgtgaccctggactgtcccacagcagaaggcagaacaaacacttatgttatgctttaatcataagtggaatggtcacaattaataagatattttatatatggcaaagttttatgaaatgcttttttactattagagacctgtttcttctgttattacagaacacagtgtttatcaactgcggacataattcttttattatacagttgcatgtaaagggagcttctcatttaattcagcggatgtgggtatttttagggcattgtaattgatggttttaataattgctgaataatttttgattaagagaaaaatgtaatacaattactggtctgagttacagaacagaagttaatgaaaaaggctatttgagcatgtgtacttatagattcatttgggtggctgagaaaagatgctgcttttgaaataaaattggtgctgtgtagacacttgtaaccaaaattatttttataacagaactaaaagaaggagagaagaggccatggacctttgagtttacatgttatacctaattgattgtctgcagcttatctgtattttaatattgactttgtccagattcagtgagaacatagtattgacattatgaggcaaaatgctgtcatagccagtattactgatatgttgctacagacacaatgtatagaacataccttttctaaaataggaattatttccagttatgaaaaaggaaaagagtaataaagaaaaccaaatcaaaaccaagggatcctttctacatgtgggtgaacggctgctaaagccacagtagaaaccaatttttgaatttgaattgttgaaatatcctagattgctttaatggaaaaaatccagagtcacatatcttttttattatcaagtttttgcagccttttgccagcattgccataaatacgtaagaaagcagcagatagtataagcccctagttattaagacttctcagttaatattaaggccaaaatataacttgagctaggtataacagggctgaatgctacagtgttgtttttaaagattttgcttatttttaaagacaggaaaattcagttctaaccagatgttccagctatgttactcaaccagcagtggtaggagcagagagcacttgcactaagagctgatcaccatttgagatacgcggcttaacgcacatgtgagtgtagcttgctacatgaaaatgctaggctctagggcatgtaaaacatgaatacagaatactagattgttctaagtaatgtcatttcggtttgtgaatttgatttttcccttcatttcatgtcatattgaaaatgcaaacaaactgctctcaagaacacccagaagctatctgtgttaccagatgtgttgtgaacactctactatttttcataggtgcttccttgaaatatatgtccattgtagtggtggagagggactggactctctcaggctctttacttgccagttgtctcccgcagttaatggaaatatatatacatatatatatatattttatttagaatataatttaaacatgaaggtctattctttgcactttttattaatatatatatagataatctttaaaaaaattaaaattcaagtccattttaaaaaaaaa

SEQ ID NO: 341816 - DNA, 1014 bp, Homo sapiens
acactgggctccggcggccagagtgggggactaggtgaagcggcgccgggccggggctggccgggaccaggcccgaggctgagcggcggcgacagcggtggccgggaggggggaggagaggcgcagccagaggagccgccgcagtagctcccccgcctcccgggctgagggcggaaagaaaacatgcatatatgattttcttctgatgaaacctaatgtattcaagaaaaagaatcttgctttttggaaggatggaaaaattgggaataattttttcccctttgataattagaccactcagtactgttgcttagtttttggttcagttactttgatgtggttacaagaggaattttggctgtaatggatttcatacatttttaatgtctaatttaatagggatatagacagttggtttaaaccaacatttttggacgaggagaggctatggaaatgaagaaagaagtgtttagaaatatcacacaaacagcattttaagaaagaaagatggatcaacctagtggaagaagtttcatgcaagtattatgtgaaaaatatagtcctgaaaattttccttatcgccgtggcccggggatgggagtccatgtcccagccacacctcagggctctcctatgaaagatcgcctcaacctcccaagtgtactagtgttgaacagctgtggaataacctgtgcaggagatgaaaaagaaattgctgctttctgcgctcatgtgtcggaactagatctttctgacaacaaactcgaagactggcatgaggtgaagtttttatattgctacattttagtgaaaagcagcaataaccattgtgtcattgtttatgttattatatgttctgctaaattctgttctcacttgatgtctgtatgacttcttgttgtctgtatatcttattgtctgtatgtctttatatcaagataaataaggcctataatcccagtgctaaggaggctgaggcaggaggatcacttgagcccaggaattcaagaccag

SEQ ID NO: 341817 - DNA, 3991 bp, Homo sapiens
gcggccgcaccatcgactcgccaacgagagaaggtcctggggcacggacaccgacgggttgcgactgtgacgtgaggtgttctcgcgcgcgctagcgcgcgtctccgggtgccgctgacgggcgtgcgcgcttgtgcggagccggaggtgggggccgaaccagccaaggttgcgggggccgcagagccggacgaagacggagggcggagccggcttcgggactgcggagactacacaccgagcgagcgcctgggcccgaagggagcgatgctgtggttccagggcgccattccggccgccatcgcgacggccaaaaggagcggcgcggtcttcgtggtgttcgtggcaggtgatgatgaacagtctacacagatggctgcaagttgggaagatgataaagttacagaagcatcttcaaacagttttgttgctattaaaatcgataccaaaagtgaagcctgcctacagttttcacaaatctatcctgtagtgtgtgttccatccagtttctttattggagacagtggaattcccttggaagtaatagcaggaagtgtttctgcagatgaacttgttacaagaattcacaaggtccgacagatgcatttgctaaaaagtgaaacatcagtagcaaatggcagtcagtcagaaagttcagtgtctactccatctgcgtcatttgaacctaacaacacttgtgaaaactctcagtccagaaatgcagagctttgtgagataccacccacttctgatacaaagtcagatactgcaacaggaggagaaagtgcaggccatgccacttcctctcaggagcctagtggatgctcagatcagagacctgcagaggacctcaacatccgagtggaaagactaacaaaaaaacttgaagaaaggagagaagagaaaagaaaagaggaagaacagagagaaattaagaaggaaattgagaggagaaaaactggaaaagaaatgttggattataaaagaaaacaagaagaagaattaacaaaaagaatgctggaggaaagaaacagagagaaagcagaagatagggcagctcgagaacgtataaaacagcagattgcattggaccgtgcagagagagctgctcgttttgcaaagacaaaggaagaagtagaggctgccaaagctgctgccttgctagcaaaacaggcagaaatggaagtcaagagggaatcttatgcaagagaaagaagcactgttgcaagaattcaattccgtcttcctgatggttcttcctttacaaatcagttcccttctgatgctcctctagaagaggcaaggcagtttgctgcacagactgttggcaacacttacggtaatttttcgttagcaaccatgtttcccaggagggaatttaccaaagaagattataaaaagaagttactggatttggaacttgccccaagcgcttcggtggtactgttgccagtttgtttattaatttctaggcaggaagaccaactgcatccattgtacactcttccagcggagacatttggaccttgttgggaacagtgctttatccattccttgccatctggagattaattagcaatttcttgtttagtaatccgcctcccacacagacttcagtgagagtaacatcgtcagaacccccaaaccctgcatcatctagcaaatcagaaaaaagggaaccagtgagaaaaagagtgctggaaaaacgtggagacgactttaaaaaggaggggaaaatttatagattaaggactcaagatgatggtgaagatgaaaacaacacttggaatggaaattccactcaacagatgtagtgtgacaagtataatatgtgcaataatcattgtttctcttatgatttaattcaactaaaattctactggagaagtgggactgctttatattttccaactggtctataaaatgtctctttattcctgcttagtgggtgtgggttgaaggtgtttaactcagaaaagtaaagacaggaaataactctctgctaggtccttgcttatatggcaaccactgctagaaccctaaaagaaccaaaaatctgccacagcctgcctccatcagcttcttatttagtatttcatatgcccattagccctatgcttcagatgacacgttttgtttagagctactttgctccaagactcttaagcccaaagtaactggtatgtcactgagtaacttgactcggtgtcagagcattttaactagccactcagatgagaatttatgtttaacttctctttttactcatcagctgcaagcaaaatcttgtagtttttaatcttaaacactgaataaaaaaactttcccctaaattggaatgatcttagttttgctttgagttttgttatctagcatctttttgttgcacagggctctattgaggtcctatgtctctgatttttttttttccccagtattgccctggagctgtctctggaaagtagctggcgaggttaccttaactatcactgaagaaagaaattttctgacacactgatggcatgtgacttgtctcctaagtcagtgaggcatcactttgtttgcataaagtatacggtttgttaaggcctttgttcttgtgagatgcaaaacagctgctagtctgcaacctagttttccctctcacctttaactgacgttttgtcctcaataattacacaaggacctagagtacctataggacaaaaagtatagaataaaaatatgcctttagtcatttggtttttcttaaaaagttgagattcttaatctgacttacatgttactttatccgtatgtctttgttagtggagaccgctaaactaatgatgtttgaaaacagttcctctgttttagattggaagatagcactctagagtggacatacggaaagactgtgactttattttgtaatgggaggaagaaattttctcagagcaaactttctattttttacctgtgaaataacagtgactttttaaaatggtgacagtgttggcaaggaaacagcaacacaggctgcgctgttggtaggagtgaaaaccagtataattcttctgaaaaacatttatcagaaacttaaaatatttcataccgtttgatccagtagcttcttctaaatcataaatgcagacaatgtttaggtaaagacatactcattaagtgttatttattttactcaagaactggaaaccaactaaatgccttctatagaagtaatttttgatgaggagaaatggtacaatactaattaacaacttggtttaacatgtttactgagcatctgttaagtgttgggggaaaaagcagcaggatccagagctataggtacagtgtgatctcagctttgcaaacacattttctacatagatagtactaggtattaatagatatgtaaagaaagaaatcacaccattaataatggtaagattggtttatgtgattttagtggtatttttggcacccttatatatgttttccaaactttcagcagtgatattatttccataacttaaaaagtgagtttgaaaaagaaaatctccagcaagcatctcatttaaataaaggtttgtcatctttaaaaatacagcaatatgtgactttttaaaaaagctgtcaaataggtgtgaccctactaataattattagaaatacatttaaaaacatcgagtacctcaagtcagtttgccttgaaaaatatcaaatataactcttagagaaatgtacataaaagaatgcttcgtaattttggagtaggaggttccctcctcaattttgtatttttaaaaagtacatggtaaaaaaaaaaattcacaacagtatataaggctgtaaaatgagaattctgccccctcacctcttaccccagtactattctccagaggtaatctattaacaatttcttatgtaattttcagaaaatttgtatgcgtatataagcaaatatgtaatctttattttttaaataaatgggatcatattatatattcta

SEQ ID NO: 341818 - DNA, 4562 bp, Homo sapiens
gcggccgcaccatcgactcgccaacgagagaaggtcctggggcacggacaccgacgggttgcgactgtgacgtgaggtgttctcgcgcgcgctagcgcgcgtctccgggtgccgctgacgggcgtgcgcgcttgtgcggagccggaggtgggggccgaaccagccaaggttgcgggggccgcagagccggacgaagacggagggcggagccggcttcgggactgcggagactacacaccgagcgagcgcctgggcccgaagggagcgatgctgtggttccagggcgccattccggccgccatcgcgacggccaaaaggagcggcgcggtcttcgtggtgttcgtggcaggtgatgatgaacagtctacacagatggctgcaagttgggaagatgataaagttacagaagcatcttcaaacagttttgttgctattaaaatcgataccaaaagtgaagcctgcctacagttttcacaaatctgtatcctttcagtaaagaatggcttatatatatacatttatttaccttccttttggttaatttatgaaatttagaaattattcatttttatttaggaaatcatacattcttttttatggaaactttattactaagtgtcctcatttaaaaaaaatgttattataggaaatttcaaacatatataaaagtaactcaatggtgtagtgcaccccatacattgagataatatattgcagctaaagataggatagggagtttttaaaatgtgaatatctgaaaaacaatatagatcagttgggttggaatgttacaagtagcttgcaagaggcagctggcagcaagatggatagaaaaggaagttatgatagaggagaatgtagtagattcttcactagaatatacctcataaattaacatgtcacatgtattaatactacaggtataatgatgcagtacttgaaattatttaataaatgttagattatattgtgaaaatcacaaagatcatttgttttcctttgttaccaatagtgtttcgtaaaactatcctttcgtttcacatgaattgttagacttcattaaactgtacagatcctgtagtgtgtgttccatccagtttctttattggagacagtggaattcccttggaagtaatagcaggaagtgtttctgcagatgaacttgttacaagaattcacaaggtccgacagatgcatttgctaaaaagtgaaacatcagtagcaaatggcagtcagtcagaaagttcagtgtctactccatctgcgtcatttgaacctaacaacacttgtgaaaactctcagtccagaaatgcagagctttgtgagataccacccacttctgatacaaagtcagatactgcaacaggaggagaaagtgcaggccatgccacttcctctcaggagcctagtggatgctcagatcagagacctgcagaggacctcaacatccgagtggaaagactaacaaaaaaacttgaagaaaggagagaagagaaaagaaaagaggaagaacagagagaaattaagaaggaaattgagaggagaaaaactggaaaagaaatgttggattataaaagaaaacaagaagaagaattaacaaaaagaatgctggaggaaagaaacagagagaaagcagaagatagggcagctcgagaacgtataaaacagcagattgcattggaccgtgcagagagagctgctcgttttgcaaagacaaaggaagaagtagaggctgccaaagctgctgccttgctagcaaaacaggcagaaatggaagtcaagagggaatcttatgcaagagaaagaagcactgttgcaagaattcaattccgtcttcctgatggttcttcctttacaaatcagttcccttctgatgctcctctagaagaggcaaggcagtttgctgcacagactgttggcaacacttacggtaatttttcgttagcaaccatgtttcccaggagggaatttaccaaagaagattataaaaagaagttactggatttggaacttgccccaagcgcttcggtggtactgttgccagcaggaagaccaactgcatccattgtacactcttccagcggagacatttggaccttgttgggaacagtgctttatccattccttgccatctggagattaattagcaatttcttgtttagtaatccgcctcccacacagacttcagtgagagtaacatcgtcagaacccccaaaccctgcatcatctagcaaatcagaaaaaagggaaccagtgagaaaaagagtgctggaaaaacgtggagacgactttaaaaaggaggggaaaatttatagattaaggactcaagatgatggtgaagatgaaaacaacacttggaatggaaattccactcaacagatgtagtgtgacaagtataatatgtgcaataatcattgtttctcttatgatttaattcaactaaaattctactggagaagtgggactgctttatattttccaactggtctataaaatgtctctttattcctgcttagtgggtgtgggttgaaggtgtttaactcagaaaagtaaagacaggaaataactctctgctaggtccttgcttatatggcaaccactgctagaaccctaaaagaaccaaaaatctgccacagcctgcctccatcagcttcttatttagtatttcatatgcccattagccctatgcttcagatgacacgttttgtttagagctactttgctccaagactcttaagcccaaagtaactggtatgtcactgagtaacttgactcggtgtcagagcattttaactagccactcagatgagaatttatgtttaacttctctttttactcatcagctgcaagcaaaatcttgtagtttttaatcttaaacactgaataaaaaaactttcccctaaattggaatgatcttagttttgctttgagttttgttatctagcatctttttgttgcacagggctctattgaggtcctatgtctctgatttttttttttccccagtattgccctggagctgtctctggaaagtagctggcgaggttaccttaactatcactgaagaaagaaattttctgacacactgatggcatgtgacttgtctcctaagtcagtgaggcatcactttgtttgcataaagtatacggtttgttaaggcctttgttcttgtgagatgcaaaacagctgctagtctgcaacctagttttccctctcacctttaactgacgttttgtcctcaataattacacaaggacctagagtacctataggacaaaaagtatagaataaaaatatgcctttagtcatttggtttttcttaaaaagttgagattcttaatctgacttacatgttactttatccgtatgtctttgttagtggagaccgctaaactaatgatgtttgaaaacagttcctctgttttagattggaagatagcactctagagtggacatacggaaagactgtgactttattttgtaatgggaggaagaaattttctcagagcaaactttctattttttacctgtgaaataacagtgactttttaaaatggtgacagtgttggcaaggaaacagcaacacaggctgcgctgttggtaggagtgaaaaccagtataattcttctgaaaaacatttatcagaaacttaaaatatttcataccgtttgatccagtagcttcttctaaatcataaatgcagacaatgtttaggtaaagacatactcattaagtgttatttattttactcaagaactggaaaccaactaaatgccttctatagaagtaatttttgatgaggagaaatggtacaatactaattaacaacttggtttaacatgtttactgagcatctgttaagtgttgggggaaaaagcagcaggatccagagctataggtacagtgtgatctcagctttgcaaacacattttctacatagatagtactaggtattaatagatatgtaaagaaagaaatcacaccattaataatggtaagattggtttatgtgattttagtggtatttttggcacccttatatatgttttccaaactttcagcagtgatattatttccataacttaaaaagtgagtttgaaaaagaaaatctccagcaagcatctcatttaaataaaggtttgtcatctttaaaaatacagcaatatgtgactttttaaaaaagctgtcaaataggtgtgaccctactaataattattagaaatacatttaaaaacatcgagtacctcaagtcagtttgccttgaaaaatatcaaatataactcttagagaaatgtacataaaagaatgcttcgtaattttggagtaggaggttccctcctcaattttgtatttttaaaaagtacatggtaaaaaaaaaaattcacaacagtatataaggctgtaaaatgagaattctgccccctcacctcttaccccagtactattctccagaggtaatctattaacaatttcttatgtaattttcagaaaatttgtatgcgtatataagcaaatatgtaatctttattttttaaataaatgggatcatattatatattcta
